United States Patent Application Publication US 2026/0375159 A1, published November 26, 2026 (application 19/636,504).

The application's sequence listing, which the Patent Office published only in electronic form, follows.

SEQUENCE LISTING (35060 sequences)

SEQ ID NO: 1 - protein, 1390 aa, Taeniopygia guttata
MASCPKPGPPVSAGAMSLESGLTTHSVLAIERGPNSLANSGSDFGGGGLGLPLRLLRVSVGTQTSRSDWVDLVSWSHPGPTSKSQQVDLVSLFPKHRVDLLSKNDQVDLVAQFLPSKFPPNLAENDLALLVNLEFYRSDLHVYECVHFAAHWEGLSGLPEVYEQLAPQPCVGETLHSSLPRDSELFVPEEGSSEKESEDAPKTSPPTPGKHGLEQTGEEKVMVTVPDKNPPCPCCGTRVNSVLNLIEHLKVSHGKRGVCFRCAKCGKENSNYHSVVCHFPKCRGPETEKAPAGEWICEVCNRDFTTKIGLGQHKRLAHPAVRNQERIVASQPKETSNRGAHKRCWTKEEEELLIRLEAQFEGNKNINKLIAEHITTKTAKQISDKRRLLSRKPAEEPREEPGTCHHTRRAAASLRTEPEMSHHAQAEDRDNGPGRRPLPGRAAAGGRTMDEIRRHPDKGNGQQRPTKQKSEEQLQAYYKKTLEERLSAGALNTFPRAFKQVMEGRDIKLVINQTAQDCFGCLESISQIRTATRDKKDTVTREKHPKKPFQKWMKDRAIKKGNYLRFQRLFYLDRGKLAKIILDDIECLSCDIPLSEIYSVFKTRWETTGSFKSLGDFKTYGKADNTAFRELITAKEIEKNVQEMSKGSAPGPDGITLGDVVKMDPEFSRTMEIFNLWLTTGKIPDMVRGCRTVLIPKSSKPDRLKDINNWRPITIGSILLRLFSRIVTARLSKACPLNPRQRGFIRAAGCSENLKLLQTIIWSAKREHRPLGVVFVDIAKAFDTVSHQHIIHALQQREVDPHIVGLVSNMYENISTYITTKRNTHTDKIQIRVGVKQGDPMSPLLFNLAMDPLLCKLEESGKGYHRGQSSITAMAFADDLVLLSDSWENMNTNISILETFCNLTGLKTQGQKCHGFYIKPTKDSYTINDCAAWTINGTPLNMIDPGESEKYLGLQFDPWIGIARSGLSTKLDFWLQRIDQAPLKPLQKTDILKTYTIPRLIYIADHSEVKTALLETLDQKIRTAVKEWLHLPPCTCDAILYSSTRDGGLGITKLAGLIPSVQARRLHRIAQSSDDTMKCFMEKEKMEQLHKKLWIQAGGDRENIPSIWEAPPSSEPPNNVSTNSEWEAPTQKDKFPKPCNWRKNEFKKWTKLASQGRGIVNFERDKISNHWIQYYRRIPHRKLLTALQLRANVYPTREFLARGRQDQYIKACRHCDADIESCAHIIGNCPVTQDARIKRHNYICELLLEEAKKKDWVVFKEPHIRDSNKELYKPDLIFVKDARALVVDVTVRYEAAKSSLEEAAAEKVRKYKHLETEVRHLTNAKDVTFVGFPLGARGKWHQDNFKLLTELGLSKSRQVKMAETFSTVALFSSVDIVHMFASRARKSMVM

SEQ ID NO: 2 - protein, 1335 aa, Zonotrichia albicollis
MAYCLKPGPPVSDRGKEFGSGLTTHPEPESESGHDPTVPNPGPSLGAGEGAQPLPLLRVSVGTQTCEEDFITSRPTKLPGIESELGPLVKFSLEVYRSDLKGDVQFEGIHFPDNWGVLEGFPEVYEQLAPQPNGGDELNHSLPGDREGDVLEKDSSEKEKEAAPEALPSVQRARSEQLPDNIVKVTVPDKNPPCPCCGVRLNSVLALIEHLKGSHGRRRVCFRCAKCGRENFNHHSTVCHYAKCKGPQIERPPVGEWICEVCGRDFTTKIGLGQHKRHMHAMVRNQERIDASQPKETSNRGAHKRCWTKEEEELLMKLEVQFENHKNINKLIAEQLTTKTAKQISDKRRMLLKKGRGTTGNLETEPGMSHQSQAKVKDNGLGGDHLPGGPVVDKGTIGKPGQHLDTDNSHQITAGKKKGGGLQARYRRRIMKRLAAGTINIFPKVFKELINDQEARPLINQTTEDCFGLLDSACQIRTALREKGKSQEERPRKQYQKWMKKRAIKRGDYLRFQRLFHLDRGKLARIILDNTESLSCDISPSEIYSVFKARWETPGHFNGLGDFEIKGKANNKAFRDFITAKEIEKNVREMSKGSAPGPDGIALGDIKKMDPGYSRTAELFNLWLTAGDIPDMVRGCRTVLIPKSTTPERLKDINNWRPITIGSILLRLFSRIITARMTKACPLNPRQRGFISAPGCSENLKLLQSIIRTAKNEHKPLGVIFVDIAKAFDTVSHQHIIHVLQQRRVDPHIVGLVNNMYKDISTYVTTKKNTHTDKIQIRVGVKQGDPLSPLLFNLAMDPLLCKLEESGKGFHRGQSSITAMAFADDLVLLSDSWENMKENIKILETFCNLTGLKTQGQKCHGFYIKPTKDSYTINNCPAWTINGTPLNMINPGESEKYLGLQIDPWTGVAKYDLSTKLKIWLESIDRAPLKPLQKLDILKTYTIPRLTYLADHSEMKAGALEALDQQIRTAVKDWLHLPSCTCDAILYVSTRDGGLGVTKLAGLIPSVQARRLHRIAQSPDETMKDFLEKAQMEKMYEKLWVQAGGKKKGMPSIWEALPMTVPPTNTGNLSEWEAPNPKSKYPKPCDWRRKELKKWTKLESQGRGVKNFRNDTISNDWIQYYRRIPHRKLLTAIQLRANVYPTREFLARGRGDNYVKFCRHCEADLETCGHIIGFCPVTKDARIKRHNRICDRLCEEAAKREWVVFKEPHLRDATTELFKPDVIFVKEDRALVVDVTVRYESAKTTLEAAAMEKVDKYKHLEAEVKELTNAKDVVFMGFPLGARGKFYKGNFNLLETLGLPKTRQLSVAKTLSTYALMSSVDIVHMFASRSRKPNV

SEQ ID NO: 3 - protein, 1137 aa, Anolis carolinensis
MENQTQTKSILARSSPRIKRTAVDAADSGHPSTSGLRNHQNPNEQSQKRQKYTMPENRTIMKCYYKSEPQRRGYQKRMHQLWKQEYPDSQITEPRLADQRRFIIRNKVFSEVELEEIQKICKVDYHQTTAQTAAETPATLGMVEQIEPEESVALLQEFEEPALETSVEPPGTLTARQQELKDKIMAHAAANAIRQRLPTLKTVPKRHLAPLMKDVNAALSTVQITSIEQTNQFAYSAAVIVTEELGLLQPRQPQRKSTGKPKWKVRLELKIKKLRSDASNLKNMKERKLKNDKIKQYLIRKYWLNTRKIEEALEIVKEQITATARKIERYEARIIQYRQNQLFQSDQRRFYQSLNQTTDTVTIKPEKTATTKFWKELWENNKNYNKNAGWIKEFEGKFSQNKMELMEITTEMISKRVQKVKNWTSPGSDQLHGFWLKHLISLHGKMAQQFNEMLQKGSISEWLTTGRTYLIQKDPAKGAAPGNYRPITCLPTMFKLLTGIIADRIQDYLEEKNILPDEQKGNKRKSRGTKDQLLIDKMILENCKSRKANLHMTWIDYKKAFDSLPHSWIIKCLDAIGICKTVGTFIENMMEHWKTELFVGNESYGLVNIRRGIFQGDSLSPLLFIIAMIPLSTILQKTNLGYQISKNSHKISHLMYMDDLKLYGKTETEIQSLTNTVRIFSTDINMEFGLDKCSTVALKKGKIIESEGINMPNGQTIKCHQPEAYKYLGILQLDNIKHEHVKTVVSKEYTQRVRKILKSKLNGGNTIKAINTWAIPVIRYTAGIINWTQVELDNLDRKTRKLMTIHHSLHPRSDVDRLYLPRRSGGRGLLQVKQAVKEEEHALAEYVKQSEEPALIEVKNQKLLKTQQTKNQYKKTALQTRADSWHNKTLHGKFLDKIEGKADKEKTWLWLTNGTLKKETEGLILAAQEQAIRTNAIKAKIEKSADDPKCRLCKETDETIDHILSCCKKIAQTDYKQRHNYVAQMIHWNLCLKYHLPAAKNWWDHKPAKVLENEHAKILWDFRIQTDKVLEHNTPDITVVEKNKVWIIDVAIPGDSRIDEKQQEKLSRYQDLKIELQRLWQKPVQVVPVVMGTLGAVPKDLSRHLETIDIDKITICQLQKATLLGSAHIIRKYITQS

SEQ ID NO: 4 - protein, 1388 aa, synthetic construct
MASCPKPGPPVSAGAMSLESGLTTHSVLAIERGPNSLANSGSDFGGGGLGLPLRLLRVSVGTQTSRSDWVDLVSWSHPGPTSKSQQVDLVSLFPKHRVDLLSKNDQVDLVAQFLPSKFPPNLAENDLALLVNLEFYRSDLHVYECVHFAAHWEGLSGLPEVYEQLAPQPCVGETLHSSLPRDSELFVPEEGSSEKESEDAPKTSPPTPGKHGLEQTGEEKVMVTVPDKNPPCPCCGTRVNSVLNLIEHLKVSHGKRGVCFRCAKCGKENSNYHSVVCHFPKCRGPETEKAPAGEWICEVCNRDFTTKIGLGQHKRLAHPAVRNQERIVASQPKETSNRGAHKRCWTKEEEELLIRLEAQFEGNKNINKLIAEHITTKTAKQISDKRRLLSRKPAEEPREEPGTCHHTRRAAASLRTEPEMSHHAQAEDRDNGPGRRPLPGRAAAGGRTMDEIRRHPDKGNGQQRPTKQKSEEQLQAYYKKTLEERLSAGALNTFPRAFKQVMEGRDIKLVINQTAQDCFGCLESISQIRTATRDKKDTVTREKHPKKPFQKWMKDRAIKKGNYLRFQRLFYLDRGKLAKIILDDIECLSCDIPLSEIYSVFKTRWETTGSFKSLGDFKTYGKADNTAFRELITAKEIEKNVQEMSKGSAPGPDGITLGDVVKMDPEFSRTMEIFNLWLTTGKIPDMVRGCRTVLIPKSSKPDRLKDINNWRPITIGSILLRLFSRIVTARLSKACPLNPRQRGFIRAAGCSENLKLLQTIIWSAKREHRPLGVVFVDIAKAFDTVSHQHIIHALQQREVDPHIVGLVSNMYENISTYITTKRNTHTDKIQIRVGVKQGDPMSPLLFNLAMDPLLCKLEESGKGYHRGQSSITAMAFADDLVLLSDSWENMNTNISILETFCNLTGLKTQGQKCHGFYIKPTKDSYTINDCAAWTINGTPLNMIDPGESEKYLGLQFDPWIGIARSGLSTKLDFWLQRIDQAPLKPLQKTDILKTYTIPRLIYIADHSEVKTALLETLDQKIRTAVKEWLHLPPCTCDAILYSSTRDGGLGITKLAGLIPSVQARRLHRIAQSSDDTMKCFMEKEKMEQLHKKLWIQAGGDRENIPSIWEAPPSSEPPNNVSTNSEWEAPTQKDKFPKPCNWRKNEFKKWTKLASQGRGIVNFERDKISNHWIQYYRRIPHRKLLTALQLRANVYPTREFLARGRQDQYIKACRHCDADIESCAHIIGCPVTKDARIKRHNRICDRLCEEAAKREWVVFKEPHLRDATTELFKPDVIFVKEDRALVVDVTVRYESAKTTLEAAAMEKVDKYKHLEAEVKELTNAKDVVFMGFPLGARGKFYKGNFNLLETLGLPKTRQLSVAKTLSTYALMSSVDIVHMFASRSRKPNV

SEQ ID NO: 5 - protein, 1390 aa, synthetic construct
MASCPKPGPPVSAGAMSLESGLTTHSVLAIERGPNSLANSGSDFGGGGLGLPLRLLRVSVGTQTSRSDWVDLVSWSHPGPTSKSQQVDLVSLFPKHRVDLLSKNDQVDLVAQFLPSKFPPNLAENDLALLVNLEFYRSDLHVYECVHFAAHWEGLSGLPEVYEQLAPQPCVGETLHSSLPRDSELFVPEEGSSEKESEDAPKTSPPTPGKHGLEQTGEEKVMVTVPDKNPPCPCCGTRVNSVLNLIEHLKVSHGKRGVCFRCAKCGKENSNYHSVVCHFPKCRGPETEKAPAGEWICEVCNRDFTTKIGLGQHKRLAHPAVRNQERIVASQPKETSNRGAHKRCWTKEEEELLIRLEAQFEGNKNINKLIAEHITTKTAKQISDKRRLLSRKPAEEPREEPGTCHHTRRAAASLRTEPEMSHHAQAEDRDNGPGRRPLPGRAAAGGRTMDEIRRHPDKGNGQQRPTKQKSEEQLQAYYKKTLEERLSAGALNTFPRAFKQVMEGRDIKLVINQTAQDCFGCLESISQIRTATRDKKDTVTREKHPKKPFQKWMKDRAIKKGNYLRFQRLFYLDRGKLAKIILDDIECLSCDISPSEIYSVFKARWETPGHFNGLGDFEIKGKANNKAFRDFITAKEIEKNVREMSKGSAPGPDGIALGDIKKMDPGYSRTAELFNLWLTAGDIPDMVRGCRTVLIPKSTTPERLKDINNWRPITIGSILLRLFSRIITARMTKACPLNPRQRGFISAPGCSENLKLLQSIIRTAKNEHKPLGVIFVDIAKAFDTVSHQHIIHVLQQRRVDPHIVGLVNNMYKDISTYVTTKKNTHTDKIQIRVGVKQGDPLSPLLFNLAMDPLLCKLEESGKGFHRGQSSITAMAFADDLVLLSDSWENMKENIKILETFCNLTGLKTQGQKCHGFYIKPTKDSYTINNCPAWTINGTPLNMINPGESEKYLGLQIDPWTGVAKYDLSTKLKIWLESIDRAPLKPLQKLDILKTYTIPRLTYLADHSEMKAGALEALDQQIRTAVKDWLHLPPCTCDAILYSSTRDGGLGITKLAGLIPSVQARRLHRIAQSSDDTMKCFMEKEKMEQLHKKLWIQAGGDRENIPSIWEAPPSSEPPNNVSTNSEWEAPTQKDKFPKPCNWRKNEFKKWTKLASQGRGIVNFERDKISNHWIQYYRRIPHRKLLTALQLRANVYPTREFLARGRQDQYIKACRHCDADIESCAHIIGNCPVTQDARIKRHNYICELLLEEAKKKDWVVFKEPHIRDSNKELYKPDLIFVKDARALVVDVTVRYEAAKSSLEEAAAEKVRKYKHLETEVRHLTNAKDVTFVGFPLGARGKWHQDNFKLLTELGLSKSRQVKMAETFSTVALFSSVDIVHMFASRARKSMVM

SEQ ID NO: 6 - protein, 429 aa, synthetic construct
KDTVTREKHPKKPFQKWMKDRAIKKGNYLRFQRLFYLDRGKLAKIILDDIECLSCDIPLSEIYSVFKTRWETTGSFKSLGDFKTYGKADNTAFRELITAKEIEKNVQEMSKGSAPGPDGITLGDVVKMDPEFSRTMEIFNLWLTTGKIPDMVRGCRTVLIPKSSKPDRLKDINNWRPITIGSILLRLFSRIVTARLSKACPLNPRQRGFIRAAGCSENLKLLQTIIWSAKREHRPLGVVFVDIAKAFDTVSHQHIIHALQQREVDPHIVGLVSNMYENISTYITTKRNTHTDKIQIRVGVKQGDPMSPLLFNLAMDPLLCKLEESGKGYHRGQSSITAMAFADDLVLLSDSWENMNTNISILETFCNLTGLKTQGQKCHGFYIKPTKDSYTINDCAAWTINGTPLNMIDPGESEKYLGLQFDPWIGIAY

SEQ ID NO: 7 - protein, 163 aa, synthetic construct
NCPVTQDARIKRHNYICELLLEEAKKKDWVVFKEPHIRDSNKELYKPDLIFVKDARALVVDVTVRYEAAKSSLEEAAAEKVRKYKHLETEVRHLTNAKDVTFVGFPLGARGKWHQDNFKLLTELGLSKSRQVKMAETFSTVALFSSVDIVHMFASRARKSMVM

SEQ ID NO: 8 - protein, 376 aa, synthetic construct
DTVTIKPEKTATTKFWKELWENNKNYNKNAGWIKEFEGKFSQNKMELMEITTEMISKRVQKVKNWTSPGSDQLHGFWLKHLISLHGKMAQQFNEMLQKGSISEWLTTGRTYLIQKDPAKGAAPGNYRPITCLPTMFKLLTGIIADRIQDYLEEKNILPDEQKGNKRKSRGTKDQLLIDKMILENCKSRKANLHMTWIDYKKAFDSLPHSWIIKCLDAIGICKTVGTFIENMMEHWKTELFVGNESYGLVNIRRGIFQGDSLSPLLFIIAMIPLSTILQKTNLGYQISKNSHKISHLMYMDDLKLYGKTETEIQSLTNTVRIFSTDINMEFGLDKCSTVALKKGKIIESEGINMPNGQTIKCHQPEAYKYLGILQLD

SEQ ID NO: 9 - protein, 178 aa, synthetic construct
IDHILSCCKKIAQTDYKQRHNYVAQMIHWNLCLKYHLPAAKNWWDHKPAKVLENEHAKILWDFRIQTDKVLEHNTPDITVVEKNKVWIIDVAIPGDSRIDEKQQEKLSRYQDLKIELQRLWQKPVQVVPVVMGTLGAVPKDLSRHLETIDIDKITICQLQKATLLGSAHIIRKYITQS

SEQ ID NO: 10 - protein, 421 aa, synthetic construct
PRKQYQKWMKKRAIKRGDYLRFQRLFHLDRGKLARIILDNTESLSCDISPSEIYSVFKARWETPGHFNGLGDFEIKGKANNKAFRDFITAKEIEKNVREMSKGSAPGPDGIALGDIKKMDPGYSRTAELFNLWLTAGDIPDMVRGCRTVLIPKSTTPERLKDINNWRPITIGSILLRLFSRIITARMTKACPLNPRQRGFISAPGCSENLKLLQSIIRTAKNEHKPLGVIFVDIAKAFDTVSHQHIIHVLQQRRVDPHIVGLVNNMYKDISTYVTTKKNTHTDKIQIRVGVKQGDPLSPLLFNLAMDPLLCKLEESGKGFHRGQSSITAMAFADDLVLLSDSWENMKENIKILETFCNLTGLKTQGQKCHGFYIKPTKDSYTINNCPAWTINGTPLNMINPGESEKYLGLQIDPWTGVAKY

SEQ ID NO: 11 - protein, 161 aa, synthetic construct
CPVTKDARIKRHNRICDRLCEEAAKREWVVFKEPHLRDATTELFKPDVIFVKEDRALVVDVTVRYESAKTTLEAAAMEKVDKYKHLEAEVKELTNAKDVVFMGFPLGARGKFYKGNFNLLETLGLPKTRQLSVAKTLSTYALMSSVDIVHMFASRSRKPNV

SEQ ID NO: 12 - DNA, 4628 bp, synthetic construct
  source 1..4628: mol_type = other DNA
taatacgactcactataagggtctagttacaactgggcatcgctgcagagatcgcacctcctcgtggtcccgctggtagcccttcgaagggtgactaagtcgatctctgccccaggtacggagccgttgggactcaccagtccaacgtaactcctgcctaaattcggtgaaacaaattcctcggtaaaaagccccatggctagctgccctaagcctggacctcctgtgtctgctggcgctatgagcctggagagcggacttaccacccactctgtgctggccatcgagagaggccccaactctctggccaactctggcagcgatttcggcggaggaggacttggcctgcctctgagacttctgagagtttctgtgggcacccagaccagcagaagcgactgggtcgaccttgtgagctggagccaccctggtcctacaagcaagagccagcaggtcgatctggtgagcctgttccccaagcacagagtcgacctgctgagcaagaacgaccaggtcgacttggtggcccagttcctgcctagcaagttccctcccaacctggctgagaacgacttagccctgctggtgaacctggagttctatcgttccgacctgcacgtgtacgagtgcgtgcacttcgctgcccattgggagggcttaagcggccttcctgaggtgtacgaacagctggctccccagccctgtgtaggcgagacattacacagcagcctgcccagagacagcgagctgttcgttccggaagagggctctagcgagaaggagagcgaggacgctcctaagaccagccctcctacccctggcaaacacggcctggagcaaacaggcgaggagaaggtcatggtgaccgtgcccgacaagaaccctccctgtccttgctgtggcacaagagtcaacagcgtgctgaacctcatcgagcacctgaaggtgtcccacggcaagagaggcgtgtgcttcagatgcgccaagtgcggcaaggagaacagcaactaccacagcgtcgtgtgccacttccctaagtgcagaggccctgagaccgagaaggctcccgctggcgaatggatttgcgaggtgtgcaacagagacttcaccaccaagatcggcctgggccagcacaagcggttagctcaccctgctgtgagaaaccaggagagaatcgtggccagccagcccaaggagacaagcaacaggggcgctcacaagagatgctggaccaaggaggaagaggagctgctcatcagactggaggctcagttcgagggcaacaagaacatcaataagcttatcgccgagcacatcaccacaaagaccgccaagcagatcagcgacaagaggagactgctgtccagaaagcccgccgaggagcctagagaggaacctggtacatgtcaccacaccagaagagccgccgctagcctgagaaccgagcccgaaatgtctcaccacgctcaggccgaggacagagacaacggccctggcaggagacctcttcccggcagagctgctgctggaggcagaaccatggacgagatcaggagacaccccgataagggcaacggccagcagagacccacaaagcagaagtccgaggaacagctccaggcctactacaagaaaaccctggaggagagactgtccgcgggagctctgaacaccttccctagagccttcaaacaagtcatggagggcagagacatcaagctggtgatcaaccagaccgcccaggactgcttcggctgccttgagtctatcagccagatcaggaccgccacacgggataagaaggacaccgtcaccagagagaagcaccccaagaagcccttccagaaatggatgaaggacagggccatcaagaagggcaattacctgagattccagaggctgttctacctggacagaggcaagctggccaagatcatcctggacgacatcgagtgcctgagctgcgacatccctctgagcgagatctacagcgtgttcaagaccagatgggagaccaccggcagcttcaagtctctgggcgacttcaagacatacggcaaggccgacaacaccgccttcagagagctcatcaccgctaaggagatcgagaagaacgtgcaggagatgagcaagggcagcgctcctggccccgatggaattacactgggcgatgtggtgaagatggaccccgagttcagcagaacaatggagatcttcaacctgtggctcaccacaggcaagatccccgacatggtgagaggctgcagaaccgtgcttatccccaagagcagcaagcccgacagactgaaggatatcaacaactggagacccatcaccatcggcagcatcctgctgcggctgttcagccggattgtgaccgctagactgagcaaagcctgtcccctgaaccccagacagagaggcttcatcagagccgctggctgcagcgagaacctgaagctgctccagacaatcatctggagcgccaagagagagcacagacccctgggcgttgttttcgtggacatcgccaaggccttcgacaccgtgtcccatcagcacattatccacgccctgcagcagagggaggtcgaccctcatattgtgggcctggtgtccaacatgtacgagaacatctccacctatattacgaccaagagaaacacccacacagacaagatccagatccgggtcggcgtcaagcagggcgatcctatgtctcctctgctgttcaacctcgccatggaccctctgctctgcaagctcgaggagtctggaaagggctaccatagaggccaatcatcgatcaccgccatggccttcgccgacgacctggtgcttttaagcgacagctgggagaacatgaacaccaacatctctatcctggagacattctgcaaccttaccggcctgaaaacccagggccagaagtgtcatggcttctacatcaaacccaccaaggacagctacaccatcaacgactgcgccgcctggacaatcaacggcacccctctcaacatgatcgaccccggcgagtctgagaagtacctgggcctgcagttcgatccctggatcggcatcgctagaagcggcttgagcaccaagctggacttttggctccaacgcatagaccaggcccccctgaagcctcttcagaaaaccgacattttgaaaacttatacgatccccagactcatctacatcgccgaccactccgaggtcaagaccgctctgctggaaaccctggaccagaaaatcagaaccgccgtcaaggaatggctgcacctgcccccttgcacatgcgacgctatcctgtacagcagcaccagggacggcggcttaggaatcaccaagttagccggcctcatccccagcgtgcaggctaggagactccacagaatcgcccagagcagcgacgacaccatgaagtgcttcatggagaaggaaaagatggagcagctgcacaagaagctgtggatccaagcgggcggagatcgtgagaacattcccagcatctgggaggcccctcccagctcagaacctcccaataacgtgtccaccaattctgaatgggaggctcccacccagaaggataagtttcccaagccctgcaactggcggaagaacgagttcaaaaaatggacaaagctggctagccagggcaggggcatcgtgaacttcgaaagggacaagattagcaaccactggatccagtactacagaagaatcccccacagaaagctcctcaccgccctccagttacgtgcaaacgtgtacccaaccagagaattcctggccagaggcagacaggaccagtacatcaaggcctgccggcactgcgatgccgatatcgagagctgtgctcacatcatcggcaactgccccgtcacccaggacgccagaatcaagagacacaactacatctgcgagttacttctggaggaagccaagaagaaggattgggttgtgttcaaggagccccacatcagagactccaacaaggagctgtacaagccagacctcatcttcgtgaaggacgctagagccctggtggtggacgtcaccgtcagatacgaggctgctaagtccagccttgaggaggctgccgccgagaaagtgcggaagtacaagcacctggaaacagaggtcagacacctcaccaacgccaaggacgttaccttcgtgggcttccccctaggtgctagaggcaaatggcaccaggacaacttcaagctgcttaccgagctgggcctctccaagagccgacaggttaagatggccgagaccttcagcaccgtcgccctgttctcttctgtggacattgtgcacatgttcgcctccagagccagaaagagcatggtgatgtaaaccggtagacatgataagatacattgatgagtttggacaaaccacaactagaatgcagtgaaaaaaatgctttatttgtgaaatttgtgatgctattgctttatttgtaaccattataagctgcaataaacaagttaacaacaacaaaaaaaaaaaaaaaaaaaaaaaaaaaaaaacgttgactaaaaaaaaaaaaaaaaaaaaaaaaaaaaaaaaaaaaaaaaaaaaaaaaaaaaaaaaaaaaaaaaaaaaaaaaaaaa

SEQ ID NO: 13-20 - skipped (8 entries)

SEQ ID NO: 21 - protein, 346 aa, synthetic construct
GIHGVPAAAMQMQLEANADTSVEEESFGPQPISRLEQCGINANDVKKLEEAGFHTVEAVAYAPKKELINIKGISEAKADKILAEAAKLVPMGFTTETEFHQRRSEIIQITTGSKELDKLLQGGIETGSITEMFGEFRTGKTQICHTLAVTCQLPIDRGGGEGKAMYIDTEGTFRPERLLAVAERYGLSGSDVLDNVAYARAFNTDHQTQLLYQASAMMVESRYALLIVDSATALYRTDYSGRGELSARQMHLARFLRMLLRLADEFGVAVVITNQVVAQVDGAAMFAADPKKPIGGNIIAHASTTRLYLRKGRGETRICKIYDSPCLPEAEAMFAINADGVGDAKD

SEQ ID NO: 22 - protein, 125 aa, synthetic construct
ESTVGPACPPGRTVTKRPWALAEDTPRGPDSPPKRPRPNSLPLTTTFRPLPPPPQTTSAVDPSSHSPVNPPRDQHATDTADEKPRAASPALSDASGPPTPDIPLSPGGTHARDPDADPDSPDLDS

SEQ ID NO: 23 - protein, 65 aa, synthetic construct
GSATVKFKYKGEEKEVDISKIKKVWRVGKMISFTYDEGGGKTGRGAVSEKDAPKELLQMLEKQKK

SEQ ID NO: 24 - protein, 16 aa, synthetic construct
STQGRLDDFFKVTGSL

SEQ ID NO: 25 - protein, 25 aa, synthetic construct
RKRRQTSMTDFYHSKRRLIFSKRKP

SEQ ID NO: 26 - protein, 120 aa, synthetic construct
VDMMDLPRSRINAGMLAQFIDKPVCFVGRLEKIHPTGKMFILSDGEGKNGTIELMEPLDEEISGIVEVVGRVTAKATILCTSYVQFKEDSHPFDLGLYNEAVKIIHDFPQFYPLGIVQHD

SEQ ID NO: 27 - protein, 151 aa, synthetic construct
STPARRRLMRDFKRLQEDPPAGVSGAPSENNIMVWNAVIFGPEGTPFEDGTFKLTIEFTEEYPNKPPTVRFVSKMFHPNVYADGSICLDILQNRWSPTYDVSSILTSIQSLLDEPNPNSPANSQAAQLYQENKREYEKRVSAIVEQSWRDC

SEQ ID NO: 28 - protein, 7 aa, synthetic construct
RQRKRHK

SEQ ID NO: 29 - protein, 7 aa, synthetic construct
PSQQKRK

SEQ ID NO: 30 - protein, 6 aa, synthetic construct
KKKSKK

SEQ ID NO: 31 - protein, 30 aa, synthetic construct
EKRTPLHAAAYLGDAEIIELLILSGARVNA

SEQ ID NO: 32 - protein, 219 aa, synthetic construct
EDTQAIDWDVEEEEETEQSSESLRCNVEPVGRLHIFSGAHGPEKDFPLHLGKNVVGRMPDCSVALPFPSISKQHAEIEILAWDKAPILRDCGSLNGTQILRPPKVLSPGVSHRLRDQELILFADLLCQYHRLDVSLPFVSRGPLTVEETPRVQGETQPQRLLLAEDSEEEVDFLSERRMVKKSRTTSSSVIVPESDEEGHSPVLGGLGPPFAFNLNSDT

SEQ ID NO: 33 - protein, 84 aa, synthetic construct
MLRPEISSTSPSAPAVSPSSGETRSPQGPRYNFGLQETPQSRPSVQVVSASTCPGTSGAAGDRSSSSSSLPCPAPNSRPAQGSM

SEQ ID NO: 34 - protein, 251 aa, synthetic construct
LVEPEEVVEMSHMPGDLFNLYLHQNYIDFFMEIDDIVRASEFLSFADILSGDWNTRSLLREYSTSIATRGVMHSNKARGYAHCQGGGSSFRPLHKPQWFLINKKYRENCLAAKALFPDFCLPALCLQTQLLPYLALLTIPMRNQAQISFIQDIGRLPLKRHFGRLKMEALTDREHGMIDPDSGDEAQLNGGHSAEESLGEPTQATVPETWSLPLSQNSASELPASQPQPFSAQGDMEENIIIEDYESDGTM

SEQ ID NO: 35 - protein, 207 aa, synthetic construct
WSVEAVVLFLKQTDPLALCPLVDLFRSHEIDGKALLLLTSDVLLKHLGVKLGTAVKLCYYIDRLKQGKMWSVEAVVLFLKQTDPLALCPLVDLFRSHEIDGKALLLLTSDVLLKHLGVKLGTAVKLCYYIDRLKQGKMWSVEAVVLFLKQTDPLALCPLVDLFRSHEIDGKALLLLTSDVLLKHLGVKLGTAVKLCYYIDRLKQGKM

SEQ ID NO: 36 - protein, 65 aa, synthetic construct
MVRRFLVTLRIRRACGPPRVRVFVVHIPRLTGEWAAPGAPAAVALVLMLLRSQRLGQQPLPRRPM

SEQ ID NO: 37 - protein, 50 aa, synthetic construct
MLEELECGAPGARGAATAMDCKDRPAFPVKKLIQARLPFKRLNLVPKGKM

SEQ ID NO: 38 - protein, 270 aa, synthetic construct
MNQIVKFTDDSGLAVQVTPDDVRRYICENATEKEVGLFLQLCQTQRLNPFVKDAYLVKYGGAPASMITSYQVFNRRACRDANYDGIKSGVVVLRDGDVVHKRGAACYKKAGEELIGGWAEVRFKDGRETAYAEVALDDYSTGKSNWAKMPGVMIEKCAKAAAWRLAFPDTFQGMYAAEEMDQAQQPEQVRAQAEQPVDLQPIRELFKPYCEHFGITPAEGMTAVCGAVGAEGMHSMTEQQARRARAWMEEEMAAPAVEAEYEVVDEGEVF

SEQ ID NO: 39 - protein, 248 aa, synthetic construct
MGTALTPLLTKFATRYEMGTTPEEVANTLKQTCFKGQVNDSQMVALLIVADQYKLNPFTKELYAFPDKNNGIVPVVGVDGWARIINENPQFDGMEFSMDQQGTECTCKIYRKDRSHAISATEYMAECKRNTQPWQSHPRRMLRHKAMIQCARLAFGFAGIYDQDEAERIVERDVTPAEQYEDVSEAICLIKDSPTMEDLQAAFSNAWKAYKTKGARDQLTAAKDQRKKELLDAPIDVEFEETGDDRAA

SEQ ID NO: 40 - protein, 100 aa, synthetic construct
MPKRKVSSAEGAAKEEPKRRSARLSAKPPAKVEAKPKKAAAKDKSSDKKVQTKGKRGAKGKQAEVANQETKEDLPAENGETKTEESPASDEAGEKEAKSD

SEQ ID NO: 41 - protein, 83 aa, synthetic construct
GKGDPKKPRGKMSSYAFFVQTCREEHKKKHPDASVNFSEFSKKCSERWKTMSAKEKGKFEDMAKADKARYEREMKTYIPPKGE

SEQ ID NO: 42 - protein, 59 aa, synthetic construct
VTVKFKYKGEEKEVDISKIKKVWRVGKMISFTYDDNGKTGRGAVSEKDAPKELLQMLEK

SEQ ID NO: 43 - protein, 78 aa, synthetic construct
CPLCDQCFPPTKIERHAMYCNGLMEEDTVLTRRQKEAKTKSDSGTAAQTSLDIDKNEKCYLCKSLVPFREYQCHVDSC

SEQ ID NO: 44 - protein, 23 aa, synthetic construct
AVCPYCSLRFFSPELKQEHESKC

SEQ ID NO: 45 - protein, 78 aa, synthetic construct
SRAAAGRGPLDLAAVWMQGRVVMADRGEARLRDPSGDFSVRGLERVPRGRPCLVPGKYVMVMGVVQACSPESEQDEAH

SEQ ID NO: 46 - protein, 15 aa, synthetic construct
NLEEVTMKQICKKVY

SEQ ID NO: 47 - protein, 73 aa, synthetic construct
ATAGTECRKSVPCGWERVVKQRLFGKTAGRFDVYFISPQGLKFRSKSSLANYLHKNGETSLKPEDFDFTVLSK

SEQ ID NO: 48 - protein, 172 aa, synthetic construct
MFYHISLEHEILLHPRYFGPNLLNTVKQKLFTEVEGTCTGKYGFVIAVTTIDNIGAGVIQPGRGFVLYPVKYKAIVFRPFKGEVVDAVVTQVNKVGLFTEIGPMSCFISRHSIPSEMEFDPNSNPPCYKTMDEDIVIQQDDEIRLKIVGTRVDKNDIFAIGSLMDDYLGLVS

SEQ ID NO: 49 - protein, 40 aa, synthetic construct
CGICMEILVEPVTLPCNHTLCKPCFQSTVEKASLCCPFCR

SEQ ID NO: 50 - protein, 37 aa, synthetic construct
ISIWLNQALKGVRDRHGNSIENPHLLTLFHRLCKLLF

SEQ ID NO: 51 - protein, 148 aa, synthetic construct
TAFEYLDDIVPENYSHENSQGSSHAATKPQGPATSTRTGSQRQEGGQEAAAPARQGRKKPAGKSLASEAPSQPSLNGGSPEGVESQDGVDHFRAMIVEFMASKKMQLEFPPSLNSHDRLRVHQIAEEHGLRHDSSGEGKRRFITVSKR

SEQ ID NO: 52 - protein, 24 aa, synthetic construct
HRCPFPDCAKAYYKSSHLKSHLRT

SEQ ID NO: 53 - protein, 13 aa, synthetic construct
KRPRGRPRKDGAS

SEQ ID NO: 54 - protein, 31 aa, synthetic construct
ILTCPVCFRAQGCISLEALNKHVDECLDGPS

SEQ ID NO: 55 - protein, 33 aa, synthetic construct
PTLLGFHTASGKKVKIAKESLDKVKNLFDEKEQ

SEQ ID NO: 56 - protein, 22 aa, synthetic construct
GSYGFRLGFLHSGTAKSVTCTY

SEQ ID NO: 57 - protein, 74 aa, synthetic construct
SVSMVHSERLPLLMNRNGIRFQSEVIDPNPPKKVKWVLTGSGGNMFTANVRGSNVSSLVKHTWSEAFVSLIEDR

SEQ ID NO: 58 - protein, 248 aa, synthetic construct; identical to SEQ ID NO: 39

SEQ ID NO: 59 - protein, 124 aa, synthetic construct
MNEKSLNKIMLIGRVGCEPDIKILNGGDKVATFSLATNEFWRDRNTNELKSKTDWHRIVVYDQNIVDLIDKYLRKGRRVYVQGSLHTRKWHTNDMNSQPKQITEIILSYNKGDLIFLDDKRNFN

SEQ ID NO: 60 - protein, 265 aa, synthetic construct
GIHGVPAAMAERPFQCRICMRNFSYNWHLQRHIRTHTGEKPFACDICGRKFARSDHLTTHTKIHTGSQKPFQCRICMRNFSHNYARDCHIRTHTGEKPFACDICGRKFAQNSTRIGHTKIHLRGSSGSETPGTSESATPEGIHGVPAAMAERPFQCRICMRNFSQSSNLARHIRTHTGEKPFACDICGRKFARTDYLVDHTKIHTGSQKPFQCRICMRNFSYNTHLTRHIRTHTGEKPFACDICGRKFAQGYNLAGHTKIHLRGS

SEQ ID NO: 61 - protein, 295 aa, synthetic construct
NISGSSCGSPNSADTSSDFKDLWTKLKECHDREVQGLQVKVTKLKQERILDAQRLEEFFTKNQQLREQQKVLHETIKVLEDRLRAGLCDRCAVTEEHMRKKQQEFENIRQQNLKLITELMNERNTLQEENKKLSEQLQQKIENDQQHQAAELECEEDVIPDSPITAFSFSGVNRLRRKENPHVRYIEQTHTKLEHSVCANEMRKVSKSSTHPQHNPNENEILVADTYDQSQSPMAKAHGTSSYTPDKSSFNLATVVAETLGLGVQEESETQGPMSPLGDELYHCLEGNHKKQPFE

SEQ ID NO: 62-69 - skipped (8 entries)

SEQ ID NO: 70 - DNA, 39 bp, synthetic construct
  source 1..39: mol_type = other DNA
atcgcggttctatctagttacgcgttaaaccaactagaa

SEQ ID NO: 71 - DNA, 62 bp, synthetic construct
  source 1..62: mol_type = other DNA
ggaggtcagggtcaggagcccccccctgaacccaggataaccctcaaagtcgggggcaaccc

SEQ ID NO: 72 - DNA, 76 bp, synthetic construct
  source 1..76: mol_type = other DNA
ggaaggtttttcttttcctgaggcgaaagtctcaggttttgctttttggcctttcttaaaaaaaaaaaaagcaaaa

SEQ ID NO: 73-79 - skipped (7 entries)

SEQ ID NO: 80 - protein, 1407 aa, synthetic construct
MKRTADGSEFESPKKKRKVDKKYSIGLDIGTNSVGWAVITDEYKVPSKKFKVLGNTDRHSIKKNLIGALLFDSGETAEATRLKRTARRRYTRRKNRICYLQEIFSNEMAKVDDSFFHRLEESFLVEEDKKHERHPIFGNIVDEVAYHEKYPTIYHLRKKLVDSTDKADLRLIYLALAHMIKFRGHFLIEGDLNPDNSDVDKLFIQLVQTYNQLFEENPINASGVDAKAILSARLSKSRRLENLIAQLPGEKKNGLFGNLIALSLGLTPNFKSNFDLAEDAKLQLSKDTYDDDLDNLLAQIGDQYADLFLAAKNLSDAILLSDILRVNTEITKAPLSASMIKRYDEHHQDLTLLKALVRQQLPEKYKEIFFDQSKNGYAGYIDGGASQEEFYKFIKPILEKMDGTEELLVKLNREDLLRKQRTFDNGSIPHQIHLGELHAILRRQEDFYPFLKDNREKIEKILTFRIPYYVGPLARGNSRFAWMTRKSEETITPWNFEEVVDKGASAQSFIERMTNFDKNLPNEKVLPKHSLLYEYFTVYNELTKVKYVTEGMRKPAFLSGEQKKAIVDLLFKTNRKVTVKQLKEDYFKKIECFDSVEISGVEDRFNASLGTYHDLLKIIKDKDFLDNEENEDILEDIVLTLTLFEDREMIEERLKTYAHLFDDKVMKQLKRRRYTGWGRLSRKLINGIRDKQSGKTILDFLKSDGFANRNFMQLIHDDSLTFKEDIQKAQVSGQGDSLHEHIANLAGSPAIKKGILQTVKVVDELVKVMGRHKPENIVIEMARENQTTQKGQKNSRERMKRIEEGIKELGSQILKEHPVENTQLQNEKLYLYYLQNGRDMYVDQELDINRLSDYDVDHIVPQSFLKDDSIDNKVLTRSDKNRGKSDNVPSEEVVKKMKNYWRQLLNAKLITQRKFDNLTKAERGGLSELDKAGFIKRQLVETRQITKHVAQILDSRMNTKYDENDKLIREVKVITLKSKLVSDFRKDFQFYKVREINNYHHAHDAYLNAVVGTALIKKYPKLESEFVYGDYKVYDVRKMIAKSEQEIGKATAKYFFYSNIMNFFKTEITLANGEIRKRPLIETNGETGEIVWDKGRDFATVRKVLSMPQVNIVKKTEVQTGGFSKESILPKRNSDKLIARKKDWDPKKYGGFDSPTVAYSVLVVAKVEKGKSKKLKSVKELLGITIMERSSFEKNPIDFLEAKGYKEVKKDLIIKLPKYSLFELENGRKRMLASAGELQKGNELALPSKYVNFLYLASHYEKLKGSPEDNEQKQLFVEQHKHYLDEIIEQISEFSKRVILADANLDKVLSAYNKHRDKPIREQAENIIHLFTLTNLGAPAAFKYFDTTIDRKRYTSTKEVLDATLIHQSITGLYETRIDLSQLGGDSGGSKRTADGSEFEPKKKRKV

SEQ ID NO: 81 - protein, 1407 aa, synthetic construct
MKRTADGSEFESPKKKRKVDKKYSIGLDIGTNSVGWAVITDEYKVPSKKFKVLGNTDRHSIKKNLIGALLFDSGETAEATRLKRTARRRYTRRKNRICYLQEIFSNEMAKVDDSFFHRLEESFLVEEDKKHERHPIFGNIVDEVAYHEKYPTIYHLRKKLVDSTDKADLRLIYLALAHMIKFRGHFLIEGDLNPDNSDVDKLFIQLVQTYNQLFEENPINASGVDAKAILSARLSKSRRLENLIAQLPGEKKNGLFGNLIALSLGLTPNFKSNFDLAEDAKLQLSKDTYDDDLDNLLAQIGDQYADLFLAAKNLSDAILLSDILRVNTEITKAPLSASMIKRYDEHHQDLTLLKALVRQQLPEKYKEIFFDQSKNGYAGYIDGGASQEEFYKFIKPILEKMDGTEELLVKLNREDLLRKQRTFDNGSIPHQIHLGELHAILRRQEDFYPFLKDNREKIEKILTFRIPYYVGPLARGNSRFAWMTRKSEETITPWNFEEVVDKGASAQSFIERMTNFDKNLPNEKVLPKHSLLYEYFTVYNELTKVKYVTEGMRKPAFLSGEQKKAIVDLLFKTNRKVTVKQLKEDYFKKIECFDSVEISGVEDRFNASLGTYHDLLKIIKDKDFLDNEENEDILEDIVLTLTLFEDREMIEERLKTYAHLFDDKVMKQLKRRRYTGWGRLSRKLINGIRDKQSGKTILDFLKSDGFANRNFMQLIHDDSLTFKEDIQKAQVSGQGDSLHEHIANLAGSPAIKKGILQTVKVVDELVKVMGRHKPENIVIEMARENQTTQKGQKNSRERMKRIEEGIKELGSQILKEHPVENTQLQNEKLYLYYLQNGRDMYVDQELDINRLSDYDVDAIVPQSFLKDDSIDNKVLTRSDKNRGKSDNVPSEEVVKKMKNYWRQLLNAKLITQRKFDNLTKAERGGLSELDKAGFIKRQLVETRQITKHVAQILDSRMNTKYDENDKLIREVKVITLKSKLVSDFRKDFQFYKVREINNYHHAHDAYLNAVVGTALIKKYPKLESEFVYGDYKVYDVRKMIAKSEQEIGKATAKYFFYSNIMNFFKTEITLANGEIRKRPLIETNGETGEIVWDKGRDFATVRKVLSMPQVNIVKKTEVQTGGFSKESILPKRNSDKLIARKKDWDPKKYGGFDSPTVAYSVLVVAKVEKGKSKKLKSVKELLGITIMERSSFEKNPIDFLEAKGYKEVKKDLIIKLPKYSLFELENGRKRMLASAGELQKGNELALPSKYVNFLYLASHYEKLKGSPEDNEQKQLFVEQHKHYLDEIIEQISEFSKRVILADANLDKVLSAYNKHRDKPIREQAENIIHLFTLTNLGAPAAFKYFDTTIDRKRYTSTKEVLDATLIHQSITGLYETRIDLSQLGGDSGGSKRTADGSEFEPKKKRKV

SEQ ID NO: 82 - protein, 1407 aa, synthetic construct; identical to SEQ ID NO: 81

SEQ ID NO: 83-101 - skipped (19 entries)

SEQ ID NO: 102 - protein, 14 aa, synthetic construct
SGSETPGTSESATP

SEQ ID NO: 103 - protein, 4 aa, synthetic construct
GGSG

SEQ ID NO: 104 - protein, 17 aa, synthetic construct
SGSETPGTSESATPEGS

SEQ ID NO: 105-109 - skipped (5 entries)

SEQ ID NO: 110 - protein, 7 aa, synthetic construct
PKKKRKV

SEQ ID NO: 111 - protein, 16 aa, synthetic construct
KRPAATKKAGQAKKKK

SEQ ID NO: 112 - protein, 7 aa, synthetic construct
PSQQKRK

SEQ ID NO: 113 - protein, 8 aa, synthetic construct
PKKRRKKK

SEQ ID NO: 114 - protein, 7 aa, synthetic construct
RRRRRRR

SEQ ID NO: 115 - protein, 8 aa, synthetic construct
KKRKRSRK

SEQ ID NO: 116 - protein, 17 aa, synthetic construct
KRTADGSEFESPKKKRK

SEQ ID NO: 117-119 - skipped (3 entries)

SEQ ID NO: 120 - protein, 1764 aa, synthetic construct
MASCPKPGPPVSAGAMSLESGLTTHSVLAIERGPNSLANSGSDFGGGGLGLPLRLLRVSVGTQTSRSDWVDLVSWSHPGPTSKSQQVDLVSLFPKHRVDLLSKNDQVDLVAQFLPSKFPPNLAENDLALLVNLEFYRSDLHVYECVHFAAHWEGLSGLPEVYEQLAPQPCVGETLHSSLPRDSELFVPEEGSSEKESEDAPKTSPPTPGKHGLEQTGEEKVMVTVPDKNPPCPCCGTRVNSVLNLIEHLKVSHGKRGVCFRCAKCGKENSNYHSVVCHFPKCRGPETEKAPAGEWICEVCNRDFTTKIGLGQHKRLAHPAVRNQERIVASQPKETSNRGAHKRCWTKEEEELLIRLEAQFEGNKNINKLIAEHITTKTAKQISDKRRLLSRKPAEEPREEPGTCHHTRRAAASLRTEPEMSHHAQAEDRDNGPGRRPLPGRAAAGGRTMDEIRRHPDKGNGQQRPTKQKSEEQLQAYYKKTLEERLSAGALNTFPRAFKQVMEGRDIKLVINQTAQDCFGCLESISQIRTATRDKKDTVTREKHPKKPFQKWMKDRAIKKGNYLRFQRLFYLDRGKLAKIILDDIECLSCDIPLSEIYSVFKTRWETTGSFKSLGDFKTYGKADNTAFRELITAKEIEKNVQEMSKGSAPGPDGITLGDVVKMDPEFSRTMEIFNLWLTTGKIPDMVRGCRTVLIPKSSKPDRLKDINNWRPITIGSILLRLFSRIVTARLSKACPLNPRQRGFIRAAGCSENLKLLQTIIWSAKREHRPLGVVFVDIAKAFDTVSHQHIIHALQQREVDPHIVGLVSNMYENISTYITTKRNTHTDKIQIRVGVKQGDPMSPLLFNLAMDPLLCKLEESGKGYHRGQSSITAMAFADDLVLLSDSWENMNTNISILETFCNLTGLKTQGQKCHGFYIKPTKDSYTINDCAAWTINGTPLNMIDPGESEKYLGLQFDPWIGIARSGLSTKLDFWLQRIDQAPLKPLQKTDILKTYTIPRLIYIADHSEVKTALLETLDQKIRTAVKEWLHLPPCTCDAILYSSTRDGGLGITKLAGLIPSVQARRLHRIAQSSDDTMKCFMEKEKMEQLHKKLWIQAGGDRENIPSIWEAPPSGSETPGTSESATPEGSGIHGVPAAAMQMQLEANADTSVEEESFGPQPISRLEQCGINANDVKKLEEAGFHTVEAVAYAPKKELINIKGISEAKADKILAEAAKLVPMGFTTETEFHQRRSEIIQITTGSKELDKLLQGGIETGSITEMFGEFRTGKTQICHTLAVTCQLPIDRGGGEGKAMYIDTEGTFRPERLLAVAERYGLSGSDVLDNVAYARAFNTDHQTQLLYQASAMMVESRYALLIVDSATALYRTDYSGRGELSARQMHLARFLRMLLRLADEFGVAVVITNQVVAQVDGAAMFAADPKKPIGGNIIAHASTTRLYLRKGRGETRICKIYDSPCLPEAEAMFAINADGVGDAKDSGSETPGTSESATPPPNNVSTNSEWEAPTQKDKFPKPCNWRKNEFKKWTKLASQGRGIVNFERDKISNHWIQYYRRIPHRKLLTALQLRANVYPTREFLARGRQDQYIKACRHCDADIESCAHIIGNCPVTQDARIKRHNYICELLLEEAKKKDWVVFKEPHIRDSNKELYKPDLIFVKDARALVVDVTVRYEAAKSSLEEAAAEKVRKYKHLETEVRHLTNAKDVTFVGFPLGARGKWHQDNFKLLTELGLSKSRQVKMAETFSTVALFSSVDIVHMFASRARKSMVM

SEQ ID NO: 121 - protein, 1543 aa, synthetic construct
MASCPKPGPPVSAGAMSLESGLTTHSVLAIERGPNSLANSGSDFGGGGLGLPLRLLRVSVGTQTSRSDWVDLVSWSHPGPTSKSQQVDLVSLFPKHRVDLLSKNDQVDLVAQFLPSKFPPNLAENDLALLVNLEFYRSDLHVYECVHFAAHWEGLSGLPEVYEQLAPQPCVGETLHSSLPRDSELFVPEEGSSEKESEDAPKTSPPTPGKHGLEQTGEEKVMVTVPDKNPPCPCCGTRVNSVLNLIEHLKVSHGKRGVCFRCAKCGKENSNYHSVVCHFPKCRGPETEKAPAGEWICEVCNRDFTTKIGLGQHKRLAHPAVRNQERIVASQPKETSNRGAHKRCWTKEEEELLIRLEAQFEGNKNINKLIAEHITTKTAKQISDKRRLLSRKPAEEPREEPGTCHHTRRAAASLRTEPEMSHHAQAEDRDNGPGRRPLPGRAAAGGRTMDEIRRHPDKGNGQQRPTKQKSEEQLQAYYKKTLEERLSAGALNTFPRAFKQVMEGRDIKLVINQTAQDCFGCLESISQIRTATRDKKDTVTREKHPKKPFQKWMKDRAIKKGNYLRFQRLFYLDRGKLAKIILDDIECLSCDIPLSEIYSVFKTRWETTGSFKSLGDFKTYGKADNTAFRELITAKEIEKNVQEMSKGSAPGPDGITLGDVVKMDPEFSRTMEIFNLWLTTGKIPDMVRGCRTVLIPKSSKPDRLKDINNWRPITIGSILLRLFSRIVTARLSKACPLNPRQRGFIRAAGCSENLKLLQTIIWSAKREHRPLGVVFVDIAKAFDTVSHQHIIHALQQREVDPHIVGLVSNMYENISTYITTKRNTHTDKIQIRVGVKQGDPMSPLLFNLAMDPLLCKLEESGKGYHRGQSSITAMAFADDLVLLSDSWENMNTNISILETFCNLTGLKTQGQKCHGFYIKPTKDSYTINDCAAWTINGTPLNMIDPGESEKYLGLQFDPWIGIARSGLSTKLDFWLQRIDQAPLKPLQKTDILKTYTIPRLIYIADHSEVKTALLETLDQKIRTAVKEWLHLPPCTCDAILYSSTRDGGLGITKLAGLIPSVQARRLHRIAQSSDDTMKCFMEKEKMEQLHKKLWIQAGGDRENIPSIWEAPPSGSETPGTSESATPEGSESTVGPACPPGRTVTKRPWALAEDTPRGPDSPPKRPRPNSLPLTTTFRPLPPPPQTTSAVDPSSHSPVNPPRDQHATDTADEKPRAASPALSDASGPPTPDIPLSPGGTHARDPDADPDSPDLDSSGSETPGTSESATPPPNNVSTNSEWEAPTQKDKFPKPCNWRKNEFKKWTKLASQGRGIVNFERDKISNHWIQYYRRIPHRKLLTALQLRANVYPTREFLARGRQDQYIKACRHCDADIESCAHIIGNCPVTQDARIKRHNYICELLLEEAKKKDWVVFKEPHIRDSNKELYKPDLIFVKDARALVVDVTVRYEAAKSSLEEAAAEKVRKYKHLETEVRHLTNAKDVTFVGFPLGARGKWHQDNFKLLTELGLSKSRQVKMAETFSTVALFSSVDIVHMFASRARKSMVM

SEQ ID NO: 122 - protein, 1451 aa, synthetic construct
MASCPKPGPPVSAGAMSLESGLTTHSVLAIERGPNSLANSGSDFGGGGLGLPLRLLRVSVGTQTSRSDWVDLVSWSHPGPTSKSQQVDLVSLFPKHRVDLLSKNDQVDLVAQFLPSKFPPNLAENDLALLVNLEFYRSDLHVYECVHFAAHWEGLSGLPEVYEQLAPQPCVGETLHSSLPRDSELFVPEEGSSEKESEDAPKTSPPTPGKHGLEQTGEEKVMVTVPDKNPPCPCCGTRVNSVLNLIEHLKVSHGKRGVCFRCAKCGKENSNYHSVVCHFPKCRGPETEKAPAGEWICEVCNRDFTTKIGLGQHKRLAHPAVRNQERIVASQPKETSNRGAHKRCWTKEEEELLIRLEAQFEGNKNINKLIAEHITTKTAKQISDKRRLLSRKPAEEPREEPGTCHHTRRAAASLRTEPEMSHHAQAEDRDNGPGRRPLPGRAAAGGRTMDEIRRHPDKGNGQQRPTKQKSEEQLQAYYKKTLEERLSAGALNTFPRAFKQVMEGRDIKLVINQTAQDCFGCLESISQIRTATRDKKDTVTREKHPKKPFQKWMKDRAIKKGNYLRFQRLFYLDRGKLAKIILDDIECLSCDIPLSEIYSVFKTRWETTGSFKSLGDFKTYGKADNTAFRELITAKEIEKNVQEMSKGSAPGPDGITLGDVVKMDPEFSRTMEIFNLWLTTGKIPDMVRGCRTVLIPKSSKPDRLKDINNWRPITIGSILLRLFSRIVTARLSKACPLNPRQRGFIRAAGCSENLKLLQTIIWSAKREHRPLGVVFVDIAKAFDTVSHQHIIHALQQREVDPHIVGLVSNMYENISTYITTKRNTHTDKIQIRVGVKQGDPMSPLLFNLAMDPLLCKLEESGKGYHRGQSSITAMAFADDLVLLSDSWENMNTNISILETFCNLTGLKTQGQKCHGFYIKPTKDSYTINDCAAWTINGTPLNMIDPGESEKYLGLQFDPWIGIARSGLSTKLDFWLQRIDQAPLKPLQKTDILKTYTIPRLIYIADHSEVKTALLETLDQKIRTAVKEWLHLPPCTCDAILYSSTRDGGLGITKLAGLIPSVQARRLHRIAQSSDDTMKCFMEKEKMEQLHKKLWIQAGGDRENIPSIWEAPPSGSETPGTSESATPEGSPTLLGFHTASGKKVKIAKESLDKVKNLFDEKEQSGSETPGTSESATPPPNNVSTNSEWEAPTQKDKFPKPCNWRKNEFKKWTKLASQGRGIVNFERDKISNHWIQYYRRIPHRKLLTALQLRANVYPTREFLARGRQDQYIKACRHCDADIESCAHIIGNCPVTQDARIKRHNYICELLLEEAKKKDWVVFKEPHIRDSNKELYKPDLIFVKDARALVVDVTVRYEAAKSSLEEAAAEKVRKYKHLETEVRHLTNAKDVTFVGFPLGARGKWHQDNFKLLTELGLSKSRQVKMAETFSTVALFSSVDIVHMFASRARKSMVM

SEQ ID NO: 123 - protein, 1625 aa, synthetic construct
MPKRKVSSAEGAAKEEPKRRSARLSAKPPAKVEAKPKKAAAKDKSSDKKVQTKGKRGAKGKQAEVANQETKEDLPAENGETKTEESPASDEAGEKEAKSDSGSETPGTSESATPESASCPKPGPPVSAGAMSLESGLTTHSVLAIERGPNSLANSGSDFGGGGLGLPLRLLRVSVGTQTSRSDWVDLVSWSHPGPTSKSQQVDLVSLFPKHRVDLLSKNDQVDLVAQFLPSKFPPNLAENDLALLVNLEFYRSDLHVYECVHFAAHWEGLSGLPEVYEQLAPQPCVGETLHSSLPRDSELFVPEEGSSEKESEDAPKTSPPTPGKHGLEQTGEEKVMVTVPDKNPPCPCCGTRVNSVLNLIEHLKVSHGKRGVCFRCAKCGKENSNYHSVVCHFPKCRGPETEKAPAGEWICEVCNRDFTTKIGLGQHKRLAHPAVRNQERIVASQPKETSNRGAHKRCWTKEEEELLIRLEAQFEGNKNINKLIAEHITTKTAKQISDKRRLLSRKPAEEPREEPGTCHHTRRAAASLRTEPEMSHHAQAEDRDNGPGRRPLPGRAAAGGRTMDEIRRHPDKGNGQQRPTKQKSEEQLQAYYKKTLEERLSAGALNTFPRAFKQVMEGRDIKLVINQTAQDCFGCLESISQIRTATRDKKDTVTREKHPKKPFQKWMKDRAIKKGNYLRFQRLFYLDRGKLAKIILDDIECLSCDIPLSEIYSVFKTRWETTGSFKSLGDFKTYGKADNTAFRELITAKEIEKNVQEMSKGSAPGPDGITLGDVVKMDPEFSRTMEIFNLWLTTGKIPDMVRGCRTVLIPKSSKPDRLKDINNWRPITIGSILLRLFSRIVTARLSKACPLNPRQRGFIRAAGCSENLKLLQTIIWSAKREHRPLGVVFVDIAKAFDTVSHQHIIHALQQREVDPHIVGLVSNMYENISTYITTKRNTHTDKIQIRVGVKQGDPMSPLLFNLAMDPLLCKLEESGKGYHRGQSSITAMAFADDLVLLSDSWENMNTNISILETFCNLTGLKTQGQKCHGFYIKPTKDSYTINDCAAWTINGTPLNMIDPGESEKYLGLQFDPWIGIARSGLSTKLDFWLQRIDQAPLKPLQKTDILKTYTIPRLIYIADHSEVKTALLETLDQKIRTAVKEWLHLPPCTCDAILYSSTRDGGLGITKLAGLIPSVQARRLHRIAQSSDDTMKCFMEKEKMEQLHKKLWIQAGGDRENIPSIWEAPPSSEPPNNVSTNSEWEAPTQKDKFPKPCNWRKNEFKKWTKLASQGRGIVNFERDKISNHWIQYYRRIPHRKLLTALQLRANVYPTREFLARGRQDQYIKACRHCDADIESCAHIIGNCPVTQDARIKRHNYICELLLEEAKKKDWVVFKEPHIRDSNKELYKPDLIFVKDARALVVDVTVRYEAAKSSLEEAAAEKVRKYKHLETEVRHLTNAKDVTFVGFPLGARGKWHQDNFKLLTELGLSKSRQVKMAETFSTVALFSSVDIVHMFASRARKSMVMSGSETPGTSESATPEGKGDPKKPRGKMSSYAFFVQTCREEHKKKHPDASVNFSEFSKKCSERWKTMSAKEKGKFEDMAKADKARYEREMKTYIPPKGEGGSGKRTADGSEFESPKKKRKV

SEQ ID NO: 124 - protein, 1372 aa, synthetic construct
MPKRKVSSAEGAAKEEPKRRSARLSAKPPAKVEAKPKKAAAKDKSSDKKVQTKGKRGAKGKQAEVANQETKEDLPAENGETKTEESPASDEAGEKEAKSDSGSETPGTSESATPESENQTQTKSILARSSPRIKRTAVDAADSGHPSTSGLRNHQNPNEQSQKRQKYTMPENRTIMKCYYKSEPQRRGYQKRMHQLWKQEYPDSQITEPRLADQRRFIIRNKVFSEVELEEIQKICKVDYHQTTAQTAAETPATLGMVEQIEPEESVALLQEFEEPALETSVEPPGTLTARQQELKDKIMAHAAANAIRQRLPTLKTVPKRHLAPLMKDVNAALSTVQITSIEQTNQFAYSAAVIVTEELGLLQPRQPQRKSTGKPKWKVRLELKIKKLRSDASNLKNMKERKLKNDKIKQYLIRKYWLNTRKIEEALEIVKEQITATARKIERYEARIIQYRQNQLFQSDQRRFYQSLNQTTDTVTIKPEKTATTKFWKELWENNKNYNKNAGWIKEFEGKFSQNKMELMEITTEMISKRVQKVKNWTSPGSDQLHGFWLKHLISLHGKMAQQFNEMLQKGSISEWLTTGRTYLIQKDPAKGAAPGNYRPITCLPTMFKLLTGIIADRIQDYLEEKNILPDEQKGNKRKSRGTKDQLLIDKMILENCKSRKANLHMTWIDYKKAFDSLPHSWIIKCLDAIGICKTVGTFIENMMEHWKTELFVGNESYGLVNIRRGIFQGDSLSPLLFIIAMIPLSTILQKTNLGYQISKNSHKISHLMYMDDLKLYGKTETEIQSLTNTVRIFSTDINMEFGLDKCSTVALKKGKIIESEGINMPNGQTIKCHQPEAYKYLGILQLDNIKHEHVKTVVSKEYTQRVRKILKSKLNGGNTIKAINTWAIPVIRYTAGIINWTQVELDNLDRKTRKLMTIHHSLHPRSDVDRLYLPRRSGGRGLLQVKQAVKEEEHALAEYVKQSEEPALIEVKNQKLLKTQQTKNQYKKTALQTRADSWHNKTLHGKFLDKIEGKADKEKTWLWLTNGTLKKETEGLILAAQEQAIRTNAIKAKIEKSADDPKCRLCKETDETIDHILSCCKKIAQTDYKQRHNYVAQMIHWNLCLKYHLPAAKNWWDHKPAKVLENEHAKILWDFRIQTDKVLEHNTPDITVVEKNKVWIIDVAIPGDSRIDEKQQEKLSRYQDLKIELQRLWQKPVQVVPVVMGTLGAVPKDLSRHLETIDIDKITICQLQKATLLGSAHIIRKYITQSSGSETPGTSESATPEGKGDPKKPRGKMSSYAFFVQTCREEHKKKHPDASVNFSEFSKKCSERWKTMSAKEKGKFEDMAKADKARYEREMKTYIPPKGEGGSGKRTADGSEFESPKKKRKV

SEQ ID NO: 125 - protein, 1767 aa, synthetic construct
MPKRKVSSAEGAAKEEPKRRSARLSAKPPAKVEAKPKKAAAKDKSSDKKVQTKGKRGAKGKQAEVANQETKEDLPAENGETKTEESPASDEAGEKEAKSDSGSETPGTSESATPESASCPKPGPPVSAGAMSLESGLTTHSVLAIERGPNSLANSGSDFGGGGLGLPLRLLRVSVGTQTSRSDWVDLVSWSHPGPTSKSQQVDLVSLFPKHRVDLLSKNDQVDLVAQFLPSKFPPNLAENDLALLVNLEFYRSDLHVYECVHFAAHWEGLSGLPEVYEQLAPQPCVGETLHSSLPRDSELFVPEEGSSEKESEDAPKTSPPTPGKHGLEQTGEEKVMVTVPDKNPPCPCCGTRVNSVLNLIEHLKVSHGKRGVCFRCAKCGKENSNYHSVVCHFPKCRGPETEKAPAGEWICEVCNRDFTTKIGLGQHKRLAHPAVRNQERIVASQPKETSNRGAHKRCWTKEEEELLIRLEAQFEGNKNINKLIAEHITTKTAKQISDKRRLLSRKPAEEPREEPGTCHHTRRAAASLRTEPEMSHHAQAEDRDNGPGRRPLPGRAAAGGRTMDEIRRHPDKGNGQQRPTKQKSEEQLQAYYKKTLEERLSAGALNTFPRAFKQVMEGRDIKLVINQTAQDCFGCLESISQIRTATRDKKDTVTREKHPKKPFQKWMKDRAIKKGNYLRFQRLFYLDRGKLAKIILDDIECLSCDIPLSEIYSVFKTRWETTGSFKSLGDFKTYGKADNTAFRELITAKEIEKNVQEMSKGSAPGPDGITLGDVVKMDPEFSRTMEIFNLWLTTGKIPDMVRGCRTVLIPKSSKPDRLKDINNWRPITIGSILLRLFSRIVTARLSKACPLNPRQRGFIRAAGCSENLKLLQTIIWSAKREHRPLGVVFVDIAKAFDTVSHQHIIHALQQREVDPHIVGLVSNMYENISTYITTKRNTHTDKIQIRVGVKQGDPMSPLLFNLAMDPLLCKLEESGKGYHRGQSSITAMAFADDLVLLSDSWENMNTNISILETFCNLTGLKTQGQKCHGFYIKPTKDSYTINDCAAWTINGTPLNMIDPGESEKYLGLQFDPWIGIARSGLSTKLDFWLQRIDQAPLKPLQKTDILKTYTIPRLIYIADHSEVKTALLETLDQKIRTAVKEWLHLPPCTCDAILYSSTRDGGLGITKLAGLIPSVQARRLHRIAQSSDDTMKCFMEKEKMEQLHKKLWIQAGGDRENIPSIWEAPPSSEPPNNVSTNSEWEAPTQKDKFPKPCNWRKNEFKKWTKLASQGRGIVNFERDKISNHWIQYYRRIPHRKLLTALQLRANVYPTREFLARGRQDQYIKACRHCDADIESCAHIIGNCPVTQDARIKRHNYICELLLEEAKKKDWVVFKEPHIRDSNKELYKPDLIFVKDARALVVDVTVRYEAAKSSLEEAAAEKVRKYKHLETEVRHLTNAKDVTFVGFPLGARGKWHQDNFKLLTELGLSKSRQVKMAETFSTVALFSSVDIVHMFASRARKSMVMSGSETPGTSESATPEGSESTVGPACPPGRTVTKRPWALAEDTPRGPDSPPKRPRPNSLPLTTTFRPLPPPPQTTSAVDPSSHSPVNPPRDQHATDTADEKPRAASPALSDASGPPTPDIPLSPGGTHARDPDADPDSPDLDSSGSETPGTSESATPEGKGDPKKPRGKMSSYAFFVQTCREEHKKKHPDASVNFSEFSKKCSERWKTMSAKEKGKFEDMAKADKARYEREMKTYIPPKGEGGSGKRTADGSEFESPKKKRKV

SEQ ID NO: 126 - protein, 1488 aa, synthetic construct
MASCPKPGPPVSAGAMSLESGLTTHSVLAIERGPNSLANSGSDFGGGGLGLPLRLLRVSVGTQTSRSDWVDLVSWSHPGPTSKSQQVDLVSLFPKHRVDLLSKNDQVDLVAQFLPSKFPPNLAENDLALLVNLEFYRSDLHVYECVHFAAHWEGLSGLPEVYEQLAPQPCVGETLHSSLPRDSELFVPEEGSSEKESEDAPKTSPPTPGKHGLEQTGEEKVMVTVPDKNPPCPCCGTRVNSVLNLIEHLKVSHGKRGVCFRCAKCGKENSNYHSVVCHFPKCRGPETEKAPAGEWICEVCNRDFTTKIGLGQHKRLAHPAVRNQERIVASQPKETSNRGAHKRCWTKEEEELLIRLEAQFEGNKNINKLIAEHITTKTAKQISDKRRLLSRKPAEEPREEPGTCHHTRRAAASLRTEPEMSHHAQAEDRDNGPGRRPLPGRAAAGGRTMDEIRRHPDKGNGQQRPTKQKSEEQLQAYYKKTLEERLSAGALNTFPRAFKQVMEGRDIKLVINQTAQDCFGCLESISQIRTATRDKKDTVTREKHPKKPFQKWMKDRAIKKGNYLRFQRLFYLDRGKLAKIILDDIECLSCDIPLSEIYSVFKTRWETTGSFKSLGDFKTYGKADNTAFRELITAKEIEKNVQEMSKGSAPGPDGITLGDVVKMDPEFSRTMEIFNLWLTTGKIPDMVRGCRTVLIPKSSKPDRLKDINNWRPITIGSILLRLFSRIVTARLSKACPLNPRQRGFIRAAGCSENLKLLQTIIWSAKREHRPLGVVFVDIAKAFDTVSHQHIIHALQQREVDPHIVGLVSNMYENISTYITTKRNTHTDKIQIRVGVKQGDPMSPLLFNLAMDPLLCKLEESGKGYHRGQSSITAMAFADDLVLLSDSWENMNTNISILETFCNLTGLKTQGQKCHGFYIKPTKDSYTINDCAAWTINGTPLNMIDPGESEKYLGLQFDPWIGIARSGLSTKLDFWLQRIDQAPLKPLQKTDILKTYTIPRLIYIADHSEVKTALLETLDQKIRTAVKEWLHLPPCTCDAILYSSTRDGGLGITKLAGLIPSVQARRLHRIAQSSDDTMKCFMEKEKMEQLHKKLWIQAGGDRENIPSIWEAPPSSEPPNNVSTNSEWEAPTQKDKFPKPCNWRKNEFKKWTKLASQGRGIVNFERDKISNHWIQYYRRIPHRKLLTALQLRANVYPTREFLARGRQDQYIKACRHCDADIESCAHIIGNCPVTQDARIKRHNYICELLLEEAKKKDWVVFKEPHIRDSNKELYKPDLIFVKDARALVVDVTVRYEAAKSSLEEAAAEKVRKYKHLETEVRHLTNAKDVTFVGFPLGARGKWHQDNFKLLTELGLSKSRQVKMAETFSTVALFSSVDIVHMFASRARKSMVMSGSETPGTSESATPEGSVTVKFKYKGEEKEVDISKIKKVWRVGKMISFTYDDNGKTGRGAVSEKDAPKELLQMLEKGGSGKRTADGSEFESPKKKRKV

SEQ ID NO: 127 - protein, 1554 aa, synthetic construct
MASCPKPGPPVSAGAMSLESGLTTHSVLAIERGPNSLANSGSDFGGGGLGLPLRLLRVSVGTQTSRSDWVDLVSWSHPGPTSKSQQVDLVSLFPKHRVDLLSKNDQVDLVAQFLPSKFPPNLAENDLALLVNLEFYRSDLHVYECVHFAAHWEGLSGLPEVYEQLAPQPCVGETLHSSLPRDSELFVPEEGSSEKESEDAPKTSPPTPGKHGLEQTGEEKVMVTVPDKNPPCPCCGTRVNSVLNLIEHLKVSHGKRGVCFRCAKCGKENSNYHSVVCHFPKCRGPETEKAPAGEWICEVCNRDFTTKIGLGQHKRLAHPAVRNQERIVASQPKETSNRGAHKRCWTKEEEELLIRLEAQFEGNKNINKLIAEHITTKTAKQISDKRRLLSRKPAEEPREEPGTCHHTRRAAASLRTEPEMSHHAQAEDRDNGPGRRPLPGRAAAGGRTMDEIRRHPDKGNGQQRPTKQKSEEQLQAYYKKTLEERLSAGALNTFPRAFKQVMEGRDIKLVINQTAQDCFGCLESISQIRTATRDKKDTVTREKHPKKPFQKWMKDRAIKKGNYLRFQRLFYLDRGKLAKIILDDIECLSCDIPLSEIYSVFKTRWETTGSFKSLGDFKTYGKADNTAFRELITAKEIEKNVQEMSKGSAPGPDGITLGDVVKMDPEFSRTMEIFNLWLTTGKIPDMVRGCRTVLIPKSSKPDRLKDINNWRPITIGSILLRLFSRIVTARLSKACPLNPRQRGFIRAAGCSENLKLLQTIIWSAKREHRPLGVVFVDIAKAFDTVSHQHIIHALQQREVDPHIVGLVSNMYENISTYITTKRNTHTDKIQIRVGVKQGDPMSPLLFNLAMDPLLCKLEESGKGYHRGQSSITAMAFADDLVLLSDSWENMNTNISILETFCNLTGLKTQGQKCHGFYIKPTKDSYTINDCAAWTINGTPLNMIDPGESEKYLGLQFDPWIGIARSGLSTKLDFWLQRIDQAPLKPLQKTDILKTYTIPRLIYIADHSEVKTALLETLDQKIRTAVKEWLHLPPCTCDAILYSSTRDGGLGITKLAGLIPSVQARRLHRIAQSSDDTMKCFMEKEKMEQLHKKLWIQAGGDRENIPSIWEAPPSSEPPNNVSTNSEWEAPTQKDKFPKPCNWRKNEFKKWTKLASQGRGIVNFERDKISNHWIQYYRRIPHRKLLTALQLRANVYPTREFLARGRQDQYIKACRHCDADIESCAHIIGNCPVTQDARIKRHNYICELLLEEAKKKDWVVFKEPHIRDSNKELYKPDLIFVKDARALVVDVTVRYEAAKSSLEEAAAEKVRKYKHLETEVRHLTNAKDVTFVGFPLGARGKWHQDNFKLLTELGLSKSRQVKMAETFSTVALFSSVDIVHMFASRARKSMVMSGSETPGTSESATPEGSESTVGPACPPGRTVTKRPWALAEDTPRGPDSPPKRPRPNSLPLTTTFRPLPPPPQTTSAVDPSSHSPVNPPRDQHATDTADEKPRAASPALSDASGPPTPDIPLSPGGTHARDPDADPDSPDLDSGGSGKRTADGSEFESPKKKRKV

SEQ ID NO: 128 - protein, 1491 aa, synthetic construct
MASCPKPGPPVSAGAMSLESGLTTHSVLAIERGPNSLANSGSDFGGGGLGLPLRLLRVSVGTQTSRSDWVDLVSWSHPGPTSKSQQVDLVSLFPKHRVDLLSKNDQVDLVAQFLPSKFPPNLAENDLALLVNLEFYRSDLHVYECVHFAAHWEGLSGLPEVYEQLAPQPCVGETLHSSLPRDSELFVPEEGSSEKESEDAPKTSPPTPGKHGLEQTGEEKVMVTVPDKNPPCPCCGTRVNSVLNLIEHLKVSHGKRGVCFRCAKCGKENSNYHSVVCHFPKCRGPETEKAPAGEWICEVCNRDFTTKIGLGQHKRLAHPAVRNQERIVASQPKETSNRGAHKRCWTKEEEELLIRLEAQFEGNKNINKLIAEHITTKTAKQISDKRRLLSRKPAEEPREEPGTCHHTRRAAASLRTEPEMSHHAQAEDRDNGPGRRPLPGRAAAGGRTMDEIRRHPDKGNGQQRPTKQKSEEQLQAYYKKTLEERLSAGALNTFPRAFKQVMEGRDIKLVINQTAQDCFGCLESISQIRTATRDKKDTVTREKHPKKPFQKWMKDRAIKKGNYLRFQRLFYLDRGKLAKIILDDIECLSCDIPLSEIYSVFKTRWETTGSFKSLGDFKTYGKADNTAFRELITAKEIEKNVQEMSKGSAPGPDGITLGDVVKMDPEFSRTMEIFNLWLTTGKIPDMVRGCRTVLIPKSSKPDRLKDINNWRPITIGSILLRLFSRIVTARLSKACPLNPRQRGFIRAAGCSENLKLLQTIIWSAKREHRPLGVVFVDIAKAFDTVSHQHIIHALQQREVDPHIVGLVSNMYENISTYITTKRNTHTDKIQIRVGVKQGDPMSPLLFNLAMDPLLCKLEESGKGYHRGQSSITAMAFADDLVLLSDSWENMNTNISILETFCNLTGLKTQGQKCHGFYIKPTKDSYTINDCAAWTINGTPLNMIDPGESEKYLGLQFDPWIGIARSGLSTKLDFWLQRIDQAPLKPLQKTDILKTYTIPRLIYIADHSEVKTALLETLDQKIRTAVKEWLHLPPCTCDAILYSSTRDGGLGITKLAGLIPSVQARRLHRIAQSSDDTMKCFMEKEKMEQLHKKLWIQAGGDRENIPSIWEAPPSSEPPNNVSTNSEWEAPTQKDKFPKPCNWRKNEFKKWTKLASQGRGIVNFERDKISNHWIQYYRRIPHRKLLTALQLRANVYPTREFLARGRQDQYIKACRHCDADIESCAHIIGNCPVTQDARIKRHNYICELLLEEAKKKDWVVFKEPHIRDSNKELYKPDLIFVKDARALVVDVTVRYEAAKSSLEEAAAEKVRKYKHLETEVRHLTNAKDVTFVGFPLGARGKWHQDNFKLLTELGLSKSRQVKMAETFSTVALFSSVDIVHMFASRARKSMVMSGSETPGTSESATPEGSATVKFKYKGEEKEVDISKIKKVWRVGKMISFTYDEGGGKTGRGAVSEKDAPKELLQMLEKQKKGGSGKRTADGSEFEPKKKRKV

SEQ ID NO: 129 - protein, 1502 aa, synthetic construct
MASCPKPGPPVSAGAMSLESGLTTHSVLAIERGPNSLANSGSDFGGGGLGLPLRLLRVSVGTQTSRSDWVDLVSWSHPGPTSKSQQVDLVSLFPKHRVDLLSKNDQVDLVAQFLPSKFPPNLAENDLALLVNLEFYRSDLHVYECVHFAAHWEGLSGLPEVYEQLAPQPCVGETLHSSLPRDSELFVPEEGSSEKESEDAPKTSPPTPGKHGLEQTGEEKVMVTVPDKNPPCPCCGTRVNSVLNLIEHLKVSHGKRGVCFRCAKCGKENSNYHSVVCHFPKCRGPETEKAPAGEWICEVCNRDFTTKIGLGQHKRLAHPAVRNQERIVASQPKETSNRGAHKRCWTKEEEELLIRLEAQFEGNKNINKLIAEHITTKTAKQISDKRRLLSRKPAEEPREEPGTCHHTRRAAASLRTEPEMSHHAQAEDRDNGPGRRPLPGRAAAGGRTMDEIRRHPDKGNGQQRPTKQKSEEQLQAYYKKTLEERLSAGALNTFPRAFKQVMEGRDIKLVINQTAQDCFGCLESISQIRTATRDKKDTVTREKHPKKPFQKWMKDRAIKKGNYLRFQRLFYLDRGKLAKIILDDIECLSCDIPLSEIYSVFKTRWETTGSFKSLGDFKTYGKADNTAFRELITAKEIEKNVQEMSKGSAPGPDGITLGDVVKMDPEFSRTMEIFNLWLTTGKIPDMVRGCRTVLIPKSSKPDRLKDINNWRPITIGSILLRLFSRIVTARLSKACPLNPRQRGFIRAAGCSENLKLLQTIIWSAKREHRPLGVVFVDIAKAFDTVSHQHIIHALQQREVDPHIVGLVSNMYENISTYITTKRNTHTDKIQIRVGVKQGDPMSPLLFNLAMDPLLCKLEESGKGYHRGQSSITAMAFADDLVLLSDSWENMNTNISILETFCNLTGLKTQGQKCHGFYIKPTKDSYTINDCAAWTINGTPLNMIDPGESEKYLGLQFDPWIGIARSGLSTKLDFWLQRIDQAPLKPLQKTDILKTYTIPRLIYIADHSEVKTALLETLDQKIRTAVKEWLHLPPCTCDAILYSSTRDGGLGITKLAGLIPSVQARRLHRIAQSSDDTMKCFMEKEKMEQLHKKLWIQAGGDRENIPSIWEAPPSSEPPNNVSTNSEWEAPTQKDKFPKPCNWRKNEFKKWTKLASQGRGIVNFERDKISNHWIQYYRRIPHRKLLTALQLRANVYPTREFLARGRQDQYIKACRHCDADIESCAHIIGNCPVTQDARIKRHNYICELLLEEAKKKDWVVFKEPHIRDSNKELYKPDLIFVKDARALVVDVTVRYEAAKSSLEEAAAEKVRKYKHLETEVRHLTNAKDVTFVGFPLGARGKWHQDNFKLLTELGLSKSRQVKMAETFSTVALFSSVDIVHMFASRARKSMVMSGSETPGTSESATPEGSSVSMVHSERLPLLMNRNGIRFQSEVIDPNPPKKVKWVLTGSGGNMFTANVRGSNVSSLVKHTWSEAFVSLIEDRGGSGKRTADGSEFEPKKKRKV

SEQ ID NO: 130 - protein, 1390 aa, synthetic construct; identical to SEQ ID NO: 1

SEQ ID NO: 131 - protein, 1390 aa, synthetic construct
MASCPKPGPPVSAGAMSLESGLTTHSVLAIERGPNSLANSGSDFGGGGLGLPLRLLRVSVGTQTSRSDWVDLVSWSHPGPTSKSQQVDLVSLFPKHRVDLLSKNDQVDLVAQFLPSKFPPNLAENDLALLVNLEFYRSDLHVYECVHFAAHWEGLSGLPEVYEQLAPQPCVGETLHSSLPRDSELFVPEEGSSEKESEDAPKTSPPTPGKHGLEQTGEEKVMVTVPDKNPPCPCCGTRVNSVLNLIEHLKVSHGKRGVCFRCAKCGKENSNYHSVVCHFPKCRGPETEKAPAGEWICEVCNRDFTTKIGLGQHKRLAHPAVRNQERIVASQPKETSNRGAHKRCWTKEEEELLIRLEAQFEGNKNINKLIAEHITTKTAKQISDKRRLLSRKPAEEPREEPGTCHHTRRAAASLRTEPEMSHHAQAEDRDNGPGRRPLPGRAAAGGRTMDEIRRHPDKGNGQQRPTKQKSEEQLQAYYKKTLEERLSAGALNTFPRAFKQVMEGRDIKLVINQTAQDCFGCLESISQIRTATRDKKDTVTREKHPKKPFQKWMKDRAIKRKRRQTSMTDFYHSKRRLIFSKRKPIECLSCDIPLSEIYSVFKTRWETTGSFKSLGDFKTYGKADNTAFRELITAKEIEKNVQEMSKGSAPGPDGITLGDVVKMDPEFSRTMEIFNLWLTTGKIPDMVRGCRTVLIPKSSKPDRLKDINNWRPITIGSILLRLFSRIVTARLSKACPLNPRQRGFIRAAGCSENLKLLQTIIWSAKREHRPLGVVFVDIAKAFDTVSHQHIIHALQQREVDPHIVGLVSNMYENISTYITTKRNTHTDKIQIRVGVKQGDPMSPLLFNLAMDPLLCKLEESGKGYHRGQSSITAMAFADDLVLLSDSWENMNTNISILETFCNLTGLKTQGQKCHGFYIKPTKDSYTINDCAAWTINGTPLNMIDPGESEKYLGLQFDPWIGIARSGLSTKLDFWLQRIDQAPLKPLQKTDILKTYTIPRLIYIADHSEVKTALLETLDQKIRTAVKEWLHLPPCTCDAILYSSTRDGGLGITKLAGLIPSVQARRLHRIAQSSDDTMKCFMEKEKMEQLHKKLWIQAGGDRENIPSIWEAPPSSEPPNNVSTNSEWEAPTQKDKFPKPCNWRKNEFKKWTKLASQGRGIVNFERDKISNHWIQYYRRIPHRKLLTALQLRANVYPTREFLARGRQDQYIKACRHCDADIESCAHIIGNCPVTQDARIKRHNYICELLLEEAKKKDWVVFKEPHIRDSNKELYKPDLIFVKDARALVVDVTVRYEAAKSSLEEAAAEKVRKYKHLETEVRHLTNAKDVTFVGFPLGARGKWHQDNFKLLTELGLSKSRQVKMAETFSTVALFSSVDIVHMFASRARKSMVM

SEQ ID NO: 132 - protein, 1296 aa, synthetic construct
MENQTQTKSILARSSPRIKRTAVDAADSGHPSTSGLRNHQNPNEQSQKRQKYTMPENRTIMKCYYKSEPQRRGYQKRMHQLWKQEYPDSQITEPRLADQRRFIIRNKVFSEVELEEIQKICKVDYHQTTAQTAAETPATLGMVEQIEPEESVALLQEFEEPALETSVEPPGTLTARQQELKDKIMAHAAANAIRQRLPTLKTVPKRHLAPLMKDVNAALSTVQITSIEQTNQFAYSAAVIVTEELGLLQPRQPQRKSTGKPKWKVRLELKIKKLRSDASNLKNMKERKLKNDKIKQYLIRKYWLNTRKIEEALEIVKEQITATARKIERYEARIIQYRQNQLFQSDQRRFYQSLNQTTDTVTIKPEKTATTKFWKELWENNKNYNKNAGWIKEFEGKFSQNKMELMEITTEMISKRVQKVKNWTSPGSDQLHGFWLKHLISLHGKMAQQFNEMLQKGSISEWLTTGRTYLIQKDPAKGAAPGNYRPITCLPTMFKLLTGIIADRIQDYLEEKNILPDEQKGNKRKSRGTKDQLLIDKMILENCKSRKANLHMTWIDYKKAFDSLPHSWIIKCLDAIGICKTVGTFIENMMEHWKTELFVGNESYGLVNIRRGIFQGDSLSPLLFIIAMIPLSTILQKTNLGYQISKNSHKISHLMYMDDLKLYGKTETEIQSLTNTVRIFSTDINMEFGLDKCSTVALKKGKIIESEGINMPNGQTIKCHQPEAYKYLGILQLDNIKHEHVKTVVSKEYTQRVRKILKSKLNGGNTIKAINTWAIPVIRYTAGIINWTQVELDNLDRKTRKLMTIHHSLHPRSDVDRLYLPRRSGGRGLLQVKQAVKEEEHALAEYVKQSEEPALIEVKNQKLLKTQQTKNQYKKTALQTRADSWHNKTLHGKFLDKIEGKADKEKTWLWLTNGTLKKETEGLILAAQEQAIRTNAIKAKIEKSADDPKCRLCKETDETIDHILSCCKKIAQTDYKQRHNYVAQMIHWNLCLKYHLPAAKNWWDHKPAKVLENEHAKILWDFRIQTDKVLEHNTPDITVVEKNKVWIIDVAIPGDSRIDEKQQEKLSRYQDLKIELQRLWQKPVQVVPVVMGTLGAVPKDLSRHLETIDIDKITICQLQKATLLGSAHIIRKYITQSSGSETPGTSESATPEGSVDMMDLPRSRINAGMLAQFIDKPVCFVGRLEKIHPTGKMFILSDGEGKNGTIELMEPLDEEISGIVEVVGRVTAKATILCTSYVQFKEDSHPFDLGLYNEAVKIIHDFPQFYPLGIVQHDGGSGKRTADGSEFESPKKKRKV

SEQ ID NO: 133 - protein, 1389 aa, synthetic construct
MASCPKPGPPVSAGAMSLESGLTTHSVLAIERGPNSLANSGSDFGGGGLGLPLRLLRVSVGTQTSRSDWVDLVSWSHPGPTSKSQQVDLVSLFPKHRVDLLSKNDQVDLVAQFLPSKFPPNLAENDLALLVNLEFYRSDLHVYECVHFAAHWEGLSGLPEVYEQLAPQPCVGETLHSSLPRDSELFVPEEGSSEKESEDAPKTSPPTPGKHGLEQTGEEKVMVTVPDKNPPCPCCGTRVNSVLNLIEHLKVSHGKRGVCFRCAKCGKENSNYHSVVCHFPKCRGPETEKAPAGEWICEVCNRDFTTKIGLGQHKRLAHPAVRNQERIVASQPKETSNRGAHKRCWTKEEEELLIRLEAQFEGNKNINKLIAEHITTKTAKQISDKRRLLSRKPAEEPREEPGTCHHTRRAAASLRTEPEMSHHAQAEDRDNGPGRRPLPGRAAAGGRTMDEIRRHPDKGNGQQRPTKQKSEEQLQAYYKKTLEERLSAGALNTFPRAFKQVMEGRDIKLVINQTAQDCFGCLESISQIRTATRDKKDTVTREKHPKKPFQKWMKDRAIKKGNYLRFQRLFYLDRGKLAKIILDDIECLSCDIPLSEIYSVFKTRWETTGSFKSLGDFKTYGKADNTAFRELITAKEIEKNVQEMSKGSAPGPDGITLGDVVKMDPEFSRTMEIFNLWLTTGKIPDMVRGCRTVLIPKSSKPDRLKDINNWRPITIGSILLRLFSRIVTARLSKACPLNPRQRGFIRAAGCSENLKLLQTIIWSAKREHRPLGVVFVDIAKAFDTVSHQHIIHALQQREVDPHIVGLVSNMYENISTYITTKRNTHTDKIQIRVGVKQGDPMSPLLFNLAMDPLLCKLEESGKGYHRGQSSITAMAFADDLVLLSDSWENMNTNISILETFCNLTGLKTQGQKCHGFYIKPTKDSYTINDCAAWTINGTPLNMIDPGESEKYLGLQFDPWIGIARSGLSTKLDFWLQRIDQAPLKPLQKTDILKTYTIPRLIYIADHSEVKTALLETLDQKIRTAVKEWLHLPPCTCDAILYSSTRDGGLGITKLAGLIPSVQARRLHRIAQSSDDTMKCFMEKEKMEQLHKKLWIQAGGDRENIPSIWEAPPSSEPPNNVSTNSEWEAPTQKDKFPKPCNWRKNEFKKWTKLASQGRGIVNFERDKISNHWIQYYRRIPHRKLLTALQLRANVYPTREFLARGRQDQYIKACRHCDADIESCAHIIGFCPVTKDARIKRHNRICDRLCEEAAKREWVVFKEPHLRDATTELFKPDVIFVKEDRALVVDVTVRYESAKTTLEAAAMEKVDKYKHLEAEVKELTNAKDVVFMGFPLGARGKFYKGNFNLLETLGLPKTRQLSVAKTLSTYALMSSVDIVHMFASRSRKPNV

SEQ ID NO: 134 - protein, 1390 aa, synthetic construct; identical to SEQ ID NO: 5

SEQ ID NO: 135 - protein, 1408 aa, synthetic construct
MAKRTADGSEFESPKKKRKVSCPKPGPPVSAGAMSLESGLTTHSVLAIERGPNSLANSGSDFGGGGLGLPLRLLRVSVGTQTSRSDWVDLVSWSHPGPTSKSQQVDLVSLFPKHRVDLLSKNDQVDLVAQFLPSKFPPNLAENDLALLVNLEFYRSDLHVYECVHFAAHWEGLSGLPEVYEQLAPQPCVGETLHSSLPRDSELFVPEEGSSEKESEDAPKTSPPTPGKHGLEQTGEEKVMVTVPDKNPPCPCCGTRVNSVLNLIEHLKVSHGKRGVCFRCAKCGKENSNYHSVVCHFPKCRGPETEKAPAGEWICEVCNRDFTTKIGLGQHKRLAHPAVRNQERIVASQPKETSNRGAHKRCWTKEEEELLIRLEAQFEGNKNINKLIAEHITTKTAKQISDKRRLLSRKPAEEPREEPGTCHHTRRAAASLRTEPEMSHHAQAEDRDNGPGRRPLPGRAAAGGRTMDEIRRHPDKGNGQQRPTKQKSEEQLQAYYKKTLEERLSAGALNTFPRAFKQVMEGRDIKLVINQTAQDCFGCLESISQIRTATRDKKDTVTREKHPKKPFQKWMKDRAIKKGNYLRFQRLFYLDRGKLAKIILDDIECLSCDIPLSEIYSVFKTRWETTGSFKSLGDFKTYGKADNTAFRELITAKEIEKNVQEMSKGSAPGPDGITLGDVVKMDPEFSRTMEIFNLWLTTGKIPDMVRGCRTVLIPKSSKPDRLKDINNWRPITIGSILLRLFSRIVTARLSKACPLNPRQRGFIRAAGCSENLKLLQTIIWSAKREHRPLGVVFVDIAKAFDTVSHQHIIHALQQREVDPHIVGLVSNMYENISTYITTKRNTHTDKIQIRVGVKQGDPMSPLLFNLAMDPLLCKLEESGKGYHRGQSSITAMAFADDLVLLSDSWENMNTNISILETFCNLTGLKTQGQKCHGFYIKPTKDSYTINDCAAWTINGTPLNMIDPGESEKYLGLQFDPWIGIARSGLSTKLDFWLQRIDQAPLKPLQKTDILKTYTIPRLIYIADHSEVKTALLETLDQKIRTAVKEWLHLPPCTCDAILYSSTRDGGLGITKLAGLIPSVQARRLHRIAQSSDDTMKCFMEKEKMEQLHKKLWIQAGGDRENIPSIWEAPPSSEPPNNVSTNSEWEAPTQKDKFPKPCNWRKNEFKKWTKLASQGRGIVNFERDKISNHWIQYYRRIPHRKLLTALQLRANVYPTREFLARGRQDQYIKACRHCDADIESCAHIIGNCPVTQDARIKRHNYICELLLEEAKKKDWVVFKEPHIRDSNKELYKPDLIFVKDARALVVDVTVRYEAAKSSLEEAAAEKVRKYKHLETEVRHLTNAKDVTFVGFPLGARGKWHQDNFKLLTELGLSKSRQVKMAETFSTVALFSSVDIVHMFASRARKSMVM

SEQ ID NO: 136 - protein, 1579 aa, synthetic construct
MASCPKPGPPVSAGAMSLESGLTTHSVLAIERGPNSLANSGSDFGGGGLGLPLRLLRVSVGTQTSRSDWVDLVSWSHPGPTSKSQQVDLVSLFPKHRVDLLSKNDQVDLVAQFLPSKFPPNLAENDLALLVNLEFYRSDLHVYECVHFAAHWEGLSGLPEVYEQLAPQPCVGETLHSSLPRDSELFVPEEGSSEKESEDAPKTSPPTPGKHGLEQTGEEKVMVTVPDKNPPCPCCGTRVNSVLNLIEHLKVSHGKRGVCFRCAKCGKENSNYHSVVCHFPKCRGPETEKAPAGEWICEVCNRDFTTKIGLGQHKRLAHPAVRNQERIVASQPKETSNRGAHKRCWTKEEEELLIRLEAQFEGNKNINKLIAEHITTKTAKQISDKRRLLSRKPAEEPREEPGTCHHTRRAAASLRTEPEMSHHAQAEDRDNGPGRRPLPGRAAAGGRTMDEIRRHPDKGNGQQRPTKQKSEEQLQAYYKKTLEERLSAGALNTFPRAFKQVMEGRDIKLVINQTAQDCFGCLESISQIRTATRDKKDTVTREKHPKKPFQKWMKDRAIKKGNYLRFQRLFYLDRGKLAKIILDDIECLSCDIPLSEIYSVFKTRWETTGSFKSLGDFKTYGKADNTAFRELITAKEIEKNVQEMSKGSAPGPDGITLGDVVKMDPEFSRTMEIFNLWLTTGKIPDMVRGCRTVLIPKSSKPDRLKDINNWRPITIGSILLRLFSRIVTARLSKACPLNPRQRGFIRAAGCSENLKLLQTIIWSAKREHRPLGVVFVDIAKAFDTVSHQHIIHALQQREVDPHIVGLVSNMYENISTYITTKRNTHTDKIQIRVGVKQGDPMSPLLFNLAMDPLLCKLEESGKGYHRGQSSITAMAFADDLVLLSDSWENMNTNISILETFCNLTGLKTQGQKCHGFYIKPTKDSYTINDCAAWTINGTPLNMIDPGESEKYLGLQFDPWIGIARSGLSTKLDFWLQRIDQAPLKPLQKTDILKTYTIPRLIYIADHSEVKTALLETLDQKIRTAVKEWLHLPPCTCDAILYSSTRDGGLGITKLAGLIPSVQARRLHRIAQSSDDTMKCFMEKEKMEQLHKKLWIQAGGDRENIPSIWEAPPSSEPPNNVSTNSEWEAPTQKDKFPKPCNWRKNEFKKWTKLASQGRGIVNFERDKISNHWIQYYRRIPHRKLLTALQLRANVYPTREFLARGRQDQYIKACRHCDADIESCAHIIGNCPVTQDARIKRHNYICELLLEEAKKKDWVVFKEPHIRDSNKELYKPDLIFVKDARALVVDVTVRYEAAKSSLEEAAAEKVRKYKHLETEVRHLTNAKDVTFVGFPLGARGKWHQDNFKLLTELGLSKSRQVKMAETFSTVALFSSVDIVHMFASRARKSMVMSGSETPGTSESATPEGSSTPARRRLMRDFKRLQEDPPAGVSGAPSENNIMVWNAVIFGPEGTPFEDGTFKLTIEFTEEYPNKPPTVRFVSKMFHPNVYADGSICLDILQNRWSPTYDVSSILTSIQSLLDEPNPNSPANSQAAQLYQENKREYEKRVSAIVEQSWRDCGGSGKRTADGSEFEPKKKRKV

SEQ ID NO: 137 - protein, 1397 aa, synthetic construct
MRQRKRHKASCPKPGPPVSAGAMSLESGLTTHSVLAIERGPNSLANSGSDFGGGGLGLPLRLLRVSVGTQTSRSDWVDLVSWSHPGPTSKSQQVDLVSLFPKHRVDLLSKNDQVDLVAQFLPSKFPPNLAENDLALLVNLEFYRSDLHVYECVHFAAHWEGLSGLPEVYEQLAPQPCVGETLHSSLPRDSELFVPEEGSSEKESEDAPKTSPPTPGKHGLEQTGEEKVMVTVPDKNPPCPCCGTRVNSVLNLIEHLKVSHGKRGVCFRCAKCGKENSNYHSVVCHFPKCRGPETEKAPAGEWICEVCNRDFTTKIGLGQHKRLAHPAVRNQERIVASQPKETSNRGAHKRCWTKEEEELLIRLEAQFEGNKNINKLIAEHITTKTAKQISDKRRLLSRKPAEEPREEPGTCHHTRRAAASLRTEPEMSHHAQAEDRDNGPGRRPLPGRAAAGGRTMDEIRRHPDKGNGQQRPTKQKSEEQLQAYYKKTLEERLSAGALNTFPRAFKQVMEGRDIKLVINQTAQDCFGCLESISQIRTATRDKKDTVTREKHPKKPFQKWMKDRAIKKGNYLRFQRLFYLDRGKLAKIILDDIECLSCDIPLSEIYSVFKTRWETTGSFKSLGDFKTYGKADNTAFRELITAKEIEKNVQEMSKGSAPGPDGITLGDVVKMDPEFSRTMEIFNLWLTTGKIPDMVRGCRTVLIPKSSKPDRLKDINNWRPITIGSILLRLFSRIVTARLSKACPLNPRQRGFIRAAGCSENLKLLQTIIWSAKREHRPLGVVFVDIAKAFDTVSHQHIIHALQQREVDPHIVGLVSNMYENISTYITTKRNTHTDKIQIRVGVKQGDPMSPLLFNLAMDPLLCKLEESGKGYHRGQSSITAMAFADDLVLLSDSWENMNTNISILETFCNLTGLKTQGQKCHGFYIKPTKDSYTINDCAAWTINGTPLNMIDPGESEKYLGLQFDPWIGIARSGLSTKLDFWLQRIDQAPLKPLQKTDILKTYTIPRLIYIADHSEVKTALLETLDQKIRTAVKEWLHLPPCTCDAILYSSTRDGGLGITKLAGLIPSVQARRLHRIAQSSDDTMKCFMEKEKMEQLHKKLWIQAGGDRENIPSIWEAPPSSEPPNNVSTNSEWEAPTQKDKFPKPCNWRKNEFKKWTKLASQGRGIVNFERDKISNHWIQYYRRIPHRKLLTALQLRANVYPTREFLARGRQDQYIKACRHCDADIESCAHIIGNCPVTQDARIKRHNYICELLLEEAKKKDWVVFKEPHIRDSNKELYKPDLIFVKDARALVVDVTVRYEAAKSSLEEAAAEKVRKYKHLETEVRHLTNAKDVTFVGFPLGARGKWHQDNFKLLTELGLSKSRQVKMAETFSTVALFSSVDIVHMFASRARKSMVM

SEQ ID NO: 138 - protein, 1397 aa, synthetic construct
MPSQQKRKASCPKPGPPVSAGAMSLESGLTTHSVLAIERGPNSLANSGSDFGGGGLGLPLRLLRVSVGTQTSRSDWVDLVSWSHPGPTSKSQQVDLVSLFPKHRVDLLSKNDQVDLVAQFLPSKFPPNLAENDLALLVNLEFYRSDLHVYECVHFAAHWEGLSGLPEVYEQLAPQPCVGETLHSSLPRDSELFVPEEGSSEKESEDAPKTSPPTPGKHGLEQTGEEKVMVTVPDKNPPCPCCGTRVNSVLNLIEHLKVSHGKRGVCFRCAKCGKENSNYHSVVCHFPKCRGPETEKAPAGEWICEVCNRDFTTKIGLGQHKRLAHPAVRNQERIVASQPKETSNRGAHKRCWTKEEEELLIRLEAQFEGNKNINKLIAEHITTKTAKQISDKRRLLSRKPAEEPREEPGTCHHTRRAAASLRTEPEMSHHAQAEDRDNGPGRRPLPGRAAAGGRTMDEIRRHPDKGNGQQRPTKQKSEEQLQAYYKKTLEERLSAGALNTFPRAFKQVMEGRDIKLVINQTAQDCFGCLESISQIRTATRDKKDTVTREKHPKKPFQKWMKDRAIKKGNYLRFQRLFYLDRGKLAKIILDDIECLSCDIPLSEIYSVFKTRWETTGSFKSLGDFKTYGKADNTAFRELITAKEIEKNVQEMSKGSAPGPDGITLGDVVKMDPEFSRTMEIFNLWLTTGKIPDMVRGCRTVLIPKSSKPDRLKDINNWRPITIGSILLRLFSRIVTARLSKACPLNPRQRGFIRAAGCSENLKLLQTIIWSAKREHRPLGVVFVDIAKAFDTVSHQHIIHALQQREVDPHIVGLVSNMYENISTYITTKRNTHTDKIQIRVGVKQGDPMSPLLFNLAMDPLLCKLEESGKGYHRGQSSITAMAFADDLVLLSDSWENMNTNISILETFCNLTGLKTQGQKCHGFYIKPTKDSYTINDCAAWTINGTPLNMIDPGESEKYLGLQFDPWIGIARSGLSTKLDFWLQRIDQAPLKPLQKTDILKTYTIPRLIYIADHSEVKTALLETLDQKIRTAVKEWLHLPPCTCDAILYSSTRDGGLGITKLAGLIPSVQARRLHRIAQSSDDTMKCFMEKEKMEQLHKKLWIQAGGDRENIPSIWEAPPSSEPPNNVSTNSEWEAPTQKDKFPKPCNWRKNEFKKWTKLASQGRGIVNFERDKISNHWIQYYRRIPHRKLLTALQLRANVYPTREFLARGRQDQYIKACRHCDADIESCAHIIGNCPVTQDARIKRHNYICELLLEEAKKKDWVVFKEPHIRDSNKELYKPDLIFVKDARALVVDVTVRYEAAKSSLEEAAAEKVRKYKHLETEVRHLTNAKDVTFVGFPLGARGKWHQDNFKLLTELGLSKSRQVKMAETFSTVALFSSVDIVHMFASRARKSMVM

SEQ ID NO: 139 - protein, 1396 aa, synthetic construct
MKKKSKKASCPKPGPPVSAGAMSLESGLTTHSVLAIERGPNSLANSGSDFGGGGLGLPLRLLRVSVGTQTSRSDWVDLVSWSHPGPTSKSQQVDLVSLFPKHRVDLLSKNDQVDLVAQFLPSKFPPNLAENDLALLVNLEFYRSDLHVYECVHFAAHWEGLSGLPEVYEQLAPQPCVGETLHSSLPRDSELFVPEEGSSEKESEDAPKTSPPTPGKHGLEQTGEEKVMVTVPDKNPPCPCCGTRVNSVLNLIEHLKVSHGKRGVCFRCAKCGKENSNYHSVVCHFPKCRGPETEKAPAGEWICEVCNRDFTTKIGLGQHKRLAHPAVRNQERIVASQPKETSNRGAHKRCWTKEEEELLIRLEAQFEGNKNINKLIAEHITTKTAKQISDKRRLLSRKPAEEPREEPGTCHHTRRAAASLRTEPEMSHHAQAEDRDNGPGRRPLPGRAAAGGRTMDEIRRHPDKGNGQQRPTKQKSEEQLQAYYKKTLEERLSAGALNTFPRAFKQVMEGRDIKLVINQTAQDCFGCLESISQIRTATRDKKDTVTREKHPKKPFQKWMKDRAIKKGNYLRFQRLFYLDRGKLAKIILDDIECLSCDIPLSEIYSVFKTRWETTGSFKSLGDFKTYGKADNTAFRELITAKEIEKNVQEMSKGSAPGPDGITLGDVVKMDPEFSRTMEIFNLWLTTGKIPDMVRGCRTVLIPKSSKPDRLKDINNWRPITIGSILLRLFSRIVTARLSKACPLNPRQRGFIRAAGCSENLKLLQTIIWSAKREHRPLGVVFVDIAKAFDTVSHQHIIHALQQREVDPHIVGLVSNMYENISTYITTKRNTHTDKIQIRVGVKQGDPMSPLLFNLAMDPLLCKLEESGKGYHRGQSSITAMAFADDLVLLSDSWENMNTNISILETFCNLTGLKTQGQKCHGFYIKPTKDSYTINDCAAWTINGTPLNMIDPGESEKYLGLQFDPWIGIARSGLSTKLDFWLQRIDQAPLKPLQKTDILKTYTIPRLIYIADHSEVKTALLETLDQKIRTAVKEWLHLPPCTCDAILYSSTRDGGLGITKLAGLIPSVQARRLHRIAQSSDDTMKCFMEKEKMEQLHKKLWIQAGGDRENIPSIWEAPPSSEPPNNVSTNSEWEAPTQKDKFPKPCNWRKNEFKKWTKLASQGRGIVNFERDKISNHWIQYYRRIPHRKLLTALQLRANVYPTREFLARGRQDQYIKACRHCDADIESCAHIIGNCPVTQDARIKRHNYICELLLEEAKKKDWVVFKEPHIRDSNKELYKPDLIFVKDARALVVDVTVRYEAAKSSLEEAAAEKVRKYKHLETEVRHLTNAKDVTFVGFPLGARGKWHQDNFKLLTELGLSKSRQVKMAETFSTVALFSSVDIVHMFASRARKSMVM

SEQ ID NO: 140 - protein, 1442 aa, synthetic construct
MASCPKPGPPVSAGAMSLESGLTTHSVLAIERGPNSLANSGSDFGGGGLGLPLRLLRVSVGTQTSRSDWVDLVSWSHPGPTSKSQQVDLVSLFPKHRVDLLSKNDQVDLVAQFLPSKFPPNLAENDLALLVNLEFYRSDLHVYECVHFAAHWEGLSGLPEVYEQLAPQPCVGETLHSSLPRDSELFVPEEGSSEKESEDAPKTSPPTPGKHGLEQTGEEKVMVTVPDKNPPCPCCGTRVNSVLNLIEHLKVSHGKRGVCFRCAKCGKENSNYHSVVCHFPKCRGPETEKAPAGEWICEVCNRDFTTKIGLGQHKRLAHPAVRNQERIVASQPKETSNRGAHKRCWTKEEEELLIRLEAQFEGNKNINKLIAEHITTKTAKQISDKRRLLSRKPAEEPREEPGTCHHTRRAAASLRTEPEMSHHAQAEDRDNGPGRRPLPGRAAAGGRTMDEIRRHPDKGNGQQRPTKQKSEEQLQAYYKKTLEERLSAGALNTFPRAFKQVMEGRDIKLVINQTAQDCFGCLESISQIRTATRDKKDTVTREKHPKKPFQKWMKDRAIKKGNYLRFQRLFYLDRGKLAKIILDDIECLSCDIPLSEIYSVFKTRWETTGSFKSLGDFKTYGKADNTAFRELITAKEIEKNVQEMSKGSAPGPDGITLGDVVKMDPEFSRTMEIFNLWLTTGKIPDMVRGCRTVLIPKSSKPDRLKDINNWRPITIGSILLRLFSRIVTARLSKACPLNPRQRGFIRAAGCSENLKLLQTIIWSAKREHRPLGVVFVDIAKAFDTVSHQHIIHALQQREVDPHIVGLVSNMYENISTYITTKRNTHTDKIQIRVGVKQGDPMSPLLFNLAMDPLLCKLEESGKGYHRGQSSITAMAFADDLVLLSDSWENMNTNISILETFCNLTGLKTQGQKCHGFYIKPTKDSYTINDCAAWTINGTPLNMIDPGESEKYLGLQFDPWIGIARSGLSTKLDFWLQRIDQAPLKPLQKTDILKTYTIPRLIYIADHSEVKTALLETLDQKIRTAVKEWLHLPPCTCDAILYSSTRDGGLGITKLAGLIPSVQARRLHRIAQSSDDTMKCFMEKEKMEQLHKKLWIQAGGDRENIPSIWEAPPSSEPPNNVSTNSEWEAPTQKDKFPKPCNWRKNEFKKWTKLASQGRGIVNFERDKISNHWIQYYRRIPHRKLLTALQLRANVYPTREFLARGRQDQYIKACRHCDADIESCAHIIGNCPVTQDARIKRHNYICELLLEEAKKKDWVVFKEPHIRDSNKELYKPDLIFVKDARALVVDVTVRYEAAKSSLEEAAAEKVRKYKHLETEVRHLTNAKDVTFVGFPLGARGKWHQDNFKLLTELGLSKSRQVKMAETFSTVALFSSVDIVHMFASRARKSMVGGSGSETPGTSESATPESGGSGEKRTPLHAAAYLGDAEIIELLILSGARVNAM

SEQ ID NO: 141 - protein, 1631 aa, synthetic construct
MASCPKPGPPVSAGAMSLESGLTTHSVLAIERGPNSLANSGSDFGGGGLGLPLRLLRVSVGTQTSRSDWVDLVSWSHPGPTSKSQQVDLVSLFPKHRVDLLSKNDQVDLVAQFLPSKFPPNLAENDLALLVNLEFYRSDLHVYECVHFAAHWEGLSGLPEVYEQLAPQPCVGETLHSSLPRDSELFVPEEGSSEKESEDAPKTSPPTPGKHGLEQTGEEKVMVTVPDKNPPCPCCGTRVNSVLNLIEHLKVSHGKRGVCFRCAKCGKENSNYHSVVCHFPKCRGPETEKAPAGEWICEVCNRDFTTKIGLGQHKRLAHPAVRNQERIVASQPKETSNRGAHKRCWTKEEEELLIRLEAQFEGNKNINKLIAEHITTKTAKQISDKRRLLSRKPAEEPREEPGTCHHTRRAAASLRTEPEMSHHAQAEDRDNGPGRRPLPGRAAAGGRTMDEIRRHPDKGNGQQRPTKQKSEEQLQAYYKKTLEERLSAGALNTFPRAFKQVMEGRDIKLVINQTAQDCFGCLESISQIRTATRDKKDTVTREKHPKKPFQKWMKDRAIKKGNYLRFQRLFYLDRGKLAKIILDDIECLSCDIPLSEIYSVFKTRWETTGSFKSLGDFKTYGKADNTAFRELITAKEIEKNVQEMSKGSAPGPDGITLGDVVKMDPEFSRTMEIFNLWLTTGKIPDMVRGCRTVLIPKSSKPDRLKDINNWRPITIGSILLRLFSRIVTARLSKACPLNPRQRGFIRAAGCSENLKLLQTIIWSAKREHRPLGVVFVDIAKAFDTVSHQHIIHALQQREVDPHIVGLVSNMYENISTYITTKRNTHTDKIQIRVGVKQGDPMSPLLFNLAMDPLLCKLEESGKGYHRGQSSITAMAFADDLVLLSDSWENMNTNISILETFCNLTGLKTQGQKCHGFYIKPTKDSYTINDCAAWTINGTPLNMIDPGESEKYLGLQFDPWIGIARSGLSTKLDFWLQRIDQAPLKPLQKTDILKTYTIPRLIYIADHSEVKTALLETLDQKIRTAVKEWLHLPPCTCDAILYSSTRDGGLGITKLAGLIPSVQARRLHRIAQSSDDTMKCFMEKEKMEQLHKKLWIQAGGDRENIPSIWEAPPSSEPPNNVSTNSEWEAPTQKDKFPKPCNWRKNEFKKWTKLASQGRGIVNFERDKISNHWIQYYRRIPHRKLLTALQLRANVYPTREFLARGRQDQYIKACRHCDADIESCAHIIGNCPVTQDARIKRHNYICELLLEEAKKKDWVVFKEPHIRDSNKELYKPDLIFVKDARALVVDVTVRYEAAKSSLEEAAAEKVRKYKHLETEVRHLTNAKDVTFVGFPLGARGKWHQDNFKLLTELGLSKSRQVKMAETFSTVALFSSVDIVHMFASRARKSMVGGSGSETPGTSESATPESGGSGEDTQAIDWDVEEEEETEQSSESLRCNVEPVGRLHIFSGAHGPEKDFPLHLGKNVVGRMPDCSVALPFPSISKQHAEIEILAWDKAPILRDCGSLNGTQILRPPKVLSPGVSHRLRDQELILFADLLCQYHRLDVSLPFVSRGPLTVEETPRVQGETQPQRLLLAEDSEEEVDFLSERRMVKKSRTTSSSVIVPESDEEGHSPVLGGLGPPFAFNLNSDTM

SEQ ID NO: 142 - protein, 1495 aa, synthetic construct
MASCPKPGPPVSAGAMSLESGLTTHSVLAIERGPNSLANSGSDFGGGGLGLPLRLLRVSVGTQTSRSDWVDLVSWSHPGPTSKSQQVDLVSLFPKHRVDLLSKNDQVDLVAQFLPSKFPPNLAENDLALLVNLEFYRSDLHVYECVHFAAHWEGLSGLPEVYEQLAPQPCVGETLHSSLPRDSELFVPEEGSSEKESEDAPKTSPPTPGKHGLEQTGEEKVMVTVPDKNPPCPCCGTRVNSVLNLIEHLKVSHGKRGVCFRCAKCGKENSNYHSVVCHFPKCRGPETEKAPAGEWICEVCNRDFTTKIGLGQHKRLAHPAVRNQERIVASQPKETSNRGAHKRCWTKEEEELLIRLEAQFEGNKNINKLIAEHITTKTAKQISDKRRLLSRKPAEEPREEPGTCHHTRRAAASLRTEPEMSHHAQAEDRDNGPGRRPLPGRAAAGGRTMDEIRRHPDKGNGQQRPTKQKSEEQLQAYYKKTLEERLSAGALNTFPRAFKQVMEGRDIKLVINQTAQDCFGCLESISQIRTATRDKKDTVTREKHPKKPFQKWMKDRAIKKGNYLRFQRLFYLDRGKLAKIILDDIECLSCDIPLSEIYSVFKTRWETTGSFKSLGDFKTYGKADNTAFRELITAKEIEKNVQEMSKGSAPGPDGITLGDVVKMDPEFSRTMEIFNLWLTTGKIPDMVRGCRTVLIPKSSKPDRLKDINNWRPITIGSILLRLFSRIVTARLSKACPLNPRQRGFIRAAGCSENLKLLQTIIWSAKREHRPLGVVFVDIAKAFDTVSHQHIIHALQQREVDPHIVGLVSNMYENISTYITTKRNTHTDKIQIRVGVKQGDPMSPLLFNLAMDPLLCKLEESGKGYHRGQSSITAMAFADDLVLLSDSWENMNTNISILETFCNLTGLKTQGQKCHGFYIKPTKDSYTINDCAAWTINGTPLNMIDPGESEKYLGLQFDPWIGIARSGLSTKLDFWLQRIDQAPLKPLQKTDILKTYTIPRLIYIADHSEVKTALLETLDQKIRTAVKEWLHLPPCTCDAILYSSTRDGGLGITKLAGLIPSVQARRLHRIAQSSDDTMKCFMEKEKMEQLHKKLWIQAGGDRENIPSIWEAPPSSEPPNNVSTNSEWEAPTQKDKFPKPCNWRKNEFKKWTKLASQGRGIVNFERDKISNHWIQYYRRIPHRKLLTALQLRANVYPTREFLARGRQDQYIKACRHCDADIESCAHIIGNCPVTQDARIKRHNYICELLLEEAKKKDWVVFKEPHIRDSNKELYKPDLIFVKDARALVVDVTVRYEAAKSSLEEAAAEKVRKYKHLETEVRHLTNAKDVTFVGFPLGARGKWHQDNFKLLTELGLSKSRQVKMAETFSTVALFSSVDIVHMFASRARKSMVGGSGSETPGTSESATPESGGSGMLRPEISSTSPSAPAVSPSSGETRSPQGPRYNFGLQETPQSRPSVQVVSASTCPGTSGAAGDRSSSSSSLPCPAPNSRPAQGSM

SEQ ID NO: 143 - protein, 1662 aa, synthetic construct
MASCPKPGPPVSAGAMSLESGLTTHSVLAIERGPNSLANSGSDFGGGGLGLPLRLLRVSVGTQTSRSDWVDLVSWSHPGPTSKSQQVDLVSLFPKHRVDLLSKNDQVDLVAQFLPSKFPPNLAENDLALLVNLEFYRSDLHVYECVHFAAHWEGLSGLPEVYEQLAPQPCVGETLHSSLPRDSELFVPEEGSSEKESEDAPKTSPPTPGKHGLEQTGEEKVMVTVPDKNPPCPCCGTRVNSVLNLIEHLKVSHGKRGVCFRCAKCGKENSNYHSVVCHFPKCRGPETEKAPAGEWICEVCNRDFTTKIGLGQHKRLAHPAVRNQERIVASQPKETSNRGAHKRCWTKEEEELLIRLEAQFEGNKNINKLIAEHITTKTAKQISDKRRLLSRKPAEEPREEPGTCHHTRRAAASLRTEPEMSHHAQAEDRDNGPGRRPLPGRAAAGGRTMDEIRRHPDKGNGQQRPTKQKSEEQLQAYYKKTLEERLSAGALNTFPRAFKQVMEGRDIKLVINQTAQDCFGCLESISQIRTATRDKKDTVTREKHPKKPFQKWMKDRAIKKGNYLRFQRLFYLDRGKLAKIILDDIECLSCDIPLSEIYSVFKTRWETTGSFKSLGDFKTYGKADNTAFRELITAKEIEKNVQEMSKGSAPGPDGITLGDVVKMDPEFSRTMEIFNLWLTTGKIPDMVRGCRTVLIPKSSKPDRLKDINNWRPITIGSILLRLFSRIVTARLSKACPLNPRQRGFIRAAGCSENLKLLQTIIWSAKREHRPLGVVFVDIAKAFDTVSHQHIIHALQQREVDPHIVGLVSNMYENISTYITTKRNTHTDKIQIRVGVKQGDPMSPLLFNLAMDPLLCKLEESGKGYHRGQSSITAMAFADDLVLLSDSWENMNTNISILETFCNLTGLKTQGQKCHGFYIKPTKDSYTINDCAAWTINGTPLNMIDPGESEKYLGLQFDPWIGIARSGLSTKLDFWLQRIDQAPLKPLQKTDILKTYTIPRLIYIADHSEVKTALLETLDQKIRTAVKEWLHLPPCTCDAILYSSTRDGGLGITKLAGLIPSVQARRLHRIAQSSDDTMKCFMEKEKMEQLHKKLWIQAGGDRENIPSIWEAPPSSEPPNNVSTNSEWEAPTQKDKFPKPCNWRKNEFKKWTKLASQGRGIVNFERDKISNHWIQYYRRIPHRKLLTALQLRANVYPTREFLARGRQDQYIKACRHCDADIESCAHIIGNCPVTQDARIKRHNYICELLLEEAKKKDWVVFKEPHIRDSNKELYKPDLIFVKDARALVVDVTVRYEAAKSSLEEAAAEKVRKYKHLETEVRHLTNAKDVTFVGFPLGARGKWHQDNFKLLTELGLSKSRQVKMAETFSTVALFSSVDIVHMFASRARKSMVGGSGSETPGTSESATPESGGSGLVEPEEVVEMSHMPGDLFNLYLHQNYIDFFMEIDDIVRASEFLSFADILSGDWNTRSLLREYSTSIATRGVMHSNKARGYAHCQGGGSSFRPLHKPQWFLINKKYRENCLAAKALFPDFCLPALCLQTQLLPYLALLTIPMRNQAQISFIQDIGRLPLKRHFGRLKMEALTDREHGMIDPDSGDEAQLNGGHSAEESLGEPTQATVPETWSLPLSQNSASELPASQPQPFSAQGDMEENIIIEDYESDGTM

SEQ ID NO: 144 - protein, 1480 aa, synthetic construct
MASCPKPGPPVSAGAMSLESGLTTHSVLAIERGPNSLANSGSDFGGGGLGLPLRLLRVSVGTQTSRSDWVDLVSWSHPGPTSKSQQVDLVSLFPKHRVDLLSKNDQVDLVAQFLPSKFPPNLAENDLALLVNLEFYRSDLHVYECVHFAAHWEGLSGLPEVYEQLAPQPCVGETLHSSLPRDSELFVPEEGSSEKESEDAPKTSPPTPGKHGLEQTGEEKVMVTVPDKNPPCPCCGTRVNSVLNLIEHLKVSHGKRGVCFRCAKCGKENSNYHSVVCHFPKCRGPETEKAPAGEWICEVCNRDFTTKIGLGQHKRLAHPAVRNQERIVASQPKETSNRGAHKRCWTKEEEELLIRLEAQFEGNKNINKLIAEHITTKTAKQISDKRRLLSRKPAEEPREEPGTCHHTRRAAASLRTEPEMSHHAQAEDRDNGPGRRPLPGRAAAGGRTMDEIRRHPDKGNGQQRPTKQKSEEQLQAYYKKTLEERLSAGALNTFPRAFKQVMEGRDIKLVINQTAQDCFGCLESISQIRTATRDKKDTVTREKHPKKPFQKWMKDRAIKKGNYLRFQRLFYLDRGKLAKIILDDIECLSCDIPLSEIYSVFKTRWETTGSFKSLGDFKTYGKADNTAFRELITAKEIEKNVQEMSKGSAPGPDGITLGDVVKMDPEFSRTMEIFNLWLTTGKIPDMVRGCRTVLIPKSSKPDRLKDINNWRPITIGSILLRLFSRIVTARLSKACPLNPRQRGFIRAAGCSENLKLLQTIIWSAKREHRPLGVVFVDIAKAFDTVSHQHIIHALQQREVDPHIVGLVSNMYENISTYITTKRNTHTDKIQIRVGVKQGDPMSPLLFNLAMDPLLCKLEESGKGYHRGQSSITAMAFADDLVLLSDSWENMNTNISILETFCNLTGLKTQGQKCHGFYIKPTKDSYTINDCAAWTINGTPLNMIDPGESEKYLGLQFDPWIGIARSGLSTKLDFWLQRIDQAPLKPLQKTDILKTYTIPRLIYIADHSEVKTALLETLDQKIRTAVKEWLHLPPCTCDAILYSSTRDGGLGITKLAGLIPSVQARRLHRIAQSSDDTMKCFMEKEKMEQLHKKLWIQAGGDRENIPSIWEAPPSSEPPNNVSTNSEWEAPTQKDKFPKPCNWRKNEFKKWTKLASQGRGIVNFERDKISNHWIQYYRRIPHRKLLTALQLRANVYPTREFLARGRQDQYIKACRHCDADIESCAHIIGNCPVTQDARIKRHNYICELLLEEAKKKDWVVFKEPHIRDSNKELYKPDLIFVKDARALVVDVTVRYEAAKSSLEEAAAEKVRKYKHLETEVRHLTNAKDVTFVGFPLGARGKWHQDNFKLLTELGLSKSRQVKMAETFSTVALFSSVDIVHMFASRARKSMVGGSGSETPGTSESATPESGGSGWSVEAVVLFLKQTDPLALCPLVDLFRSHEIDGKALLLLTSDVLLKHLGVKLGTAVKLCYYIDRLKQGKM

SEQ ID NO: 145 - protein, 1476 aa, synthetic construct
MASCPKPGPPVSAGAMSLESGLTTHSVLAIERGPNSLANSGSDFGGGGLGLPLRLLRVSVGTQTSRSDWVDLVSWSHPGPTSKSQQVDLVSLFPKHRVDLLSKNDQVDLVAQFLPSKFPPNLAENDLALLVNLEFYRSDLHVYECVHFAAHWEGLSGLPEVYEQLAPQPCVGETLHSSLPRDSELFVPEEGSSEKESEDAPKTSPPTPGKHGLEQTGEEKVMVTVPDKNPPCPCCGTRVNSVLNLIEHLKVSHGKRGVCFRCAKCGKENSNYHSVVCHFPKCRGPETEKAPAGEWICEVCNRDFTTKIGLGQHKRLAHPAVRNQERIVASQPKETSNRGAHKRCWTKEEEELLIRLEAQFEGNKNINKLIAEHITTKTAKQISDKRRLLSRKPAEEPREEPGTCHHTRRAAASLRTEPEMSHHAQAEDRDNGPGRRPLPGRAAAGGRTMDEIRRHPDKGNGQQRPTKQKSEEQLQAYYKKTLEERLSAGALNTFPRAFKQVMEGRDIKLVINQTAQDCFGCLESISQIRTATRDKKDTVTREKHPKKPFQKWMKDRAIKKGNYLRFQRLFYLDRGKLAKIILDDIECLSCDIPLSEIYSVFKTRWETTGSFKSLGDFKTYGKADNTAFRELITAKEIEKNVQEMSKGSAPGPDGITLGDVVKMDPEFSRTMEIFNLWLTTGKIPDMVRGCRTVLIPKSSKPDRLKDINNWRPITIGSILLRLFSRIVTARLSKACPLNPRQRGFIRAAGCSENLKLLQTIIWSAKREHRPLGVVFVDIAKAFDTVSHQHIIHALQQREVDPHIVGLVSNMYENISTYITTKRNTHTDKIQIRVGVKQGDPMSPLLFNLAMDPLLCKLEESGKGYHRGQSSITAMAFADDLVLLSDSWENMNTNISILETFCNLTGLKTQGQKCHGFYIKPTKDSYTINDCAAWTINGTPLNMIDPGESEKYLGLQFDPWIGIARSGLSTKLDFWLQRIDQAPLKPLQKTDILKTYTIPRLIYIADHSEVKTALLETLDQKIRTAVKEWLHLPPCTCDAILYSSTRDGGLGITKLAGLIPSVQARRLHRIAQSSDDTMKCFMEKEKMEQLHKKLWIQAGGDRENIPSIWEAPPSSEPPNNVSTNSEWEAPTQKDKFPKPCNWRKNEFKKWTKLASQGRGIVNFERDKISNHWIQYYRRIPHRKLLTALQLRANVYPTREFLARGRQDQYIKACRHCDADIESCAHIIGNCPVTQDARIKRHNYICELLLEEAKKKDWVVFKEPHIRDSNKELYKPDLIFVKDARALVVDVTVRYEAAKSSLEEAAAEKVRKYKHLETEVRHLTNAKDVTFVGFPLGARGKWHQDNFKLLTELGLSKSRQVKMAETFSTVALFSSVDIVHMFASRARKSMVGGSGSETPGTSESATPESGGSGMVRRFLVTLRIRRACGPPRVRVFVVHIPRLTGEWAAPGAPAAVALVLMLLRSQRLGQQPLPRRPM

SEQ ID NO: 146 - protein, 1461 aa, synthetic construct
MASCPKPGPPVSAGAMSLESGLTTHSVLAIERGPNSLANSGSDFGGGGLGLPLRLLRVSVGTQTSRSDWVDLVSWSHPGPTSKSQQVDLVSLFPKHRVDLLSKNDQVDLVAQFLPSKFPPNLAENDLALLVNLEFYRSDLHVYECVHFAAHWEGLSGLPEVYEQLAPQPCVGETLHSSLPRDSELFVPEEGSSEKESEDAPKTSPPTPGKHGLEQTGEEKVMVTVPDKNPPCPCCGTRVNSVLNLIEHLKVSHGKRGVCFRCAKCGKENSNYHSVVCHFPKCRGPETEKAPAGEWICEVCNRDFTTKIGLGQHKRLAHPAVRNQERIVASQPKETSNRGAHKRCWTKEEEELLIRLEAQFEGNKNINKLIAEHITTKTAKQISDKRRLLSRKPAEEPREEPGTCHHTRRAAASLRTEPEMSHHAQAEDRDNGPGRRPLPGRAAAGGRTMDEIRRHPDKGNGQQRPTKQKSEEQLQAYYKKTLEERLSAGALNTFPRAFKQVMEGRDIKLVINQTAQDCFGCLESISQIRTATRDKKDTVTREKHPKKPFQKWMKDRAIKKGNYLRFQRLFYLDRGKLAKIILDDIECLSCDIPLSEIYSVFKTRWETTGSFKSLGDFKTYGKADNTAFRELITAKEIEKNVQEMSKGSAPGPDGITLGDVVKMDPEFSRTMEIFNLWLTTGKIPDMVRGCRTVLIPKSSKPDRLKDINNWRPITIGSILLRLFSRIVTARLSKACPLNPRQRGFIRAAGCSENLKLLQTIIWSAKREHRPLGVVFVDIAKAFDTVSHQHIIHALQQREVDPHIVGLVSNMYENISTYITTKRNTHTDKIQIRVGVKQGDPMSPLLFNLAMDPLLCKLEESGKGYHRGQSSITAMAFADDLVLLSDSWENMNTNISILETFCNLTGLKTQGQKCHGFYIKPTKDSYTINDCAAWTINGTPLNMIDPGESEKYLGLQFDPWIGIARSGLSTKLDFWLQRIDQAPLKPLQKTDILKTYTIPRLIYIADHSEVKTALLETLDQKIRTAVKEWLHLPPCTCDAILYSSTRDGGLGITKLAGLIPSVQARRLHRIAQSSDDTMKCFMEKEKMEQLHKKLWIQAGGDRENIPSIWEAPPSSEPPNNVSTNSEWEAPTQKDKFPKPCNWRKNEFKKWTKLASQGRGIVNFERDKISNHWIQYYRRIPHRKLLTALQLRANVYPTREFLARGRQDQYIKACRHCDADIESCAHIIGNCPVTQDARIKRHNYICELLLEEAKKKDWVVFKEPHIRDSNKELYKPDLIFVKDARALVVDVTVRYEAAKSSLEEAAAEKVRKYKHLETEVRHLTNAKDVTFVGFPLGARGKWHQDNFKLLTELGLSKSRQVKMAETFSTVALFSSVDIVHMFASRARKSMVGGSGSETPGTSESATPESGGSGMLEELECGAPGARGAATAMDCKDRPAFPVKKLIQARLPFKRLNLVPKGKM

SEQ ID NO: 147 - protein, 1708 aa, synthetic construct
MNQIVKFTDDSGLAVQVTPDDVRRYICENATEKEVGLFLQLCQTQRLNPFVKDAYLVKYGGAPASMITSYQVFNRRACRDANYDGIKSGVVVLRDGDVVHKRGAACYKKAGEELIGGWAEVRFKDGRETAYAEVALDDYSTGKSNWAKMPGVMIEKCAKAAAWRLAFPDTFQGMYAAEEMDQAQQPEQVRAQAEQPVDLQPIRELFKPYCEHFGITPAEGMTAVCGAVGAEGMHSMTEQQARRARAWMEEEMAAPAVEAEYEVVDEGEVFSGGSSGGSSGSETPGTSESATPESSGGSSGGSSLLPKFGETNSSVKSPMASCPKPGPPVSAGAMSLESGLTTHSVLAIERGPNSLANSGSDFGGGGLGLPLRLLRVSVGTQTSRSDWVDLVSWSHPGPTSKSQQVDLVSLFPKHRVDLLSKNDQVDLVAQFLPSKFPPNLAENDLALLVNLEFYRSDLHVYECVHFAAHWEGLSGLPEVYEQLAPQPCVGETLHSSLPRDSELFVPEEGSSEKESEDAPKTSPPTPGKHGLEQTGEEKVMVTVPDKNPPCPCCGTRVNSVLNLIEHLKVSHGKRGVCFRCAKCGKENSNYHSVVCHFPKCRGPETEKAPAGEWICEVCNRDFTTKIGLGQHKRLAHPAVRNQERIVASQPKETSNRGAHKRCWTKEEEELLIRLEAQFEGNKNINKLIAEHITTKTAKQISDKRRLLSRKPAEEPREEPGTCHHTRRAAASLRTEPEMSHHAQAEDRDNGPGRRPLPGRAAAGGRTMDEIRRHPDKGNGQQRPTKQKSEEQLQAYYKKTLEERLSAGALNTFPRAFKQVMEGRDIKLVINQTAQDCFGCLESISQIRTATRDKKDTVTREKHPKKPFQKWMKDRAIKKGNYLRFQRLFYLDRGKLAKIILDDIECLSCDIPLSEIYSVFKTRWETTGSFKSLGDFKTYGKADNTAFRELITAKEIEKNVQEMSKGSAPGPDGITLGDVVKMDPEFSRTMEIFNLWLTTGKIPDMVRGCRTVLIPKSSKPDRLKDINNWRPITIGSILLRLFSRIVTARLSKACPLNPRQRGFIRAAGCSENLKLLQTIIWSAKREHRPLGVVFVDIAKAFDTVSHQHIIHALQQREVDPHIVGLVSNMYENISTYITTKRNTHTDKIQIRVGVKQGDPMSPLLFNLAMDPLLCKLEESGKGYHRGQSSITAMAFADDLVLLSDSWENMNTNISILETFCNLTGLKTQGQKCHGFYIKPTKDSYTINDCAAWTINGTPLNMIDPGESEKYLGLQFDPWIGIARSGLSTKLDFWLQRIDQAPLKPLQKTDILKTYTIPRLIYIADHSEVKTALLETLDQKIRTAVKEWLHLPPCTCDAILYSSTRDGGLGITKLAGLIPSVQARRLHRIAQSSDDTMKCFMEKEKMEQLHKKLWIQAGGDRENIPSIWEAPPSSEPPNNVSTNSEWEAPTQKDKFPKPCNWRKNEFKKWTKLASQGRGIVNFERDKISNHWIQYYRRIPHRKLLTALQLRANVYPTREFLARGRQDQYIKACRHCDADIESCAHIIGNCPVTQDARIKRHNYICELLLEEAKKKDWVVFKEPHIRDSNKELYKPDLIFVKDARALVVDVTVRYEAAKSSLEEAAAEKVRKYKHLETEVRHLTNAKDVTFVGFPLGARGKWHQDNFKLLTELGLSKSRQVKMAETFSTVALFSSVDIVHMFASRARKSMVM

SEQ ID NO: 148 - protein, 1686 aa, synthetic construct
MGTALTPLLTKFATRYEMGTTPEEVANTLKQTCFKGQVNDSQMVALLIVADQYKLNPFTKELYAFPDKNNGIVPVVGVDGWARIINENPQFDGMEFSMDQQGTECTCKIYRKDRSHAISATEYMAECKRNTQPWQSHPRRMLRHKAMIQCARLAFGFAGIYDQDEAERIVERDVTPAEQYEDVSEAICLIKDSPTMEDLQAAFSNAWKAYKTKGARDQLTAAKDQRKKELLDAPIDVEFEETGDDRAASGGSSGGSSGSETPGTSESATPESSGGSSGGSSLLPKFGETNSSVKSPMASCPKPGPPVSAGAMSLESGLTTHSVLAIERGPNSLANSGSDFGGGGLGLPLRLLRVSVGTQTSRSDWVDLVSWSHPGPTSKSQQVDLVSLFPKHRVDLLSKNDQVDLVAQFLPSKFPPNLAENDLALLVNLEFYRSDLHVYECVHFAAHWEGLSGLPEVYEQLAPQPCVGETLHSSLPRDSELFVPEEGSSEKESEDAPKTSPPTPGKHGLEQTGEEKVMVTVPDKNPPCPCCGTRVNSVLNLIEHLKVSHGKRGVCFRCAKCGKENSNYHSVVCHFPKCRGPETEKAPAGEWICEVCNRDFTTKIGLGQHKRLAHPAVRNQERIVASQPKETSNRGAHKRCWTKEEEELLIRLEAQFEGNKNINKLIAEHITTKTAKQISDKRRLLSRKPAEEPREEPGTCHHTRRAAASLRTEPEMSHHAQAEDRDNGPGRRPLPGRAAAGGRTMDEIRRHPDKGNGQQRPTKQKSEEQLQAYYKKTLEERLSAGALNTFPRAFKQVMEGRDIKLVINQTAQDCFGCLESISQIRTATRDKKDTVTREKHPKKPFQKWMKDRAIKKGNYLRFQRLFYLDRGKLAKIILDDIECLSCDIPLSEIYSVFKTRWETTGSFKSLGDFKTYGKADNTAFRELITAKEIEKNVQEMSKGSAPGPDGITLGDVVKMDPEFSRTMEIFNLWLTTGKIPDMVRGCRTVLIPKSSKPDRLKDINNWRPITIGSILLRLFSRIVTARLSKACPLNPRQRGFIRAAGCSENLKLLQTIIWSAKREHRPLGVVFVDIAKAFDTVSHQHIIHALQQREVDPHIVGLVSNMYENISTYITTKRNTHTDKIQIRVGVKQGDPMSPLLFNLAMDPLLCKLEESGKGYHRGQSSITAMAFADDLVLLSDSWENMNTNISILETFCNLTGLKTQGQKCHGFYIKPTKDSYTINDCAAWTINGTPLNMIDPGESEKYLGLQFDPWIGIARSGLSTKLDFWLQRIDQAPLKPLQKTDILKTYTIPRLIYIADHSEVKTALLETLDQKIRTAVKEWLHLPPCTCDAILYSSTRDGGLGITKLAGLIPSVQARRLHRIAQSSDDTMKCFMEKEKMEQLHKKLWIQAGGDRENIPSIWEAPPSSEPPNNVSTNSEWEAPTQKDKFPKPCNWRKNEFKKWTKLASQGRGIVNFERDKISNHWIQYYRRIPHRKLLTALQLRANVYPTREFLARGRQDQYIKACRHCDADIESCAHIIGNCPVTQDARIKRHNYICELLLEEAKKKDWVVFKEPHIRDSNKELYKPDLIFVKDARALVVDVTVRYEAAKSSLEEAAAEKVRKYKHLETEVRHLTNAKDVTFVGFPLGARGKWHQDNFKLLTELGLSKSRQVKMAETFSTVALFSSVDIVHMFASRARKSMVM

SEQ ID NO: 149 - protein, 1208 aa, synthetic construct
MAPKKKRKVGIHGVPAAMAERPFQCRICMRNFSYNWHLQRHIRTHTGEKPFACDICGRKFARSDHLTTHTKIHTGSQKPFQCRICMRNFSHNYARDCHIRTHTGEKPFACDICGRKFAQNSTRIGHTKIHLRGSSGSETPGTSESATPEGIHGVPAAMAERPFQCRICMRNFSQSSNLARHIRTHTGEKPFACDICGRKFARTDYLVDHTKIHTGSQKPFQCRICMRNFSYNTHLTRHIRTHTGEKPFACDICGRKFAQGYNLAGHTKIHLRGSSGSETPGTSESATPEEQLQAYYKKTLEERLSAGALNTFPRAFKQVMEGRDIKLVINQTAQDCFGCLESISQIRTATRDKKDTVTREKHPKKPFQKWMKDRAIKKGNYLRFQRLFYLDRGKLAKIILDDIECLSCDIPLSEIYSVFKTRWETTGSFKSLGDFKTYGKADNTAFRELITAKEIEKNVQEMSKGSAPGPDGITLGDVVKMDPEFSRTMEIFNLWLTTGKIPDMVRGCRTVLIPKSSKPDRLKDINNWRPITIGSILLRLFSRIVTARLSKACPLNPRQRGFIRAAGCSENLKLLQTIIWSAKREHRPLGVVFVDIAKAFDTVSHQHIIHALQQREVDPHIVGLVSNMYENISTYITTKRNTHTDKIQIRVGVKQGDPMSPLLFNLAMDPLLCKLEESGKGYHRGQSSITAMAFADDLVLLSDSWENMNTNISILETFCNLTGLKTQGQKCHGFYIKPTKDSYTINDCAAWTINGTPLNMIDPGESEKYLGLQFDPWIGIARSGLSTKLDFWLQRIDQAPLKPLQKTDILKTYTIPRLIYIADHSEVKTALLETLDQKIRTAVKEWLHLPPCTCDAILYSSTRDGGLGITKLAGLIPSVQARRLHRIAQSSDDTMKCFMEKEKMEQLHKKLWIQAGGDRENIPSIWEAPPSSEPPNNVSTNSEWEAPTQKDKFPKPCNWRKNEFKKWTKLASQGRGIVNFERDKISNHWIQYYRRIPHRKLLTALQLRANVYPTREFLARGRQDQYIKACRHCDADIESCAHIIGNCPVTQDARIKRHNYICELLLEEAKKKDWVVFKEPHIRDSNKELYKPDLIFVKDARALVVDVTVRYEAAKSSLEEAAAEKVRKYKHLETEVRHLTNAKDVTFVGFPLGARGKWHQDNFKLLTELGLSKSRQVKMAETFSTVALFSSVDIVHMFASRARKSMVM

SEQ ID NO: 150 - protein, 1227 aa, synthetic construct
MASCPKPGPPVSAGAMSLESGLTTHSVLAIERGPNSLANSGSDFGGGGLGLPLRLLRVSVGTQTSRSDWVDLVSWSHPGPTSKSQQVDLVSLFPKHRVDLLSKNDQVDLVAQFLPSKFPPNLAENDLALLVNLEFYRSDLHVYECVHFAAHWEGLSGLPEVYEQLAPQPCVGETLHSSLPRDSELFVPEEGSSEKESEDAPKTSPPTPGKHGLEQTGEEKVMVTVPDKNPPCPCCGTRVNSVLNLIEHLKVSHGKRGVCFRCAKCGKENSNYHSVVCHFPKCRGPETEKAPAGEWICEVCNRDFTTKIGLGQHKRLAHPAVRNQERIVASQPKETSNRGAHKRCWTKEEEELLIRLEAQFEGNKNINKLIAEHITTKTAKQISDKRRLLSRKPAEEPREEPGTCHHTRRAAASLRTEPEMSHHAQAEDRDNGPGRRPLPGRAAAGGRTMDEIRRHPDKGNGQQRPTKQKSEEQLQAYYKKTLEERLSAGALNTFPRAFKQVMEGRDIKLVINQTAQDCFGCLESISQIRTATRDKKDTVTREKHPKKPFQKWMKDRAIKKGNYLRFQRLFYLDRGKLAKIILDDIECLSCDIPLSEIYSVFKTRWETTGSFKSLGDFKTYGKADNTAFRELITAKEIEKNVQEMSKGSAPGPDGITLGDVVKMDPEFSRTMEIFNLWLTTGKIPDMVRGCRTVLIPKSSKPDRLKDINNWRPITIGSILLRLFSRIVTARLSKACPLNPRQRGFIRAAGCSENLKLLQTIIWSAKREHRPLGVVFVDIAKAFDTVSHQHIIHALQQREVDPHIVGLVSNMYENISTYITTKRNTHTDKIQIRVGVKQGDPMSPLLFNLAMDPLLCKLEESGKGYHRGQSSITAMAFADDLVLLSDSWENMNTNISILETFCNLTGLKTQGQKCHGFYIKPTKDSYTINDCAAWTINGTPLNMIDPGESEKYLGLQFDPWIGIARSGLSTKLDFWLQRIDQAPLKPLQKTDILKTYTIPRLIYIADHSEVKTALLETLDQKIRTAVKEWLHLPPCTCDAILYSSTRDGGLGITKLAGLIPSVQARRLHRIAQSSDDTMKCFMEKEKMEQLHKKLWIQAGGDRENIPSIWEAPPSSEPPNNVSTNSEWEAPTQKDKFPKPCNWRKNEFKKWTKLASQGRGIVNFERDKISNHWIQYYRRIPHRKLLTALQLRANVYPTREFLARGRQDQYIKACRHCDADIESCAHIIG

SEQ ID NO: 151 - protein, 2808 aa, synthetic construct
MKRTADGSEFESPKKKRKVDKKYSIGLDIGTNSVGWAVITDEYKVPSKKFKVLGNTDRHSIKKNLIGALLFDSGETAEATRLKRTARRRYTRRKNRICYLQEIFSNEMAKVDDSFFHRLEESFLVEEDKKHERHPIFGNIVDEVAYHEKYPTIYHLRKKLVDSTDKADLRLIYLALAHMIKFRGHFLIEGDLNPDNSDVDKLFIQLVQTYNQLFEENPINASGVDAKAILSARLSKSRRLENLIAQLPGEKKNGLFGNLIALSLGLTPNFKSNFDLAEDAKLQLSKDTYDDDLDNLLAQIGDQYADLFLAAKNLSDAILLSDILRVNTEITKAPLSASMIKRYDEHHQDLTLLKALVRQQLPEKYKEIFFDQSKNGYAGYIDGGASQEEFYKFIKPILEKMDGTEELLVKLNREDLLRKQRTFDNGSIPHQIHLGELHAILRRQEDFYPFLKDNREKIEKILTFRIPYYVGPLARGNSRFAWMTRKSEETITPWNFEEVVDKGASAQSFIERMTNFDKNLPNEKVLPKHSLLYEYFTVYNELTKVKYVTEGMRKPAFLSGEQKKAIVDLLFKTNRKVTVKQLKEDYFKKIECFDSVEISGVEDRFNASLGTYHDLLKIIKDKDFLDNEENEDILEDIVLTLTLFEDREMIEERLKTYAHLFDDKVMKQLKRRRYTGWGRLSRKLINGIRDKQSGKTILDFLKSDGFANRNFMQLIHDDSLTFKEDIQKAQVSGQGDSLHEHIANLAGSPAIKKGILQTVKVVDELVKVMGRHKPENIVIEMARENQTTQKGQKNSRERMKRIEEGIKELGSQILKEHPVENTQLQNEKLYLYYLQNGRDMYVDQELDINRLSDYDVDAIVPQSFLKDDSIDNKVLTRSDKNRGKSDNVPSEEVVKKMKNYWRQLLNAKLITQRKFDNLTKAERGGLSELDKAGFIKRQLVETRQITKHVAQILDSRMNTKYDENDKLIREVKVITLKSKLVSDFRKDFQFYKVREINNYHHAHDAYLNAVVGTALIKKYPKLESEFVYGDYKVYDVRKMIAKSEQEIGKATAKYFFYSNIMNFFKTEITLANGEIRKRPLIETNGETGEIVWDKGRDFATVRKVLSMPQVNIVKKTEVQTGGFSKESILPKRNSDKLIARKKDWDPKKYGGFDSPTVAYSVLVVAKVEKGKSKKLKSVKELLGITIMERSSFEKNPIDFLEAKGYKEVKKDLIIKLPKYSLFELENGRKRMLASAGELQKGNELALPSKYVNFLYLASHYEKLKGSPEDNEQKQLFVEQHKHYLDEIIEQISEFSKRVILADANLDKVLSAYNKHRDKPIREQAENIIHLFTLTNLGAPAAFKYFDTTIDRKRYTSTKEVLDATLIHQSITGLYETRIDLSQLGGDSGGSSGGSSGSETPGTSESATPESSGGSSGGSSASCPKPGPPVSAGAMSLESGLTTHSVLAIERGPNSLANSGSDFGGGGLGLPLRLLRVSVGTQTSRSDWVDLVSWSHPGPTSKSQQVDLVSLFPKHRVDLLSKNDQVDLVAQFLPSKFPPNLAENDLALLVNLEFYRSDLHVYECVHFAAHWEGLSGLPEVYEQLAPQPCVGETLHSSLPRDSELFVPEEGSSEKESEDAPKTSPPTPGKHGLEQTGEEKVMVTVPDKNPPCPCCGTRVNSVLNLIEHLKVSHGKRGVCFRCAKCGKENSNYHSVVCHFPKCRGPETEKAPAGEWICEVCNRDFTTKIGLGQHKRLAHPAVRNQERIVASQPKETSNRGAHKRCWTKEEEELLIRLEAQFEGNKNINKLIAEHITTKTAKQISDKRRLLSRKPAEEPREEPGTCHHTRRAAASLRTEPEMSHHAQAEDRDNGPGRRPLPGRAAAGGRTMDEIRRHPDKGNGQQRPTKQKSEEQLQAYYKKTLEERLSAGALNTFPRAFKQVMEGRDIKLVINQTAQDCFGCLESISQIRTATRDKKDTVTREKHPKKPFQKWMKDRAIKKGNYLRFQRLFYLDRGKLAKIILDDIECLSCDIPLSEIYSVFKTRWETTGSFKSLGDFKTYGKADNTAFRELITAKEIEKNVQEMSKGSAPGPDGITLGDVVKMDPEFSRTMEIFNLWLTTGKIPDMVRGCRTVLIPKSSKPDRLKDINNWRPITIGSILLRLFSRIVTARLSKACPLNPRQRGFIRAAGCSENLKLLQTIIWSAKREHRPLGVVFVDIAKAFDTVSHQHIIHALQQREVDPHIVGLVSNMYENISTYITTKRNTHTDKIQIRVGVKQGDPMSPLLFNLAMDPLLCKLEESGKGYHRGQSSITAMAFADDLVLLSDSWENMNTNISILETFCNLTGLKTQGQKCHGFYIKPTKDSYTINDCAAWTINGTPLNMIDPGESEKYLGLQFDPWIGIARSGLSTKLDFWLQRIDQAPLKPLQKTDILKTYTIPRLIYIADHSEVKTALLETLDQKIRTAVKEWLHLPPCTCDAILYSSTRDGGLGITKLAGLIPSVQARRLHRIAQSSDDTMKCFMEKEKMEQLHKKLWIQAGGDRENIPSIWEAPPSSEPPNNVSTNSEWEAPTQKDKFPKPCNWRKNEFKKWTKLASQGRGIVNFERDKISNHWIQYYRRIPHRKLLTALQLRANVYPTREFLARGRQDQYIKACRHCDADIESCAHIIGNCPVTQDARIKRHNYICELLLEEAKKKDWVVFKEPHIRDSNKELYKPDLIFVKDARALVVDVTVRYEAAKSSLEEAAAEKVRKYKHLETEVRHLTNAKDVTFVGFPLGARGKWHQDNFKLLTELGLSKSRQVKMAETFSTVALFSSVDIVHMFASRARKSMVM

SEQ ID NO: 152 - protein, 2339 aa, synthetic construct
MKRTADGSEFESPKKKRKVDKKYSIGLAIGTNSVGWAVITDEYKVPSKKFKVLGNTDRHSIKKNLIGALLFDSGETAEATRLKRTARRRYTRRKNRICYLQEIFSNEMAKVDDSFFHRLEESFLVEEDKKHERHPIFGNIVDEVAYHEKYPTIYHLRKKLVDSTDKADLRLIYLALAHMIKFRGHFLIEGDLNPDNSDVDKLFIQLVQTYNQLFEENPINASGVDAKAILSARLSKSRRLENLIAQLPGEKKNGLFGNLIALSLGLTPNFKSNFDLAEDAKLQLSKDTYDDDLDNLLAQIGDQYADLFLAAKNLSDAILLSDILRVNTEITKAPLSASMIKRYDEHHQDLTLLKALVRQQLPEKYKEIFFDQSKNGYAGYIDGGASQEEFYKFIKPILEKMDGTEELLVKLNREDLLRKQRTFDNGSIPHQIHLGELHAILRRQEDFYPFLKDNREKIEKILTFRIPYYVGPLARGNSRFAWMTRKSEETITPWNFEEVVDKGASAQSFIERMTNFDKNLPNEKVLPKHSLLYEYFTVYNELTKVKYVTEGMRKPAFLSGEQKKAIVDLLFKTNRKVTVKQLKEDYFKKIECFDSVEISGVEDRFNASLGTYHDLLKIIKDKDFLDNEENEDILEDIVLTLTLFEDREMIEERLKTYAHLFDDKVMKQLKRRRYTGWGRLSRKLINGIRDKQSGKTILDFLKSDGFANRNFMQLIHDDSLTFKEDIQKAQVSGQGDSLHEHIANLAGSPAIKKGILQTVKVVDELVKVMGRHKPENIVIEMARENQTTQKGQKNSRERMKRIEEGIKELGSQILKEHPVENTQLQNEKLYLYYLQNGRDMYVDQELDINRLSDYDVDAIVPQSFLKDDSIDNKVLTRSDKNRGKSDNVPSEEVVKKMKNYWRQLLNAKLITQRKFDNLTKAERGGLSELDKAGFIKRQLVETRQITKHVAQILDSRMNTKYDENDKLIREVKVITLKSKLVSDFRKDFQFYKVREINNYHHAHDAYLNAVVGTALIKKYPKLESEFVYGDYKVYDVRKMIAKSEQEIGKATAKYFFYSNIMNFFKTEITLANGEIRKRPLIETNGETGEIVWDKGRDFATVRKVLSMPQVNIVKKTEVQTGGFSKESILPKRNSDKLIARKKDWDPKKYGGFDSPTVAYSVLVVAKVEKGKSKKLKSVKELLGITIMERSSFEKNPIDFLEAKGYKEVKKDLIIKLPKYSLFELENGRKRMLASAGELQKGNELALPSKYVNFLYLASHYEKLKGSPEDNEQKQLFVEQHKHYLDEIIEQISEFSKRVILADANLDKVLSAYNKHRDKPIREQAENIIHLFTLTNLGAPAAFKYFDTTIDRKRYTSTKEVLDATLIHQSITGLYETRIDLSQLGGDSGGSSGGSSGSETPGTSESATPESSGGSSGGSSEEQLQAYYKKTLEERLSAGALNTFPRAFKQVMEGRDIKLVINQTAQDCFGCLESISQIRTATRDKKDTVTREKHPKKPFQKWMKDRAIKKGNYLRFQRLFYLDRGKLAKIILDDIECLSCDIPLSEIYSVFKTRWETTGSFKSLGDFKTYGKADNTAFRELITAKEIEKNVQEMSKGSAPGPDGITLGDVVKMDPEFSRTMEIFNLWLTTGKIPDMVRGCRTVLIPKSSKPDRLKDINNWRPITIGSILLRLFSRIVTARLSKACPLNPRQRGFIRAAGCSENLKLLQTIIWSAKREHRPLGVVFVDIAKAFDTVSHQHIIHALQQREVDPHIVGLVSNMYENISTYITTKRNTHTDKIQIRVGVKQGDPMSPLLFNLAMDPLLCKLEESGKGYHRGQSSITAMAFADDLVLLSDSWENMNTNISILETFCNLTGLKTQGQKCHGFYIKPTKDSYTINDCAAWTINGTPLNMIDPGESEKYLGLQFDPWIGIARSGLSTKLDFWLQRIDQAPLKPLQKTDILKTYTIPRLIYIADHSEVKTALLETLDQKIRTAVKEWLHLPPCTCDAILYSSTRDGGLGITKLAGLIPSVQARRLHRIAQSSDDTMKCFMEKEKMEQLHKKLWIQAGGDRENIPSIWEAPPSSEPPNNVSTNSEWEAPTQKDKFPKPCNWRKNEFKKWTKLASQGRGIVNFERDKISNHWIQYYRRIPHRKLLTALQLRANVYPTREFLARGRQDQYIKACRHCDADIESCAHIIGNCPVTQDARIKRHNYICELLLEEAKKKDWVVFKEPHIRDSNKELYKPDLIFVKDARALVVDVTVRYEAAKSSLEEAAAEKVRKYKHLETEVRHLTNAKDVTFVGFPLGARGKWHQDNFKLLTELGLSKSRQVKMAETFSTVALFSSVDIVHMFASRARKSMVM

SEQ ID NO: 153 - protein, 2339 aa, synthetic construct
MKRTADGSEFESPKKKRKVDKKYSIGLDIGTNSVGWAVITDEYKVPSKKFKVLGNTDRHSIKKNLIGALLFDSGETAEATRLKRTARRRYTRRKNRICYLQEIFSNEMAKVDDSFFHRLEESFLVEEDKKHERHPIFGNIVDEVAYHEKYPTIYHLRKKLVDSTDKADLRLIYLALAHMIKFRGHFLIEGDLNPDNSDVDKLFIQLVQTYNQLFEENPINASGVDAKAILSARLSKSRRLENLIAQLPGEKKNGLFGNLIALSLGLTPNFKSNFDLAEDAKLQLSKDTYDDDLDNLLAQIGDQYADLFLAAKNLSDAILLSDILRVNTEITKAPLSASMIKRYDEHHQDLTLLKALVRQQLPEKYKEIFFDQSKNGYAGYIDGGASQEEFYKFIKPILEKMDGTEELLVKLNREDLLRKQRTFDNGSIPHQIHLGELHAILRRQEDFYPFLKDNREKIEKILTFRIPYYVGPLARGNSRFAWMTRKSEETITPWNFEEVVDKGASAQSFIERMTNFDKNLPNEKVLPKHSLLYEYFTVYNELTKVKYVTEGMRKPAFLSGEQKKAIVDLLFKTNRKVTVKQLKEDYFKKIECFDSVEISGVEDRFNASLGTYHDLLKIIKDKDFLDNEENEDILEDIVLTLTLFEDREMIEERLKTYAHLFDDKVMKQLKRRRYTGWGRLSRKLINGIRDKQSGKTILDFLKSDGFANRNFMQLIHDDSLTFKEDIQKAQVSGQGDSLHEHIANLAGSPAIKKGILQTVKVVDELVKVMGRHKPENIVIEMARENQTTQKGQKNSRERMKRIEEGIKELGSQILKEHPVENTQLQNEKLYLYYLQNGRDMYVDQELDINRLSDYDVDAIVPQSFLKDDSIDNKVLTRSDKNRGKSDNVPSEEVVKKMKNYWRQLLNAKLITQRKFDNLTKAERGGLSELDKAGFIKRQLVETRQITKHVAQILDSRMNTKYDENDKLIREVKVITLKSKLVSDFRKDFQFYKVREINNYHHAHDAYLNAVVGTALIKKYPKLESEFVYGDYKVYDVRKMIAKSEQEIGKATAKYFFYSNIMNFFKTEITLANGEIRKRPLIETNGETGEIVWDKGRDFATVRKVLSMPQVNIVKKTEVQTGGFSKESILPKRNSDKLIARKKDWDPKKYGGFDSPTVAYSVLVVAKVEKGKSKKLKSVKELLGITIMERSSFEKNPIDFLEAKGYKEVKKDLIIKLPKYSLFELENGRKRMLASAGELQKGNELALPSKYVNFLYLASHYEKLKGSPEDNEQKQLFVEQHKHYLDEIIEQISEFSKRVILADANLDKVLSAYNKHRDKPIREQAENIIHLFTLTNLGAPAAFKYFDTTIDRKRYTSTKEVLDATLIHQSITGLYETRIDLSQLGGDSGGSSGGSSGSETPGTSESATPESSGGSSGGSSEEQLQAYYKKTLEERLSAGALNTFPRAFKQVMEGRDIKLVINQTAQDCFGCLESISQIRTATRDKKDTVTREKHPKKPFQKWMKDRAIKKGNYLRFQRLFYLDRGKLAKIILDDIECLSCDIPLSEIYSVFKTRWETTGSFKSLGDFKTYGKADNTAFRELITAKEIEKNVQEMSKGSAPGPDGITLGDVVKMDPEFSRTMEIFNLWLTTGKIPDMVRGCRTVLIPKSSKPDRLKDINNWRPITIGSILLRLFSRIVTARLSKACPLNPRQRGFIRAAGCSENLKLLQTIIWSAKREHRPLGVVFVDIAKAFDTVSHQHIIHALQQREVDPHIVGLVSNMYENISTYITTKRNTHTDKIQIRVGVKQGDPMSPLLFNLAMDPLLCKLEESGKGYHRGQSSITAMAFADDLVLLSDSWENMNTNISILETFCNLTGLKTQGQKCHGFYIKPTKDSYTINDCAAWTINGTPLNMIDPGESEKYLGLQFDPWIGIARSGLSTKLDFWLQRIDQAPLKPLQKTDILKTYTIPRLIYIADHSEVKTALLETLDQKIRTAVKEWLHLPPCTCDAILYSSTRDGGLGITKLAGLIPSVQARRLHRIAQSSDDTMKCFMEKEKMEQLHKKLWIQAGGDRENIPSIWEAPPSSEPPNNVSTNSEWEAPTQKDKFPKPCNWRKNEFKKWTKLASQGRGIVNFERDKISNHWIQYYRRIPHRKLLTALQLRANVYPTREFLARGRQDQYIKACRHCDADIESCAHIIGNCPVTQDARIKRHNYICELLLEEAKKKDWVVFKEPHIRDSNKELYKPDLIFVKDARALVVDVTVRYEAAKSSLEEAAAEKVRKYKHLETEVRHLTNAKDVTFVGFPLGARGKWHQDNFKLLTELGLSKSRQVKMAETFSTVALFSSVDIVHMFASRARKSMVM

SEQ ID NO: 154 - protein, 2601 aa, synthetic construct
MKRTADGSEFESPKKKRKVDKKYSIGLDIGTNSVGWAVITDEYKVPSKKFKVLGNTDRHSIKKNLIGALLFDSGETAEATRLKRTARRRYTRRKNRICYLQEIFSNEMAKVDDSFFHRLEESFLVEEDKKHERHPIFGNIVDEVAYHEKYPTIYHLRKKLVDSTDKADLRLIYLALAHMIKFRGHFLIEGDLNPDNSDVDKLFIQLVQTYNQLFEENPINASGVDAKAILSARLSKSRRLENLIAQLPGEKKNGLFGNLIALSLGLTPNFKSNFDLAEDAKLQLSKDTYDDDLDNLLAQIGDQYADLFLAAKNLSDAILLSDILRVNTEITKAPLSASMIKRYDEHHQDLTLLKALVRQQLPEKYKEIFFDQSKNGYAGYIDGGASQEEFYKFIKPILEKMDGTEELLVKLNREDLLRKQRTFDNGSIPHQIHLGELHAILRRQEDFYPFLKDNREKIEKILTFRIPYYVGPLARGNSRFAWMTRKSEETITPWNFEEVVDKGASAQSFIERMTNFDKNLPNEKVLPKHSLLYEYFTVYNELTKVKYVTEGMRKPAFLSGEQKKAIVDLLFKTNRKVTVKQLKEDYFKKIECFDSVEISGVEDRFNASLGTYHDLLKIIKDKDFLDNEENEDILEDIVLTLTLFEDREMIEERLKTYAHLFDDKVMKQLKRRRYTGWGRLSRKLINGIRDKQSGKTILDFLKSDGFANRNFMQLIHDDSLTFKEDIQKAQVSGQGDSLHEHIANLAGSPAIKKGILQTVKVVDELVKVMGRHKPENIVIEMARENQTTQKGQKNSRERMKRIEEGIKELGSQILKEHPVENTQLQNEKLYLYYLQNGRDMYVDQELDINRLSDYDVDAIVPQSFLKDDSIDNKVLTRSDKNRGKSDNVPSEEVVKKMKNYWRQLLNAKLITQRKFDNLTKAERGGLSELDKAGFIKRQLVETRQITKHVAQILDSRMNTKYDENDKLIREVKVITLKSKLVSDFRKDFQFYKVREINNYHHAHDAYLNAVVGTALIKKYPKLESEFVYGDYKVYDVRKMIAKSEQEIGKATAKYFFYSNIMNFFKTEITLANGEIRKRPLIETNGETGEIVWDKGRDFATVRKVLSMPQVNIVKKTEVQTGGFSKESILPKRNSDKLIARKKDWDPKKYGGFDSPTVAYSVLVVAKVEKGKSKKLKSVKELLGITIMERSSFEKNPIDFLEAKGYKEVKKDLIIKLPKYSLFELENGRKRMLASAGELQKGNELALPSKYVNFLYLASHYEKLKGSPEDNEQKQLFVEQHKHYLDEIIEQISEFSKRVILADANLDKVLSAYNKHRDKPIREQAENIIHLFTLTNLGAPAAFKYFDTTIDRKRYTSTKEVLDATLIHQSITGLYETRIDLSQLGGDSGGSSGGSSGSETPGTSESATPESSGGSSGGSSGKHGLEQTGEEKVMVTVPDKNPPCPCCGTRVNSVLNLIEHLKVSHGKRGVCFRCAKCGKENSNYHSVVCHFPKCRGPETEKAPAGEWICEVCNRDFTTKIGLGQHKRLAHPAVRNQERIVASQPKETSNRGAHKRCWTKEEEELLIRLEAQFEGNKNINKLIAEHITTKTAKQISDKRRLLSRKPAEEPREEPGTCHHTRRAAASLRTEPEMSHHAQAEDRDNGPGRRPLPGRAAAGGRTMDEIRRHPDKGNGQQRPTKQKSEEQLQAYYKKTLEERLSAGALNTFPRAFKQVMEGRDIKLVINQTAQDCFGCLESISQIRTATRDKKDTVTREKHPKKPFQKWMKDRAIKKGNYLRFQRLFYLDRGKLAKIILDDIECLSCDIPLSEIYSVFKTRWETTGSFKSLGDFKTYGKADNTAFRELITAKEIEKNVQEMSKGSAPGPDGITLGDVVKMDPEFSRTMEIFNLWLTTGKIPDMVRGCRTVLIPKSSKPDRLKDINNWRPITIGSILLRLFSRIVTARLSKACPLNPRQRGFIRAAGCSENLKLLQTIIWSAKREHRPLGVVFVDIAKAFDTVSHQHIIHALQQREVDPHIVGLVSNMYENISTYITTKRNTHTDKIQIRVGVKQGDPMSPLLFNLAMDPLLCKLEESGKGYHRGQSSITAMAFADDLVLLSDSWENMNTNISILETFCNLTGLKTQGQKCHGFYIKPTKDSYTINDCAAWTINGTPLNMIDPGESEKYLGLQFDPWIGIARSGLSTKLDFWLQRIDQAPLKPLQKTDILKTYTIPRLIYIADHSEVKTALLETLDQKIRTAVKEWLHLPPCTCDAILYSSTRDGGLGITKLAGLIPSVQARRLHRIAQSSDDTMKCFMEKEKMEQLHKKLWIQAGGDRENIPSIWEAPPSSEPPNNVSTNSEWEAPTQKDKFPKPCNWRKNEFKKWTKLASQGRGIVNFERDKISNHWIQYYRRIPHRKLLTALQLRANVYPTREFLARGRQDQYIKACRHCDADIESCAHIIGNCPVTQDARIKRHNYICELLLEEAKKKDWVVFKEPHIRDSNKELYKPDLIFVKDARALVVDVTVRYEAAKSSLEEAAAEKVRKYKHLETEVRHLTNAKDVTFVGFPLGARGKWHQDNFKLLTELGLSKSRQVKMAETFSTVALFSSVDIVHMFASRARKSMVM

SEQ ID NO: 155 - protein, 2808 aa, synthetic construct
MKRTADGSEFESPKKKRKVDKKYSIGLAIGTNSVGWAVITDEYKVPSKKFKVLGNTDRHSIKKNLIGALLFDSGETAEATRLKRTARRRYTRRKNRICYLQEIFSNEMAKVDDSFFHRLEESFLVEEDKKHERHPIFGNIVDEVAYHEKYPTIYHLRKKLVDSTDKADLRLIYLALAHMIKFRGHFLIEGDLNPDNSDVDKLFIQLVQTYNQLFEENPINASGVDAKAILSARLSKSRRLENLIAQLPGEKKNGLFGNLIALSLGLTPNFKSNFDLAEDAKLQLSKDTYDDDLDNLLAQIGDQYADLFLAAKNLSDAILLSDILRVNTEITKAPLSASMIKRYDEHHQDLTLLKALVRQQLPEKYKEIFFDQSKNGYAGYIDGGASQEEFYKFIKPILEKMDGTEELLVKLNREDLLRKQRTFDNGSIPHQIHLGELHAILRRQEDFYPFLKDNREKIEKILTFRIPYYVGPLARGNSRFAWMTRKSEETITPWNFEEVVDKGASAQSFIERMTNFDKNLPNEKVLPKHSLLYEYFTVYNELTKVKYVTEGMRKPAFLSGEQKKAIVDLLFKTNRKVTVKQLKEDYFKKIECFDSVEISGVEDRFNASLGTYHDLLKIIKDKDFLDNEENEDILEDIVLTLTLFEDREMIEERLKTYAHLFDDKVMKQLKRRRYTGWGRLSRKLINGIRDKQSGKTILDFLKSDGFANRNFMQLIHDDSLTFKEDIQKAQVSGQGDSLHEHIANLAGSPAIKKGILQTVKVVDELVKVMGRHKPENIVIEMARENQTTQKGQKNSRERMKRIEEGIKELGSQILKEHPVENTQLQNEKLYLYYLQNGRDMYVDQELDINRLSDYDVDAIVPQSFLKDDSIDNKVLTRSDKNRGKSDNVPSEEVVKKMKNYWRQLLNAKLITQRKFDNLTKAERGGLSELDKAGFIKRQLVETRQITKHVAQILDSRMNTKYDENDKLIREVKVITLKSKLVSDFRKDFQFYKVREINNYHHAHDAYLNAVVGTALIKKYPKLESEFVYGDYKVYDVRKMIAKSEQEIGKATAKYFFYSNIMNFFKTEITLANGEIRKRPLIETNGETGEIVWDKGRDFATVRKVLSMPQVNIVKKTEVQTGGFSKESILPKRNSDKLIARKKDWDPKKYGGFDSPTVAYSVLVVAKVEKGKSKKLKSVKELLGITIMERSSFEKNPIDFLEAKGYKEVKKDLIIKLPKYSLFELENGRKRMLASAGELQKGNELALPSKYVNFLYLASHYEKLKGSPEDNEQKQLFVEQHKHYLDEIIEQISEFSKRVILADANLDKVLSAYNKHRDKPIREQAENIIHLFTLTNLGAPAAFKYFDTTIDRKRYTSTKEVLDATLIHQSITGLYETRIDLSQLGGDSGGSSGGSSGSETPGTSESATPESSGGSSGGSSASCPKPGPPVSAGAMSLESGLTTHSVLAIERGPNSLANSGSDFGGGGLGLPLRLLRVSVGTQTSRSDWVDLVSWSHPGPTSKSQQVDLVSLFPKHRVDLLSKNDQVDLVAQFLPSKFPPNLAENDLALLVNLEFYRSDLHVYECVHFAAHWEGLSGLPEVYEQLAPQPCVGETLHSSLPRDSELFVPEEGSSEKESEDAPKTSPPTPGKHGLEQTGEEKVMVTVPDKNPPCPCCGTRVNSVLNLIEHLKVSHGKRGVCFRCAKCGKENSNYHSVVCHFPKCRGPETEKAPAGEWICEVCNRDFTTKIGLGQHKRLAHPAVRNQERIVASQPKETSNRGAHKRCWTKEEEELLIRLEAQFEGNKNINKLIAEHITTKTAKQISDKRRLLSRKPAEEPREEPGTCHHTRRAAASLRTEPEMSHHAQAEDRDNGPGRRPLPGRAAAGGRTMDEIRRHPDKGNGQQRPTKQKSEEQLQAYYKKTLEERLSAGALNTFPRAFKQVMEGRDIKLVINQTAQDCFGCLESISQIRTATRDKKDTVTREKHPKKPFQKWMKDRAIKKGNYLRFQRLFYLDRGKLAKIILDDIECLSCDIPLSEIYSVFKTRWETTGSFKSLGDFKTYGKADNTAFRELITAKEIEKNVQEMSKGSAPGPDGITLGDVVKMDPEFSRTMEIFNLWLTTGKIPDMVRGCRTVLIPKSSKPDRLKDINNWRPITIGSILLRLFSRIVTARLSKACPLNPRQRGFIRAAGCSENLKLLQTIIWSAKREHRPLGVVFVDIAKAFDTVSHQHIIHALQQREVDPHIVGLVSNMYENISTYITTKRNTHTDKIQIRVGVKQGDPMSPLLFNLAMDPLLCKLEESGKGYHRGQSSITAMAFADDLVLLSDSWENMNTNISILETFCNLTGLKTQGQKCHGFYIKPTKDSYTINDCAAWTINGTPLNMIDPGESEKYLGLQFDPWIGIARSGLSTKLDFWLQRIDQAPLKPLQKTDILKTYTIPRLIYIADHSEVKTALLETLDQKIRTAVKEWLHLPPCTCDAILYSSTRDGGLGITKLAGLIPSVQARRLHRIAQSSDDTMKCFMEKEKMEQLHKKLWIQAGGDRENIPSIWEAPPSSEPPNNVSTNSEWEAPTQKDKFPKPCNWRKNEFKKWTKLASQGRGIVNFERDKISNHWIQYYRRIPHRKLLTALQLRANVYPTREFLARGRQDQYIKACRHCDADIESCAHIIGNCPVTQDARIKRHNYICELLLEEAKKKDWVVFKEPHIRDSNKELYKPDLIFVKDARALVVDVTVRYEAAKSSLEEAAAEKVRKYKHLETEVRHLTNAKDVTFVGFPLGARGKWHQDNFKLLTELGLSKSRQVKMAETFSTVALFSSVDIVHMFASRARKSMVM

SEQ ID NO: 156 - protein, 2645 aa, synthetic construct
MKRTADGSEFESPKKKRKVDKKYSIGLDIGTNSVGWAVITDEYKVPSKKFKVLGNTDRHSIKKNLIGALLFDSGETAEATRLKRTARRRYTRRKNRICYLQEIFSNEMAKVDDSFFHRLEESFLVEEDKKHERHPIFGNIVDEVAYHEKYPTIYHLRKKLVDSTDKADLRLIYLALAHMIKFRGHFLIEGDLNPDNSDVDKLFIQLVQTYNQLFEENPINASGVDAKAILSARLSKSRRLENLIAQLPGEKKNGLFGNLIALSLGLTPNFKSNFDLAEDAKLQLSKDTYDDDLDNLLAQIGDQYADLFLAAKNLSDAILLSDILRVNTEITKAPLSASMIKRYDEHHQDLTLLKALVRQQLPEKYKEIFFDQSKNGYAGYIDGGASQEEFYKFIKPILEKMDGTEELLVKLNREDLLRKQRTFDNGSIPHQIHLGELHAILRRQEDFYPFLKDNREKIEKILTFRIPYYVGPLARGNSRFAWMTRKSEETITPWNFEEVVDKGASAQSFIERMTNFDKNLPNEKVLPKHSLLYEYFTVYNELTKVKYVTEGMRKPAFLSGEQKKAIVDLLFKTNRKVTVKQLKEDYFKKIECFDSVEISGVEDRFNASLGTYHDLLKIIKDKDFLDNEENEDILEDIVLTLTLFEDREMIEERLKTYAHLFDDKVMKQLKRRRYTGWGRLSRKLINGIRDKQSGKTILDFLKSDGFANRNFMQLIHDDSLTFKEDIQKAQVSGQGDSLHEHIANLAGSPAIKKGILQTVKVVDELVKVMGRHKPENIVIEMARENQTTQKGQKNSRERMKRIEEGIKELGSQILKEHPVENTQLQNEKLYLYYLQNGRDMYVDQELDINRLSDYDVDAIVPQSFLKDDSIDNKVLTRSDKNRGKSDNVPSEEVVKKMKNYWRQLLNAKLITQRKFDNLTKAERGGLSELDKAGFIKRQLVETRQITKHVAQILDSRMNTKYDENDKLIREVKVITLKSKLVSDFRKDFQFYKVREINNYHHAHDAYLNAVVGTALIKKYPKLESEFVYGDYKVYDVRKMIAKSEQEIGKATAKYFFYSNIMNFFKTEITLANGEIRKRPLIETNGETGEIVWDKGRDFATVRKVLSMPQVNIVKKTEVQTGGFSKESILPKRNSDKLIARKKDWDPKKYGGFDSPTVAYSVLVVAKVEKGKSKKLKSVKELLGITIMERSSFEKNPIDFLEAKGYKEVKKDLIIKLPKYSLFELENGRKRMLASAGELQKGNELALPSKYVNFLYLASHYEKLKGSPEDNEQKQLFVEQHKHYLDEIIEQISEFSKRVILADANLDKVLSAYNKHRDKPIREQAENIIHLFTLTNLGAPAAFKYFDTTIDRKRYTSTKEVLDATLIHQSITGLYETRIDLSQLGGDSGGSSGGSSGSETPGTSESATPESSGGSSGGSSASCPKPGPPVSAGAMSLESGLTTHSVLAIERGPNSLANSGSDFGGGGLGLPLRLLRVSVGTQTSRSDWVDLVSWSHPGPTSKSQQVDLVSLFPKHRVDLLSKNDQVDLVAQFLPSKFPPNLAENDLALLVNLEFYRSDLHVYECVHFAAHWEGLSGLPEVYEQLAPQPCVGETLHSSLPRDSELFVPEEGSSEKESEDAPKTSPPTPGKHGLEQTGEEKVMVTVPDKNPPCPCCGTRVNSVLNLIEHLKVSHGKRGVCFRCAKCGKENSNYHSVVCHFPKCRGPETEKAPAGEWICEVCNRDFTTKIGLGQHKRLAHPAVRNQERIVASQPKETSNRGAHKRCWTKEEEELLIRLEAQFEGNKNINKLIAEHITTKTAKQISDKRRLLSRKPAEEPREEPGTCHHTRRAAASLRTEPEMSHHAQAEDRDNGPGRRPLPGRAAAGGRTMDEIRRHPDKGNGQQRPTKQKSEEQLQAYYKKTLEERLSAGALNTFPRAFKQVMEGRDIKLVINQTAQDCFGCLESISQIRTATRDKKDTVTREKHPKKPFQKWMKDRAIKKGNYLRFQRLFYLDRGKLAKIILDDIECLSCDIPLSEIYSVFKTRWETTGSFKSLGDFKTYGKADNTAFRELITAKEIEKNVQEMSKGSAPGPDGITLGDVVKMDPEFSRTMEIFNLWLTTGKIPDMVRGCRTVLIPKSSKPDRLKDINNWRPITIGSILLRLFSRIVTARLSKACPLNPRQRGFIRAAGCSENLKLLQTIIWSAKREHRPLGVVFVDIAKAFDTVSHQHIIHALQQREVDPHIVGLVSNMYENISTYITTKRNTHTDKIQIRVGVKQGDPMSPLLFNLAMDPLLCKLEESGKGYHRGQSSITAMAFADDLVLLSDSWENMNTNISILETFCNLTGLKTQGQKCHGFYIKPTKDSYTINDCAAWTINGTPLNMIDPGESEKYLGLQFDPWIGIARSGLSTKLDFWLQRIDQAPLKPLQKTDILKTYTIPRLIYIADHSEVKTALLETLDQKIRTAVKEWLHLPPCTCDAILYSSTRDGGLGITKLAGLIPSVQARRLHRIAQSSDDTMKCFMEKEKMEQLHKKLWIQAGGDRENIPSIWEAPPSSEPPNNVSTNSEWEAPTQKDKFPKPCNWRKNEFKKWTKLASQGRGIVNFERDKISNHWIQYYRRIPHRKLLTALQLRANVYPTREFLARGRQDQYIKACRHCDADIESCAHIIG

SEQ ID NO: 157 - protein, 1137 aa, synthetic construct
MENQTQTKSILARSSPRIKRTAVDAADSGHPSTSGLRNHQNPNEQSQKRQKYTMPENRTIMKCYYKSEPQRRGYQKRMHQLWKQEYPDSQITEPRLADQRRFIIRNKVFSEVELEEIQKICKVDYHQTTAQTAAETPATLGMVEQIEPEESVALLQEFEEPALETSVEPPGTLTARQQELKDKIMAHAAANAIRQRLPTLKTVPKRHLAPLMKDVNAALSTVQITSIEQTNQFAYSAAVIVTEELGLLQPRQPQRKSTGKPKWKVRLELKIKKLRSDASNLKNMKERKLKNDKIKQYLIRKYWLNTRKIEEALEIVKEQITATARKIERYEARIIQYRQRKRRQTSMTDFYHSKRRLIFSKRKPPEKTATTKFWKELWENNKNYNKNAGWIKEFEGKFSQNKMELMEITTEMISKRVQKVKNWTSPGSDQLHGFWLKHLISLHGKMAQQFNEMLQKGSISEWLTTGRTYLIQKDPAKGAAPGNYRPITCLPTMFKLLTGIIADRIQDYLEEKNILPDEQKGNKRKSRGTKDQLLIDKMILENCKSRKANLHMTWIDYKKAFDSLPHSWIIKCLDAIGICKTVGTFIENMMEHWKTELFVGNESYGLVNIRRGIFQGDSLSPLLFIIAMIPLSTILQKTNLGYQISKNSHKISHLMYMDDLKLYGKTETEIQSLTNTVRIFSTDINMEFGLDKCSTVALKKGKIIESEGINMPNGQTIKCHQPEAYKYLGILQLDNIKHEHVKTVVSKEYTQRVRKILKSKLNGGNTIKAINTWAIPVIRYTAGIINWTQVELDNLDRKTRKLMTIHHSLHPRSDVDRLYLPRRSGGRGLLQVKQAVKEEEHALAEYVKQSEEPALIEVKNQKLLKTQQTKNQYKKTALQTRADSWHNKTLHGKFLDKIEGKADKEKTWLWLTNGTLKKETEGLILAAQEQAIRTNAIKAKIEKSADDPKCRLCKETDETIDHILSCCKKIAQTDYKQRHNYVAQMIHWNLCLKYHLPAAKNWWDHKPAKVLENEHAKILWDFRIQTDKVLEHNTPDITVVEKNKVWIIDVAIPGDSRIDEKQQEKLSRYQDLKIELQRLWQKPVQVVPVVMGTLGAVPKDLSRHLETIDIDKITICQLQKATLLGSAHIIRKYITQS

SEQ ID NO: 158 - protein, 1137 aa, synthetic construct
MENQTQTKSILARSSPRIKRTAVDAADSGHPSTSGLRNHQNPNEQSQKRQKYTMPENRTIMKCYYKSEPQRRGYQKRMHQLWKQEYPDSQITEPRLADQRRFIIRNKVFSEVELEEIQKICKVDYHQTTAQTAAETPATLGMVEQIEPEESVALLQEFEEPALETSVEPPGTLTARQQELKDKIMAHAAANAIRQRLPTLKTVPKRHLAPLMKDVNAALSTVQITSIEQTNQFAYSAAVIVTEELGLLQPRQPQRKSTGKPKWKVRLELKIKKLRSDASNLKNMKERKLKNDKIKQYLIRKYWLNTRKIEEALEIVKEQITATARKIERYEARIIQYRQRKRRQTSLTDFFHSKRRLIFSKRKPPEKTATTKFWKELWENNKNYNKNAGWIKEFEGKFSQNKMELMEITTEMISKRVQKVKNWTSPGSDQLHGFWLKHLISLHGKMAQQFNEMLQKGSISEWLTTGRTYLIQKDPAKGAAPGNYRPITCLPTMFKLLTGIIADRIQDYLEEKNILPDEQKGNKRKSRGTKDQLLIDKMILENCKSRKANLHMTWIDYKKAFDSLPHSWIIKCLDAIGICKTVGTFIENMMEHWKTELFVGNESYGLVNIRRGIFQGDSLSPLLFIIAMIPLSTILQKTNLGYQISKNSHKISHLMYMDDLKLYGKTETEIQSLTNTVRIFSTDINMEFGLDKCSTVALKKGKIIESEGINMPNGQTIKCHQPEAYKYLGILQLDNIKHEHVKTVVSKEYTQRVRKILKSKLNGGNTIKAINTWAIPVIRYTAGIINWTQVELDNLDRKTRKLMTIHHSLHPRSDVDRLYLPRRSGGRGLLQVKQAVKEEEHALAEYVKQSEEPALIEVKNQKLLKTQQTKNQYKKTALQTRADSWHNKTLHGKFLDKIEGKADKEKTWLWLTNGTLKKETEGLILAAQEQAIRTNAIKAKIEKSADDPKCRLCKETDETIDHILSCCKKIAQTDYKQRHNYVAQMIHWNLCLKYHLPAAKNWWDHKPAKVLENEHAKILWDFRIQTDKVLEHNTPDITVVEKNKVWIIDVAIPGDSRIDEKQQEKLSRYQDLKIELQRLWQKPVQVVPVVMGTLGAVPKDLSRHLETIDIDKITICQLQKATLLGSAHIIRKYITQS

SEQ ID NO: 159 - skipped

SEQ ID NO: 160 - protein, 2069 aa, synthetic construct
MKRTADGSEFESPKKKRKVRLKKLDKPTLHTCNKTSFAKAFLPNETYRQRLLDYIAIIHQLADHASHALKFYILSTSTSSFPVVHEDTIEAILYLLNKGEAWHPRKEAKKAWRDCLLPYVQRYCQIVGFIHPNLRGEQQSINYLTVSMMTNLKVNVQEHFMQMLLRYINLRFDVKGQKQRLPPKSDARKAFFTRLRYLKSVFLFDVVPELEFLDDLTPLESEVLEEIWSLDLPFLPNDPLAYAIVADPMSFFPAYCKLSGLYEQYGFQRFSAIPLRRSLIQSHVRIDTIILYQHILCITRRDAETVEKDDLWMRVCNLCTKAFRSRCGMHFEGSITTDGASVSVYLKHPEADKYGKRGARKSANTVAAEVKALYVENNLPACRAAENVVVIDPNKRDILYCQDSNGTTFRYTANQRAVETGSRRFAKRREAMKEEAGVDLIESRIPSHKTMNLMDFTRYLLVRRADWDRRKEFYSHPAHTRWKWHSFINRQKSESDLISNMRNKYGENFTVVMGDWSDAGRTARFQTSSKTKGWRTLFKRNRIDCFLLDEYKTSSVCPRCSSSEFVEKKFKTRPHSRPWRRREGKIEKVHGLLGCTNPNCLQQAWTSGMRYWNRDMLSTCNMLLIVRSMLDGHGRPEVFSRSVPAVASGGSSGGSSGSETPGTSESATPESSGGSSGGSSASCPKPGPPVSAGAMSLESGLTTHSVLAIERGPNSLANSGSDFGGGGLGLPLRLLRVSVGTQTSRSDWVDLVSWSHPGPTSKSQQVDLVSLFPKHRVDLLSKNDQVDLVAQFLPSKFPPNLAENDLALLVNLEFYRSDLHVYECVHFAAHWEGLSGLPEVYEQLAPQPCVGETLHSSLPRDSELFVPEEGSSEKESEDAPKTSPPTPGKHGLEQTGEEKVMVTVPDKNPPCPCCGTRVNSVLNLIEHLKVSHGKRGVCFRCAKCGKENSNYHSVVCHFPKCRGPETEKAPAGEWICEVCNRDFTTKIGLGQHKRLAHPAVRNQERIVASQPKETSNRGAHKRCWTKEEEELLIRLEAQFEGNKNINKLIAEHITTKTAKQISDKRRLLSRKPAEEPREEPGTCHHTRRAAASLRTEPEMSHHAQAEDRDNGPGRRPLPGRAAAGGRTMDEIRRHPDKGNGQQRPTKQKSEEQLQAYYKKTLEERLSAGALNTFPRAFKQVMEGRDIKLVINQTAQDCFGCLESISQIRTATRDKKDTVTREKHPKKPFQKWMKDRAIKKGNYLRFQRLFYLDRGKLAKIILDDIECLSCDIPLSEIYSVFKTRWETTGSFKSLGDFKTYGKADNTAFRELITAKEIEKNVQEMSKGSAPGPDGITLGDVVKMDPEFSRTMEIFNLWLTTGKIPDMVRGCRTVLIPKSSKPDRLKDINNWRPITIGSILLRLFSRIVTARLSKACPLNPRQRGFIRAAGCSENLKLLQTIIWSAKREHRPLGVVFVDIAKAFDTVSHQHIIHALQQREVDPHIVGLVSNMYENISTYITTKRNTHTDKIQIRVGVKQGDPMSPLLFNLAMDPLLCKLEESGKGYHRGQSSITAMAFADDLVLLSDSWENMNTNISILETFCNLTGLKTQGQKCHGFYIKPTKDSYTINDCAAWTINGTPLNMIDPGESEKYLGLQFDPWIGIARSGLSTKLDFWLQRIDQAPLKPLQKTDILKTYTIPRLIYIADHSEVKTALLETLDQKIRTAVKEWLHLPPCTCDAILYSSTRDGGLGITKLAGLIPSVQARRLHRIAQSSDDTMKCFMEKEKMEQLHKKLWIQAGGDRENIPSIWEAPPSSEPPNNVSTNSEWEAPTQKDKFPKPCNWRKNEFKKWTKLASQGRGIVNFERDKISNHWIQYYRRIPHRKLLTALQLRANVYPTREFLARGRQDQYIKACRHCDADIESCAHIIGNCPVTQDARIKRHNYICELLLEEAKKKDWVVFKEPHIRDSNKELYKPDLIFVKDARALVVDVTVRYEAAKSSLEEAAAEKVRKYKHLETEVRHLTNAKDVTFVGFPLGARGKWHQDNFKLLTELGLSKSRQVKMAETFSTVALFSSVDIVHMFASRARKSMVM

SEQ ID NO: 161 - protein, 1862 aa, synthetic construct
MKRTADGSEFESPKKKRKVRLKKLDKPTLHTCNKTSFAKAFLPNETYRQRLLDYIAIIHQLADHASHALKFYILSTSTSSFPVVHEDTIEAILYLLNKGEAWHPRKEAKKAWRDCLLPYVQRYCQIVGFIHPNLRGEQQSINYLTVSMMTNLKVNVQEHFMQMLLRYINLRFDVKGQKQRLPPKSDARKAFFTRLRYLKSVFLFDVVPELEFLDDLTPLESEVLEEIWSLDLPFLPNDPLAYAIVADPMSFFPAYCKLSGLYEQYGFQRFSAIPLRRSLIQSHVRIDTIILYQHILCITRRDAETVEKDDLWMRVCNLCTKAFRSRCGMHFEGSITTDGASVSVYLKHPEADKYGKRGARKSANTVAAEVKALYVENNLPACRAAENVVVIDPNKRDILYCQDSNGTTFRYTANQRAVETGSRRFAKRREAMKEEAGVDLIESRIPSHKTMNLMDFTRYLLVRRADWDRRKEFYSHPAHTRWKWHSFINRQKSESDLISNMRNKYGENFTVVMGDWSDAGRTARFQTSSKTKGWRTLFKRNRIDCFLLDEYKTSSVCPRCSSSEFVEKKFKTRPHSRPWRRREGKIEKVHGLLGCTNPNCLQQAWTSGMRYWNRDMLSTCNMLLIVRSMLDGHGRPEVFSRSVPAVASGGSSGGSSGSETPGTSESATPESSGGSSGGSSGKHGLEQTGEEKVMVTVPDKNPPCPCCGTRVNSVLNLIEHLKVSHGKRGVCFRCAKCGKENSNYHSVVCHFPKCRGPETEKAPAGEWICEVCNRDFTTKIGLGQHKRLAHPAVRNQERIVASQPKETSNRGAHKRCWTKEEEELLIRLEAQFEGNKNINKLIAEHITTKTAKQISDKRRLLSRKPAEEPREEPGTCHHTRRAAASLRTEPEMSHHAQAEDRDNGPGRRPLPGRAAAGGRTMDEIRRHPDKGNGQQRPTKQKSEEQLQAYYKKTLEERLSAGALNTFPRAFKQVMEGRDIKLVINQTAQDCFGCLESISQIRTATRDKKDTVTREKHPKKPFQKWMKDRAIKKGNYLRFQRLFYLDRGKLAKIILDDIECLSCDIPLSEIYSVFKTRWETTGSFKSLGDFKTYGKADNTAFRELITAKEIEKNVQEMSKGSAPGPDGITLGDVVKMDPEFSRTMEIFNLWLTTGKIPDMVRGCRTVLIPKSSKPDRLKDINNWRPITIGSILLRLFSRIVTARLSKACPLNPRQRGFIRAAGCSENLKLLQTIIWSAKREHRPLGVVFVDIAKAFDTVSHQHIIHALQQREVDPHIVGLVSNMYENISTYITTKRNTHTDKIQIRVGVKQGDPMSPLLFNLAMDPLLCKLEESGKGYHRGQSSITAMAFADDLVLLSDSWENMNTNISILETFCNLTGLKTQGQKCHGFYIKPTKDSYTINDCAAWTINGTPLNMIDPGESEKYLGLQFDPWIGIARSGLSTKLDFWLQRIDQAPLKPLQKTDILKTYTIPRLIYIADHSEVKTALLETLDQKIRTAVKEWLHLPPCTCDAILYSSTRDGGLGITKLAGLIPSVQARRLHRIAQSSDDTMKCFMEKEKMEQLHKKLWIQAGGDRENIPSIWEAPPSSEPPNNVSTNSEWEAPTQKDKFPKPCNWRKNEFKKWTKLASQGRGIVNFERDKISNHWIQYYRRIPHRKLLTALQLRANVYPTREFLARGRQDQYIKACRHCDADIESCAHIIGNCPVTQDARIKRHNYICELLLEEAKKKDWVVFKEPHIRDSNKELYKPDLIFVKDARALVVDVTVRYEAAKSSLEEAAAEKVRKYKHLETEVRHLTNAKDVTFVGFPLGARGKWHQDNFKLLTELGLSKSRQVKMAETFSTVALFSSVDIVHMFASRARKSMVM

SEQ ID NO: 162 - protein, 1906 aa, synthetic construct
MKRTADGSEFESPKKKRKVRLKKLDKPTLHTCNKTSFAKAFLPNETYRQRLLDYIAIIHQLADHASHALKFYILSTSTSSFPVVHEDTIEAILYLLNKGEAWHPRKEAKKAWRDCLLPYVQRYCQIVGFIHPNLRGEQQSINYLTVSMMTNLKVNVQEHFMQMLLRYINLRFDVKGQKQRLPPKSDARKAFFTRLRYLKSVFLFDVVPELEFLDDLTPLESEVLEEIWSLDLPFLPNDPLAYAIVADPMSFFPAYCKLSGLYEQYGFQRFSAIPLRRSLIQSHVRIDTIILYQHILCITRRDAETVEKDDLWMRVCNLCTKAFRSRCGMHFEGSITTDGASVSVYLKHPEADKYGKRGARKSANTVAAEVKALYVENNLPACRAAENVVVIDPNKRDILYCQDSNGTTFRYTANQRAVETGSRRFAKRREAMKEEAGVDLIESRIPSHKTMNLMDFTRYLLVRRADWDRRKEFYSHPAHTRWKWHSFINRQKSESDLISNMRNKYGENFTVVMGDWSDAGRTARFQTSSKTKGWRTLFKRNRIDCFLLDEYKTSSVCPRCSSSEFVEKKFKTRPHSRPWRRREGKIEKVHGLLGCTNPNCLQQAWTSGMRYWNRDMLSTCNMLLIVRSMLDGHGRPEVFSRSVPAVASGGSSGGSSGSETPGTSESATPESSGGSSGGSSASCPKPGPPVSAGAMSLESGLTTHSVLAIERGPNSLANSGSDFGGGGLGLPLRLLRVSVGTQTSRSDWVDLVSWSHPGPTSKSQQVDLVSLFPKHRVDLLSKNDQVDLVAQFLPSKFPPNLAENDLALLVNLEFYRSDLHVYECVHFAAHWEGLSGLPEVYEQLAPQPCVGETLHSSLPRDSELFVPEEGSSEKESEDAPKTSPPTPGKHGLEQTGEEKVMVTVPDKNPPCPCCGTRVNSVLNLIEHLKVSHGKRGVCFRCAKCGKENSNYHSVVCHFPKCRGPETEKAPAGEWICEVCNRDFTTKIGLGQHKRLAHPAVRNQERIVASQPKETSNRGAHKRCWTKEEEELLIRLEAQFEGNKNINKLIAEHITTKTAKQISDKRRLLSRKPAEEPREEPGTCHHTRRAAASLRTEPEMSHHAQAEDRDNGPGRRPLPGRAAAGGRTMDEIRRHPDKGNGQQRPTKQKSEEQLQAYYKKTLEERLSAGALNTFPRAFKQVMEGRDIKLVINQTAQDCFGCLESISQIRTATRDKKDTVTREKHPKKPFQKWMKDRAIKKGNYLRFQRLFYLDRGKLAKIILDDIECLSCDIPLSEIYSVFKTRWETTGSFKSLGDFKTYGKADNTAFRELITAKEIEKNVQEMSKGSAPGPDGITLGDVVKMDPEFSRTMEIFNLWLTTGKIPDMVRGCRTVLIPKSSKPDRLKDINNWRPITIGSILLRLFSRIVTARLSKACPLNPRQRGFIRAAGCSENLKLLQTIIWSAKREHRPLGVVFVDIAKAFDTVSHQHIIHALQQREVDPHIVGLVSNMYENISTYITTKRNTHTDKIQIRVGVKQGDPMSPLLFNLAMDPLLCKLEESGKGYHRGQSSITAMAFADDLVLLSDSWENMNTNISILETFCNLTGLKTQGQKCHGFYIKPTKDSYTINDCAAWTINGTPLNMIDPGESEKYLGLQFDPWIGIARSGLSTKLDFWLQRIDQAPLKPLQKTDILKTYTIPRLIYIADHSEVKTALLETLDQKIRTAVKEWLHLPPCTCDAILYSSTRDGGLGITKLAGLIPSVQARRLHRIAQSSDDTMKCFMEKEKMEQLHKKLWIQAGGDRENIPSIWEAPPSSEPPNNVSTNSEWEAPTQKDKFPKPCNWRKNEFKKWTKLASQGRGIVNFERDKISNHWIQYYRRIPHRKLLTALQLRANVYPTREFLARGRQDQYIKACRHCDADIESCAHIIG

SEQ ID NO: 163 - protein, 1876 aa, synthetic construct
MASCPKPGPPVSAGAMSLESGLTTHSVLAIERGPNSLANSGSDFGGGGLGLPLRLLRVSVGTQTSRSDWVDLVSWSHPGPTSKSQQVDLVSLFPKHRVDLLSKNDQVDLVAQFLPSKFPPNLAENDLALLVNLEFYRSDLHVYECVHFAAHWEGLSGLPEVYEQLAPQPCVGETLHSSLPRDSELFVPEEGSSEKESEDAPKTSPPTPGKHGLEQTGEEKVMVTVPDKNPPCPCCGTRVNSVLNLIEHLKVSHGKRGVCFRCAKCGKENSNYHSVVCHFPKCRGPETEKAPAGEWICEVCNRDFTTKIGLGQHKRLAHPAVRNQERIVASQPKETSNRGAHKRCWTKEEEELLIRLEAQFEGNKNINKLIAEHITTKTAKQISDKRRLLSRKPAEEPREEPGTCHHTRRAAASLRTEPEMSHHAQAEDRDNGPGRRPLPGRAAAGGRTMDEIRRHPDKGNGQQRPTKQKSEEQLQAYYKKTLEERLSAGALNTFPRAFKQVMEGRDIKLVINQTAQDCFGCLESISQIRTATRDKKDTVTREKHPKKPFQKWMKDRAIKKGNYLRFQRLFYLDRGKLAKIILDDIECLSCDIPLSEIYSVFKTRWETTGSFKSLGDFKTYGKADNTAFRELITAKEIEKNVQEMSKGSAPGPDGITLGDVVKMDPEFSRTMEIFNLWLTTGKIPDMVRGCRTVLIPKSSKPDRLKDINNWRPITIGSILLRLFSRIVTARLSKACPLNPRQRGFIRAAGCSENLKLLQTIIWSAKREHRPLGVVFVDIAKAFDTVSHQHIIHALQQREVDPHIVGLVSNMYENISTYITTKRNTHTDKIQIRVGVKQGDPMSPLLFNLAMDPLLCKLEESGKGYHRGQSSITAMAFADDLVLLSDSWENMNTNISILETFCNLTGLKTQGQKCHGFYIKPTKDSYTINDCAAWTINGTPLNMIDPGESEKYLGLQFDPWIGIARSGLSTKLDFWLQRIDQAPLKPLQKTDILKTYTIPRLIYIADHSEVKTALLETLDQKIRTAVKEWLHLPPCTCDAILYSSTRDGGLGITKLAGLIPSVQARRLHRIAQSSDDTMKCFMEKEKMEQLHKKLWIQAGGDRENIPSIWEAPPSSEPPNNVSTNSEWEAPTQKDKFPKPCNWRKNEFKKWTKLASQGRGIVNFERDKISNHWIQYYRRIPHRKLLTALQLRANVYPTREFLARGRQDQYIKACRHCDADIESCAHIIGRLKKLDKPTLHTCNKTSFAKAFLPNETYRQRLLDYIAIIHQLADHASHALKFYILSTSTSSFPVVHEDTIEAILYLLNKGEAWHPRKEAKKAWRDCLLPYVQRYCQIVGFIHPNLRGEQQSINYLTVSMMTNLKVNVQEHFMQMLLRYINLRFDVKGQKQRLPPKSDARKAFFTRLRYLKSVFLFDVVPELEFLDDLTPLESEVLEEIWSLDLPFLPNDPLAYAIVADPMSFFPAYCKLSGLYEQYGFQRFSAIPLRRSLIQSHVRIDTIILYQHILCITRRDAETVEKDDLWMRVCNLCTKAFRSRCGMHFEGSITTDGASVSVYLKHPEADKYGKRGARKSANTVAAEVKALYVENNLPACRAAENVVVIDPNKRDILYCQDSNGTTFRYTANQRAVETGSRRFAKRREAMKEEAGVDLIESRIPSHKTMNLMDFTRYLLVRRADWDRRKEFYSHPAHTRWKWHSFINRQKSESDLISNMRNKYGENFTVVMGDWSDAGRTARFQTSSKTKGWRTLFKRNRIDCFLLDEYKTSSVCPRCSSSEFVEKKFKTRPHSRPWRRREGKIEKVHGLLGCTNPNCLQQAWTSGMRYWNRDMLSTCNMLLIVRSMLDGHGRPEVFSRSVPAVASGGSKRTADGSEFEPKKKRKV

SEQ ID NO: 164 - protein, 2072 aa, synthetic construct
MASCPKPGPPVSAGAMSLESGLTTHSVLAIERGPNSLANSGSDFGGGGLGLPLRLLRVSVGTQTSRSDWVDLVSWSHPGPTSKSQQVDLVSLFPKHRVDLLSKNDQVDLVAQFLPSKFPPNLAENDLALLVNLEFYRSDLHVYECVHFAAHWEGLSGLPEVYEQLAPQPCVGETLHSSLPRDSELFVPEEGSSEKESEDAPKTSPPTPGKHGLEQTGEEKVMVTVPDKNPPCPCCGTRVNSVLNLIEHLKVSHGKRGVCFRCAKCGKENSNYHSVVCHFPKCRGPETEKAPAGEWICEVCNRDFTTKIGLGQHKRLAHPAVRNQERIVASQPKETSNRGAHKRCWTKEEEELLIRLEAQFEGNKNINKLIAEHITTKTAKQISDKRRLLSRKPAEEPREEPGTCHHTRRAAASLRTEPEMSHHAQAEDRDNGPGRRPLPGRAAAGGRTMDEIRRHPDKGNGQQRPTKQKSEEQLQAYYKKTLEERLSAGALNTFPRAFKQVMEGRDIKLVINQTAQDCFGCLESISQIRTATRDKKDTVTREKHPKKPFQKWMKDRAIKKGNYLRFQRLFYLDRGKLAKIILDDIECLSCDIPLSEIYSVFKTRWETTGSFKSLGDFKTYGKADNTAFRELITAKEIEKNVQEMSKGSAPGPDGITLGDVVKMDPEFSRTMEIFNLWLTTGKIPDMVRGCRTVLIPKSSKPDRLKDINNWRPITIGSILLRLFSRIVTARLSKACPLNPRQRGFIRAAGCSENLKLLQTIIWSAKREHRPLGVVFVDIAKAFDTVSHQHIIHALQQREVDPHIVGLVSNMYENISTYITTKRNTHTDKIQIRVGVKQGDPMSPLLFNLAMDPLLCKLEESGKGYHRGQSSITAMAFADDLVLLSDSWENMNTNISILETFCNLTGLKTQGQKCHGFYIKPTKDSYTINDCAAWTINGTPLNMIDPGESEKYLGLQFDPWIGIARSGLSTKLDFWLQRIDQAPLKPLQKTDILKTYTIPRLIYIADHSEVKTALLETLDQKIRTAVKEWLHLPPCTCDAILYSSTRDGGLGITKLAGLIPSVQARRLHRIAQSSDDTMKCFMEKEKMEQLHKKLWIQAGGDRENIPSIWEAPPSSEPPNNVSTNSEWEAPTQKDKFPKPCNWRKNEFKKWTKLASQGRGIVNFERDKISNHWIQYYRRIPHRKLLTALQLRANVYPTREFLARGRQDQYIKACRHCDADIESCAHIIGNCPVTQDARIKRHNYICELLLEEAKKKDWVVFKEPHIRDSNKELYKPDLIFVKDARALVVDVTVRYEAAKSSLEEAAAEAVRKYKHLETEVRHLTNAKDVTFVGFPLGARGKWHQDNFKLLTELGLSKSRQVKMAETFSTVALFSSVDIVHMFASRARKSMVMSGGSSGGSSGSETPGTSESATPESSGGSSGGSSRLKKLDKPTLHTCNKTSFAKAFLPNETYRQRLLDYIAIIHQLADHASHALKFYILSTSTSSFPVVHEDTIEAILYLLNKGEAWHPRKEAKKAWRDCLLPYVQRYCQIVGFIHPNLRGEQQSINYLTVSMMTNLKVNVQEHFMQMLLRYINLRFDVKGQKQRLPPKSDARKAFFTRLRYLKSVFLFDVVPELEFLDDLTPLESEVLEEIWSLDLPFLPNDPLAYAIVADPMSFFPAYCKLSGLYEQYGFQRFSAIPLRRSLIQSHVRIDTIILYQHILCITRRDAETVEKDDLWMRVCNLCTKAFRSRCGMHFEGSITTDGASVSVYLKHPEADKYGKRGARKSANTVAAEVKALYVENNLPACRAAENVVVIDPNKRDILYCQDSNGTTFRYTANQRAVETGSRRFAKRREAMKEEAGVDLIESRIPSHKTMNLMDFTRYLLVRRADWDRRKEFYSHPAHTRWKWHSFINRQKSESDLISNMRNKYGENFTVVMGDWSDAGRTARFQTSSKTKGWRTLFKRNRIDCFLLDEYKTSSVCPRCSSSEFVEKKFKTRPHSRPWRRREGKIEKVHGLLGCTNPNCLQQAWTSGMRYWNRDMLSTCNMLLIVRSMLDGHGRPEVFSRSVPAVASGGSKRTADGSEFEPKKKRKV

SEQ ID NO: 165 - protein, 2069 aa, synthetic construct
MKRTADGSEFESPKKKRKVRLKKLDKPTLHTCNKTSFAKAFLPNETYRQRLLDYIAIIHQLADHASHALKFYILSTSTSSFPVVHEDTIEAILYLLNKGEAWHPRKEAKKAWRDCLLPYVQRYCQIVGFIHPNLRGEQQSINYLTVSMMTNLKVNVQEHFMQMLLRYINLRFDVKGQKQRLPPKSDARKAFFTRLRYLKSVFLFDVVPELEFLDDLTPLESEVLEEIWSLDLPFLPNDPLAYAIVADPMSFFPAYCKLSGLYEQYGFQRFSAIPLRRSLIQSHVRIDTIILYQHILCITRRDAETVEKDDLWMRVCNLCTKAFRSRCGMHFEGSITTDGASVSVYLKHPEADKYGKRGARKSANTVAAEVKALYVENNLPACRAAENVVVIDPNKRDILYCQDSNGTTFRYTANQRAVETGSRRFAKRREAMKEEAGVDLIESRIPSHKTMNLMDFTRYLLVRRADWDRRKEFYSHPAHTRWKWHSFINRQKSESDLISNMRNKYGENFTVVMGDWSDAGRTARFQTSSKTKGWRTLFKRNRIDCFLLDEYKTSSVCPRCSSSEFVEKKFKTRPHSRPWRRREGKIEKVHGLLGCTNPNCLQQAWTSGMRYWNRAMLSTCNMLLIVRSMLDGHGRPEVFSRSVPAVASGGSSGGSSGSETPGTSESATPESSGGSSGGSSASCPKPGPPVSAGAMSLESGLTTHSVLAIERGPNSLANSGSDFGGGGLGLPLRLLRVSVGTQTSRSDWVDLVSWSHPGPTSKSQQVDLVSLFPKHRVDLLSKNDQVDLVAQFLPSKFPPNLAENDLALLVNLEFYRSDLHVYECVHFAAHWEGLSGLPEVYEQLAPQPCVGETLHSSLPRDSELFVPEEGSSEKESEDAPKTSPPTPGKHGLEQTGEEKVMVTVPDKNPPCPCCGTRVNSVLNLIEHLKVSHGKRGVCFRCAKCGKENSNYHSVVCHFPKCRGPETEKAPAGEWICEVCNRDFTTKIGLGQHKRLAHPAVRNQERIVASQPKETSNRGAHKRCWTKEEEELLIRLEAQFEGNKNINKLIAEHITTKTAKQISDKRRLLSRKPAEEPREEPGTCHHTRRAAASLRTEPEMSHHAQAEDRDNGPGRRPLPGRAAAGGRTMDEIRRHPDKGNGQQRPTKQKSEEQLQAYYKKTLEERLSAGALNTFPRAFKQVMEGRDIKLVINQTAQDCFGCLESISQIRTATRDKKDTVTREKHPKKPFQKWMKDRAIKKGNYLRFQRLFYLDRGKLAKIILDDIECLSCDIPLSEIYSVFKTRWETTGSFKSLGDFKTYGKADNTAFRELITAKEIEKNVQEMSKGSAPGPDGITLGDVVKMDPEFSRTMEIFNLWLTTGKIPDMVRGCRTVLIPKSSKPDRLKDINNWRPITIGSILLRLFSRIVTARLSKACPLNPRQRGFIRAAGCSENLKLLQTIIWSAKREHRPLGVVFVDIAKAFDTVSHQHIIHALQQREVDPHIVGLVSNMYENISTYITTKRNTHTDKIQIRVGVKQGDPMSPLLFNLAMDPLLCKLEESGKGYHRGQSSITAMAFADDLVLLSDSWENMNTNISILETFCNLTGLKTQGQKCHGFYIKPTKDSYTINDCAAWTINGTPLNMIDPGESEKYLGLQFDPWIGIARSGLSTKLDFWLQRIDQAPLKPLQKTDILKTYTIPRLIYIADHSEVKTALLETLDQKIRTAVKEWLHLPPCTCDAILYSSTRDGGLGITKLAGLIPSVQARRLHRIAQSSDDTMKCFMEKEKMEQLHKKLWIQAGGDRENIPSIWEAPPSSEPPNNVSTNSEWEAPTQKDKFPKPCNWRKNEFKKWTKLASQGRGIVNFERDKISNHWIQYYRRIPHRKLLTALQLRANVYPTREFLARGRQDQYIKACRHCDADIESCAHIIGNCPVTQDARIKRHNYICELLLEEAKKKDWVVFKEPHIRDSNKELYKPDLIFVKDARALVVDVTVRYEAAKSSLEEAAAEKVRKYKHLETEVRHLTNAKDVTFVGFPLGARGKWHQDNFKLLTELGLSKSRQVKMAETFSTVALFSSVDIVHMFASRARKSMVM

SEQ ID NO: 166 - protein, 1600 aa, synthetic construct
MKRTADGSEFESPKKKRKVRLKKLDKPTLHTCNKTSFAKAFLPNETYRQRLLDYIAIIHQLADHASHALKFYILSTSTSSFPVVHEDTIEAILYLLNKGEAWHPRKEAKKAWRDCLLPYVQRYCQIVGFIHPNLRGEQQSINYLTVSMMTNLKVNVQEHFMQMLLRYINLRFDVKGQKQRLPPKSDARKAFFTRLRYLKSVFLFDVVPELEFLDDLTPLESEVLEEIWSLDLPFLPNDPLAYAIVADPMSFFPAYCKLSGLYEQYGFQRFSAIPLRRSLIQSHVRIDTIILYQHILCITRRDAETVEKDDLWMRVCNLCTKAFRSRCGMHFEGSITTDGASVSVYLKHPEADKYGKRGARKSANTVAAEVKALYVENNLPACRAAENVVVIDPNKRDILYCQDSNGTTFRYTANQRAVETGSRRFAKRREAMKEEAGVDLIESRIPSHKTMNLMDFTRYLLVRRADWDRRKEFYSHPAHTRWKWHSFINRQKSESDLISNMRNKYGENFTVVMGDWSDAGRTARFQTSSKTKGWRTLFKRNRIDCFLLDEYKTSSVCPRCSSSEFVEKKFKTRPHSRPWRRREGKIEKVHGLLGCTNPNCLQQAWTSGMRYWNRAMLSTCNMLLIVRSMLDGHGRPEVFSRSVPAVASGGSSGGSSGSETPGTSESATPESSGGSSGGSSEEQLQAYYKKTLEERLSAGALNTFPRAFKQVMEGRDIKLVINQTAQDCFGCLESISQIRTATRDKKDTVTREKHPKKPFQKWMKDRAIKKGNYLRFQRLFYLDRGKLAKIILDDIECLSCDIPLSEIYSVFKTRWETTGSFKSLGDFKTYGKADNTAFRELITAKEIEKNVQEMSKGSAPGPDGITLGDVVKMDPEFSRTMEIFNLWLTTGKIPDMVRGCRTVLIPKSSKPDRLKDINNWRPITIGSILLRLFSRIVTARLSKACPLNPRQRGFIRAAGCSENLKLLQTIIWSAKREHRPLGVVFVDIAKAFDTVSHQHIIHALQQREVDPHIVGLVSNMYENISTYITTKRNTHTDKIQIRVGVKQGDPMSPLLFNLAMDPLLCKLEESGKGYHRGQSSITAMAFADDLVLLSDSWENMNTNISILETFCNLTGLKTQGQKCHGFYIKPTKDSYTINDCAAWTINGTPLNMIDPGESEKYLGLQFDPWIGIARSGLSTKLDFWLQRIDQAPLKPLQKTDILKTYTIPRLIYIADHSEVKTALLETLDQKIRTAVKEWLHLPPCTCDAILYSSTRDGGLGITKLAGLIPSVQARRLHRIAQSSDDTMKCFMEKEKMEQLHKKLWIQAGGDRENIPSIWEAPPSSEPPNNVSTNSEWEAPTQKDKFPKPCNWRKNEFKKWTKLASQGRGIVNFERDKISNHWIQYYRRIPHRKLLTALQLRANVYPTREFLARGRQDQYIKACRHCDADIESCAHIIGNCPVTQDARIKRHNYICELLLEEAKKKDWVVFKEPHIRDSNKELYKPDLIFVKDARALVVDVTVRYEAAKSSLEEAAAEKVRKYKHLETEVRHLTNAKDVTFVGFPLGARGKWHQDNFKLLTELGLSKSRQVKMAETFSTVALFSSVDIVHMFASRARKSMVM

SEQ ID NO: 167 - protein, 1600 aa, synthetic construct
MKRTADGSEFESPKKKRKVRLKKLDKPTLHTCNKTSFAKAFLPNETYRQRLLDYIAIIHQLADHASHALKFYILSTSTSSFPVVHEDTIEAILYLLNKGEAWHPRKEAKKAWRDCLLPYVQRYCQIVGFIHPNLRGEQQSINYLTVSMMTNLKVNVQEHFMQMLLRYINLRFDVKGQKQRLPPKSDARKAFFTRLRYLKSVFLFDVVPELEFLDDLTPLESEVLEEIWSLDLPFLPNDPLAYAIVADPMSFFPAYCKLSGLYEQYGFQRFSAIPLRRSLIQSHVRIDTIILYQHILCITRRDAETVEKDDLWMRVCNLCTKAFRSRCGMHFEGSITTDGASVSVYLKHPEADKYGKRGARKSANTVAAEVKALYVENNLPACRAAENVVVIDPNKRDILYCQDSNGTTFRYTANQRAVETGSRRFAKRREAMKEEAGVDLIESRIPSHKTMNLMDFTRYLLVRRADWDRRKEFYSHPAHTRWKWHSFINRQKSESDLISNMRNKYGENFTVVMGDWSDAGRTARFQTSSKTKGWRTLFKRNRIDCFLLDEYKTSSVCPRCSSSEFVEKKFKTRPHSRPWRRREGKIEKVHGLLGCTNPNCLQQAWTSGMRYWNRDMLSTCNMLLIVRSMLDGHGRPEVFSRSVPAVASGGSSGGSSGSETPGTSESATPESSGGSSGGSSEEQLQAYYKKTLEERLSAGALNTFPRAFKQVMEGRDIKLVINQTAQDCFGCLESISQIRTATRDKKDTVTREKHPKKPFQKWMKDRAIKKGNYLRFQRLFYLDRGKLAKIILDDIECLSCDIPLSEIYSVFKTRWETTGSFKSLGDFKTYGKADNTAFRELITAKEIEKNVQEMSKGSAPGPDGITLGDVVKMDPEFSRTMEIFNLWLTTGKIPDMVRGCRTVLIPKSSKPDRLKDINNWRPITIGSILLRLFSRIVTARLSKACPLNPRQRGFIRAAGCSENLKLLQTIIWSAKREHRPLGVVFVDIAKAFDTVSHQHIIHALQQREVDPHIVGLVSNMYENISTYITTKRNTHTDKIQIRVGVKQGDPMSPLLFNLAMDPLLCKLEESGKGYHRGQSSITAMAFADDLVLLSDSWENMNTNISILETFCNLTGLKTQGQKCHGFYIKPTKDSYTINDCAAWTINGTPLNMIDPGESEKYLGLQFDPWIGIARSGLSTKLDFWLQRIDQAPLKPLQKTDILKTYTIPRLIYIADHSEVKTALLETLDQKIRTAVKEWLHLPPCTCDAILYSSTRDGGLGITKLAGLIPSVQARRLHRIAQSSDDTMKCFMEKEKMEQLHKKLWIQAGGDRENIPSIWEAPPSSEPPNNVSTNSEWEAPTQKDKFPKPCNWRKNEFKKWTKLASQGRGIVNFERDKISNHWIQYYRRIPHRKLLTALQLRANVYPTREFLARGRQDQYIKACRHCDADIESCAHIIGNCPVTQDARIKRHNYICELLLEEAKKKDWVVFKEPHIRDSNKELYKPDLIFVKDARALVVDVTVRYEAAKSSLEEAAAEKVRKYKHLETEVRHLTNAKDVTFVGFPLGARGKWHQDNFKLLTELGLSKSRQVKMAETFSTVALFSSVDIVHMFASRARKSMVM

SEQ ID NO: 168 - protein, 1600 aa, synthetic construct
MKRTADGSEFESPKKKRKVRLKKLDKPTLHTCNKTSFAKAFLPNETYRQRLLDYIAIIHQLADHASHALKFYILSTSTSSFPVVHEDTIEAILYLLNKGEAWHPRKEAKKAWRDCLLPYVQRYCQIVGFIHPNLRGEQQSINYLTVSMMTNLKVNVQEHFMQMLLRYINLRFDVKGQKQRLPPKSDARKAFFTRLRYLKSVFLFDVVPELEFLDDLTPLESEVLEEIWSLDLPFLPNDPLAYAIVADPMSFFPAYCKLSGLYEQYGFQRFSAIPLRRSLIQSHVRIDTIILYQHILCITRRDAETVEKDDLWMRVCNLCTKAFRSRCGMHFEGSITTDGASVSVYLKHPEADKYGKRGARKSANTVAAEVKALYVENNLPACRAAENVVVIDPNKRDILYCQDSNGTTFRYTANQRAVETGSRRFAKRREAMKEEAGVDLIESRIPSHKTMNLMDFTRYLLVRRADWDRRKEFYSHPAHTRWKWHSFINRQKSESDLISNMRNKYGENFTVVMGDWSDAGRTARFQTSSKTKGWRTLFKRNRIDCFLLDEYKTSSVCPRCSSSEFVEKKFKTRPHSRPWRRREGKIEKVHGLLGCTNPNCLQQAWTSGMRYWNRDMLSTCNMLLIVRSMLDGHGRPEVFSRSVPAVASGGSSGGSSGSETPGTSESATPESSGGSSGGSSEEQLQAYYKKTLEERLSAGALNTFPRAFKQVMEGRDIKLVINQTAQDCFGCLESISQIRTATRDKKDTVTREKHPKKPFQKWMKDRAIKKGNYLRFQRLFYLDRGKLAKIILDDIECLSCDIPLSEIYSVFKTRWETTGSFKSLGDFKTYGKADNTAFRELITAKEIEKNVQEMSKGSAPGPDGITLGDVVKMDPEFSRTMEIFNLWLTTGKIPDMVRGCRTVLIPKSSKPDRLKDINNWRPITIGSILLRLFSRIVTARLSKACPLNPRQRGFIRAAGCSENLKLLQTIIWSAKREHRPLGVVFVDIAKAFDTVSHQHIIHALQQREVDPHIVGLVSNMYENISTYITTKRNTHTDKIQIRVGVKQGDPMSPLLFNLAMDPLLCKLEESGKGYHRGQSSITAMAFADDLVLLSDSWENMNTNISILETFCNLTGLKTQGQKCHGFYIKPTKDSYTINDCAAWTINGTPLNMIDPGESEKYLGLQFDPWIGIARSGLSTKLDFWLQRIDQAPLKPLQKTDILKTYTIPRLIYIADHSEVKTALLETLDQKIRTAVKEWLHLPPCTCDAILYSSTRDGGLGITKLAGLIPSVQARRLHRIAQSSDDTMKCFMEKEKMEQLHKKLWIQAGGDRENIPSIWEAPPSSEPPNNVSTNSEWEAPTQKDKFPKPCNWRKNEFKKWTKLASQGRGIVNFERDKISNHWIQYYRRIPHRKLLTALQLRANVYPTREFLARGRQDQYIKACRHCDADIESCAHIIGNCPVTQDARIKRHNYICELLLEEAKKKDWVVFKEPHIRDSNKELYKPDLIFVKDARALVVDVTVRYEAAKSSLEEAAAEAVRKYKHLETEVRHLTNAKDVTFVGFPLGARGKWHQDNFKLLTELGLSKSRQVKMAETFSTVALFSSVDIVHMFASRARKSMVM

SEQ ID NO: 169 - protein, 2069 aa, synthetic construct
MKRTADGSEFESPKKKRKVRLKKLDKPTLHTCNKTSFAKAFLPNETYRQRLLDYIAIIHQLADHASHALKFYILSTSTSSFPVVHEDTIEAILYLLNKGEAWHPRKEAKKAWRDCLLPYVQRYCQIVGFIHPNLRGEQQSINYLTVSMMTNLKVNVQEHFMQMLLRYINLRFDVKGQKQRLPPKSDARKAFFTRLRYLKSVFLFDVVPELEFLDDLTPLESEVLEEIWSLDLPFLPNDPLAYAIVADPMSFFPAYCKLSGLYEQYGFQRFSAIPLRRSLIQSHVRIDTIILYQHILCITRRDAETVEKDDLWMRVCNLCTKAFRSRCGMHFEGSITTDGASVSVYLKHPEADKYGKRGARKSANTVAAEVKALYVENNLPACRAAENVVVIDPNKRDILYCQDSNGTTFRYTANQRAVETGSRRFAKRREAMKEEAGVDLIESRIPSHKTMNLMDFTRYLLVRRADWDRRKEFYSHPAHTRWKWHSFINRQKSESDLISNMRNKYGENFTVVMGDWSDAGRTARFQTSSKTKGWRTLFKRNRIDCFLLDEYKTSSVCPRCSSSEFVEKKFKTRPHSRPWRRREGKIEKVHGLLGCTNPNCLQQAWTSGMRYWNRDMLSTCNMLLIVRSMLDGHGRPEVFSRSVPAVASGGSSGGSSGSETPGTSESATPESSGGSSGGSSASCPKPGPPVSAGAMSLESGLTTHSVLAIERGPNSLANSGSDFGGGGLGLPLRLLRVSVGTQTSRSDWVDLVSWSHPGPTSKSQQVDLVSLFPKHRVDLLSKNDQVDLVAQFLPSKFPPNLAENDLALLVNLEFYRSDLHVYECVHFAAHWEGLSGLPEVYEQLAPQPCVGETLHSSLPRDSELFVPEEGSSEKESEDAPKTSPPTPGKHGLEQTGEEKVMVTVPDKNPPCPCCGTRVNSVLNLIEHLKVSHGKRGVCFRCAKCGKENSNYHSVVCHFPKCRGPETEKAPAGEWICEVCNRDFTTKIGLGQHKRLAHPAVRNQERIVASQPKETSNRGAHKRCWTKEEEELLIRLEAQFEGNKNINKLIAEHITTKTAKQISDKRRLLSRKPAEEPREEPGTCHHTRRAAASLRTEPEMSHHAQAEDRDNGPGRRPLPGRAAAGGRTMDEIRRHPDKGNGQQRPTKQKSEEQLQAYYKKTLEERLSAGALNTFPRAFKQVMEGRDIKLVINQTAQDCFGCLESISQIRTATRDKKDTVTREKHPKKPFQKWMKDRAIKKGNYLRFQRLFYLDRGKLAKIILDDIECLSCDIPLSEIYSVFKTRWETTGSFKSLGDFKTYGKADNTAFRELITAKEIEKNVQEMSKGSAPGPDGITLGDVVKMDPEFSRTMEIFNLWLTTGKIPDMVRGCRTVLIPKSSKPDRLKDINNWRPITIGSILLRLFSRIVTARLSKACPLNPRQRGFIRAAGCSENLKLLQTIIWSAKREHRPLGVVFVDIAKAFDTVSHQHIIHALQQREVDPHIVGLVSNMYENISTYITTKRNTHTDKIQIRVGVKQGDPMSPLLFNLAMDPLLCKLEESGKGYHRGQSSITAMAFADDLVLLSDSWENMNTNISILETFCNLTGLKTQGQKCHGFYIKPTKDSYTINDCAAWTINGTPLNMIDPGESEKYLGLQFDPWIGIARSGLSTKLDFWLQRIDQAPLKPLQKTDILKTYTIPRLIYIADHSEVKTALLETLDQKIRTAVKEWLHLPPCTCDAILYSSTRDGGLGITKLAGLIPSVQARRLHRIAQSSDDTMKCFMEKEKMEQLHKKLWIQAGGDRENIPSIWEAPPSSEPPNNVSTNSEWEAPTQKDKFPKPCNWRKNEFKKWTKLASQGRGIVNFERDKISNHWIQYYRRIPHRKLLTALQLRANVYPTREFLARGRQDQYIKACRHCDADIESCAHIIGNCPVTQDARIKRHNYICELLLEEAKKKDWVVFKEPHIRDSNKELYKPDLIFVKDARALVVDVTVRYEAAKSSLEEAAAEAVRKYKHLETEVRHLTNAKDVTFVGFPLGARGKWHQDNFKLLTELGLSKSRQVKMAETFSTVALFSSVDIVHMFASRARKSMVM

SEQ ID NO: 170 - protein, 2051 aa, synthetic construct
MASCPKPGPPVSAGAMSLESGLTTHSVLAIERGPNSLANSGSDFGGGGLGLPLRLLRVSVGTQTSRSDWVDLVSWSHPGPTSKSQQVDLVSLFPKHRVDLLSKNDQVDLVAQFLPSKFPPNLAENDLALLVNLEFYRSDLHVYECVHFAAHWEGLSGLPEVYEQLAPQPCVGETLHSSLPRDSELFVPEEGSSEKESEDAPKTSPPTPGKHGLEQTGEEKVMVTVPDKNPPCPCCGTRVNSVLNLIEHLKVSHGKRGVCFRCAKCGKENSNYHSVVCHFPKCRGPETEKAPAGEWICEVCNRDFTTKIGLGQHKRLAHPAVRNQERIVASQPKETSNRGAHKRCWTKEEEELLIRLEAQFEGNKNINKLIAEHITTKTAKQISDKRRLLSRKPAEEPREEPGTCHHTRRAAASLRTEPEMSHHAQAEDRDNGPGRRPLPGRAAAGGRTMDEIRRHPDKGNGQQRPTKQKSEEQLQAYYKKTLEERLSAGALNTFPRAFKQVMEGRDIKLVINQTAQDCFGCLESISQIRTATRDKKDTVTREKHPKKPFQKWMKDRAIKKGNYLRFQRLFYLDRGKLAKIILDDIECLSCDIPLSEIYSVFKTRWETTGSFKSLGDFKTYGKADNTAFRELITAKEIEKNVQEMSKGSAPGPDGITLGDVVKMDPEFSRTMEIFNLWLTTGKIPDMVRGCRTVLIPKSSKPDRLKDINNWRPITIGSILLRLFSRIVTARLSKACPLNPRQRGFIRAAGCSENLKLLQTIIWSAKREHRPLGVVFVDIAKAFDTVSHQHIIHALQQREVDPHIVGLVSNMYENISTYITTKRNTHTDKIQIRVGVKQGDPMSPLLFNLAMDPLLCKLEESGKGYHRGQSSITAMAFADDLVLLSDSWENMNTNISILETFCNLTGLKTQGQKCHGFYIKPTKDSYTINDCAAWTINGTPLNMIDPGESEKYLGLQFDPWIGIARSGLSTKLDFWLQRIDQAPLKPLQKTDILKTYTIPRLIYIADHSEVKTALLETLDQKIRTAVKEWLHLPPCTCDAILYSSTRDGGLGITKLAGLIPSVQARRLHRIAQSSDDTMKCFMEKEKMEQLHKKLWIQAGGDRENIPSIWEAPPSSEPPNNVSTNSEWEAPTQKDKFPKPCNWRKNEFKKWTKLASQGRGIVNFERDKISNHWIQYYRRIPHRKLLTALQLRANVYPTREFLARGRQDQYIKACRHCDADIESCAHIIGNCPVTQDARIKRHNYICELLLEEAKKKDWVVFKEPHIRDSNKELYKPDLIFVKDARALVVDVTVRYEAAKSSLEEAAAEKVRKYKHLETEVRHLTNAKDVTFVGFPLGARGKWHQDNFKLLTELGLSKSRQVKMAETFSTVALFSSVDIVHMFASRARKSMVMSGGSSGGSSGSETPGTSESATPESSGGSSGGSSRLKKLDKPTLHTCNKTSFAKAFLPNETYRQRLLDYIAIIHQLADHASHALKFYILSTSTSSFPVVHEDTIEAILYLLNKGEAWHPRKEAKKAWRDCLLPYVQRYCQIVGFIHPNLRGEQQSINYLTVSMMTNLKVNVQEHFMQMLLRYINLRFDVKGQKQRLPPKSDARKAFFTRLRYLKSVFLFDVVPELEFLDDLTPLESEVLEEIWSLDLPFLPNDPLAYAIVADPMSFFPAYCKLSGLYEQYGFQRFSAIPLRRSLIQSHVRIDTIILYQHILCITRRDAETVEKDDLWMRVCNLCTKAFRSRCGMHFEGSITTDGASVSVYLKHPEADKYGKRGARKSANTVAAEVKALYVENNLPACRAAENVVVIDPNKRDILYCQDSNGTTFRYTANQRAVETGSRRFAKRREAMKEEAGVDLIESRIPSHKTMNLMDFTRYLLVRRADWDRRKEFYSHPAHTRWKWHSFINRQKSESDLISNMRNKYGENFTVVMGDWSDAGRTARFQTSSKTKGWRTLFKRNRIDCFLLDEYKTSSVCPRCSSSEFVEKKFKTRPHSRPWRRREGKIEKVHGLLGCTNPNCLQQAWTSGMRYWNRDMLSTCNMLLIVRSMLDGHGRPEVFSRSVPAVA

SEQ ID NO: 171 - protein, 2051 aa, synthetic construct
MASCPKPGPPVSAGAMSLESGLTTHSVLAIERGPNSLANSGSDFGGGGLGLPLRLLRVSVGTQTSRSDWVDLVSWSHPGPTSKSQQVDLVSLFPKHRVDLLSKNDQVDLVAQFLPSKFPPNLAENDLALLVNLEFYRSDLHVYECVHFAAHWEGLSGLPEVYEQLAPQPCVGETLHSSLPRDSELFVPEEGSSEKESEDAPKTSPPTPGKHGLEQTGEEKVMVTVPDKNPPCPCCGTRVNSVLNLIEHLKVSHGKRGVCFRCAKCGKENSNYHSVVCHFPKCRGPETEKAPAGEWICEVCNRDFTTKIGLGQHKRLAHPAVRNQERIVASQPKETSNRGAHKRCWTKEEEELLIRLEAQFEGNKNINKLIAEHITTKTAKQISDKRRLLSRKPAEEPREEPGTCHHTRRAAASLRTEPEMSHHAQAEDRDNGPGRRPLPGRAAAGGRTMDEIRRHPDKGNGQQRPTKQKSEEQLQAYYKKTLEERLSAGALNTFPRAFKQVMEGRDIKLVINQTAQDCFGCLESISQIRTATRDKKDTVTREKHPKKPFQKWMKDRAIKKGNYLRFQRLFYLDRGKLAKIILDDIECLSCDIPLSEIYSVFKTRWETTGSFKSLGDFKTYGKADNTAFRELITAKEIEKNVQEMSKGSAPGPDGITLGDVVKMDPEFSRTMEIFNLWLTTGKIPDMVRGCRTVLIPKSSKPDRLKDINNWRPITIGSILLRLFSRIVTARLSKACPLNPRQRGFIRAAGCSENLKLLQTIIWSAKREHRPLGVVFVDIAKAFDTVSHQHIIHALQQREVDPHIVGLVSNMYENISTYITTKRNTHTDKIQIRVGVKQGDPMSPLLFNLAMDPLLCKLEESGKGYHRGQSSITAMAFADDLVLLSDSWENMNTNISILETFCNLTGLKTQGQKCHGFYIKPTKDSYTINDCAAWTINGTPLNMIDPGESEKYLGLQFDPWIGIARSGLSTKLDFWLQRIDQAPLKPLQKTDILKTYTIPRLIYIADHSEVKTALLETLDQKIRTAVKEWLHLPPCTCDAILYSSTRDGGLGITKLAGLIPSVQARRLHRIAQSSDDTMKCFMEKEKMEQLHKKLWIQAGGDRENIPSIWEAPPSSEPPNNVSTNSEWEAPTQKDKFPKPCNWRKNEFKKWTKLASQGRGIVNFERDKISNHWIQYYRRIPHRKLLTALQLRANVYPTREFLARGRQDQYIKACRHCDADIESCAHIIGNCPVTQDARIKRHNYICELLLEEAKKKDWVVFKEPHIRDSNKELYKPDLIFVKDARALVVDVTVRYEAAKSSLEEAAAEKVRKYKHLETEVRHLTNAKDVTFVGFPLGARGKWHQDNFKLLTELGLSKSRQVKMAETFSTVALFSSVDIVHMFASRARKSMVMSGGSSGGSSGSETPGTSESATPESSGGSSGGSSRLKKLDKPTLHTCNKTSFAKAFLPNETYRQRLLDYIAIIHQLADHASHALKFYILSTSTSSFPVVHEDTIEAILYLLNKGEAWHPRKEAKKAWRDCLLPYVQRYCQIVGFIHPNLRGEQQSINYLTVSMMTNLKVNVQEHFMQMLLRYINLRFDVKGQKQRLPPKSDARKAFFTRLRYLKSVFLFDVVPELEFLDDLTPLESEVLEEIWSLDLPFLPNDPLAYAIVADPMSFFPAYCKLSGLYEQYGFQRFSAIPLRRSLIQSHVRIDTIILYQHILCITRRDAETVEKDDLWMRVCNLCTKAFRSRCGMHFEGSITTDGASVSVYLKHPEADKYGKRGARKSANTVAAEVKALYVENNLPACRAAENVVVIDPNKRDILYCQDSNGTTFRYTANQRAVETGSRRFAKRREAMKEEAGVDLIESRIPSHKTMNLMDFTRYLLVRRADWDRRKEFYSHPAHTRWKWHSFINRQKSESDLISNMRNKYGENFTVVMGDWSDAGRTARFQTSSKTKGWRTLFKRNRIDCFLLDEYKTSSVCPRCSSSEFVEKKFKTRPHSRPWRRREGKIEKVHGLLGCTNPNCLQQAWTSGMRYWNRAMLSTCNMLLIVRSMLDGHGRPEVFSRSVPAVA

SEQ ID NO: 172-174 - skipped (3 entries)

SEQ ID NO: 175 - DNA, 2344 bp, synthetic construct
  source 1..2344: mol_type = other DNA
gagtaactatgactctcttaagtctagttacaactgggcatcgctgcagagatcgcacctcctcgtggtcccgctggtagcccttcgaagggtgactaagtcgatctctgccccaggtacggagccgttgggactcaccagtccaacgtaatactcgacggatcgatccgaacaaacgacccaacacccgtgcgttttattctgtctttttattgccgatcccctcagaagaactcgtcaagaaggcgatagaaggcgatgcgctgcgaatcgggagcggcgataccgtaaagcacgaggaagcggtcagcccattcgccgccaagctcttcagcaatatcacgggtagccaacgctatgtcctgatagcggtcggccgctttacttgtacagctcgtccatgccgagagtgatcccggcggcggtcacgaactccagcaggaccatgtgatcgcgcttctcgttggggtctttgctcagggcggactgggtgctcaggtagtggttgtcgggcagcagcacggggccgtcgccgatgggggtgttctgctggtagtggtcggccagctgcacgctgccgtcctcgatgttgtggcggatcttgaagttcaccttgatgccgttcttctgcttgtcggccatgatatagacgttgtggctgttgtagttgtactccagcttgtgccccaggatgttgccgtcctccttgaagtcgatgcccttcagctcgatgcggttcaccagggtgtcgccctcgaacttcacctcggcgcgggtcttgtagttgccgtcgtccttgaagaagatggtgcgctcctggacgtagccttcgggcatggcggacttgaagaagtcgtgctgcttcatgtggtcggggtagcggctgaagcactgcacgccgtaggtcagggtggtcacgagggtgggccagggcacgggcagcttgccggtggtgcagatgaacttcagggtcagcttgccgtaggtggcatcgccctcgccctcgccggacacgctgaacttgtggccgtttacgtcgccgtccagctcgaccaggatgggcaccaccccggtgaacagctcctcgcccttgctcaccatggtggcgaattcgaagcttgagctcgagatctgagtccggtagcgctagcggatctgacggttcactaaaccagctctgcttatatagacctcccaccgtacacgcctaccgcccatttgcgtcaatggggcggagttgttacgacattttggaaagtcccgttgattttggtgccaaaacaaactcccattgacgtcaatggggtggagacttggaaatccccgtgagtcaaaccgctatccacgcccattgatgtactgccaaaaccgcatcaccatggtaatagcgatgactaatacgtagatgtactgccaagtaggaaagtcccataaggtcatgtactgggcataatgccaggcgggccatttaccgtcattgacgtcaatagggggcgtacttggcatatgatacacttgatgtactgccaagtgggcagtttaccgtaaatactccacccattgacgtcaatggaaagtccctattggcgttactatgggaacatacgtcattattgacgtcaatgggcgggggtcgttgggcggtcagccaggcgggccatttaccgtaagttatgtaacgcggaactccatatatgggctatgaactaatgaccccgtaattgattactattaaattcctgcagttcaggttatttagatgcttagtttttgtacctttcttgttttgtttaggattttgatagtgttagtatttttatatttttgtacgattgcataatgttcttttttatacagttctgttttaataaaatagacgatagctagagacgttagggcagccacaagccagttaggtagcggatagtaggtaggaacagacttttactatttcataacgcgtcaattaccacctgatttggaccaattcacgggatttgtccaaggtggacgggccacctttacttaacccggaaaaggaacatatataatttatgtgtgttcgataaatagccaaatgcctcgtcatcaccggtagacatgataagatacattgatgagtttggacaaaccacaactagaatgcagtgaaaaaaatgctttatttgtgaaatttgtgatgctattgctttatttgtaaccattataagctgcaataaacaagttaacaacaacaaaaaaaaaaaaaaaaaaaaaaaaaaaaaaacgttgactaaaaaaaaaaaaaaaaaaaaaaaaaaaaaaaaaaaaaaaaaaaaaaaaaaaaaaaaaaaaaaaaaaaaaa

SEQ ID NO: 176-179 - skipped (4 entries)

SEQ ID NO: 180 - DNA, 2125 bp, synthetic construct
  source 1..2125: mol_type = other DNA
gagtaactatgactctcttaagtctagttacaactgggcatcgctgcagagatcgcacctcctcgtggtcccgctggtagcccttcgaagggtgactaagtcgatctctgccccaggtacggagccgttgggactcaccagtccaacgtaatactcgacggatcgatccgaacaaacgacccaacacccgtgcgttttattctgtctttttattgccgatcccctcagaagaactcgtcaagaaggcgatagaaggcgatgcgctgcgaatcgggagcggcgataccgtaaagcacgaggaagcggtcagcccattcgccgccaagctcttcagcaatatcacgggtagccaacgctatgtcctgatagcggtcggccgctttacttgtacagctcgtccatgccgagagtgatcccggcggcggtcacgaactccagcaggaccatgtgatcgcgcttctcgttggggtctttgctcagggcggactgggtgctcaggtagtggttgtcgggcagcagcacggggccgtcgccgatgggggtgttctgctggtagtggtcggccagctgcacgctgccgtcctcgatgttgtggcggatcttgaagttcaccttgatgccgttcttctgcttgtcggccatgatatagacgttgtggctgttgtagttgtactccagcttgtgccccaggatgttgccgtcctccttgaagtcgatgcccttcagctcgatgcggttcaccagggtgtcgccctcgaacttcacctcggcgcgggtcttgtagttgccgtcgtccttgaagaagatggtgcgctcctggacgtagccttcgggcatggcggacttgaagaagtcgtgctgcttcatgtggtcggggtagcggctgaagcactgcacgccgtaggtcagggtggtcacgagggtgggccagggcacgggcagcttgccggtggtgcagatgaacttcagggtcagcttgccgtaggtggcatcgccctcgccctcgccggacacgctgaacttgtggccgtttacgtcgccgtccagctcgaccaggatgggcaccaccccggtgaacagctcctcgcccttgctcaccatggtggcgaattcgaagcttgagctcgagatctgagtccggtagcgctagcggatctgacggttcactaaaccagctctgcttatatagacctcccaccgtacacgcctaccgcccatttgcgtcaatggggcggagttgttacgacattttggaaagtcccgttgattttggtgccaaaacaaactcccattgacgtcaatggggtggagacttggaaatccccgtgagtcaaaccgctatccacgcccattgatgtactgccaaaaccgcatcaccatggtaatagcgatgactaatacgtagatgtactgccaagtaggaaagtcccataaggtcatgtactgggcataatgccaggcgggccatttaccgtcattgacgtcaatagggggcgtacttggcatatgatacacttgatgtactgccaagtgggcagtttaccgtaaatactccacccattgacgtcaatggaaagtccctattggcgttactatgggaacatacgtcattattgacgtcaatgggcgggggtcgttgggcggtcagccaggcgggccatttaccgtaagttatgtaacgcggaactccatatatgggctatgaactaatgaccccgtaattgattactattaaattcctgcagttcaggttatttagatgcttagtttttgtacctttcttgttttgtttaggattttgatagtgttagtatttttatatttttgtacgattgcataatgttcttttttatacagttctgttttaataaaatagacgatagctagagacgttagggcagccacaagccagttaggtagcggatagtaggtaggaacagacttttactatttcataacgcgtcaattaccacctgatttggaccaattcacgggatttgtccaaggtggacgggccacctttacttaacccggaaaaggaacatatataatttatgtgtgttcgataaatagccaaatgcctcgtcatcatcgcggttctatctagttacgcgttaaaccaact

SEQ ID NO: 181 - DNA, 2148 bp, synthetic construct
  source 1..2148: mol_type = other DNA
gagtaactatgactctcttaagtctagttacaactgggcatcgctgcagagatcgcacctcctcgtggtcccgctggtagcccttcgaagggtgactaagtcgatctctgccccaggtacggagccgttgggactcaccagtccaacgtaatactcgacggatcgatccgaacaaacgacccaacacccgtgcgttttattctgtctttttattgccgatcccctcagaagaactcgtcaagaaggcgatagaaggcgatgcgctgcgaatcgggagcggcgataccgtaaagcacgaggaagcggtcagcccattcgccgccaagctcttcagcaatatcacgggtagccaacgctatgtcctgatagcggtcggccgctttacttgtacagctcgtccatgccgagagtgatcccggcggcggtcacgaactccagcaggaccatgtgatcgcgcttctcgttggggtctttgctcagggcggactgggtgctcaggtagtggttgtcgggcagcagcacggggccgtcgccgatgggggtgttctgctggtagtggtcggccagctgcacgctgccgtcctcgatgttgtggcggatcttgaagttcaccttgatgccgttcttctgcttgtcggccatgatatagacgttgtggctgttgtagttgtactccagcttgtgccccaggatgttgccgtcctccttgaagtcgatgcccttcagctcgatgcggttcaccagggtgtcgccctcgaacttcacctcggcgcgggtcttgtagttgccgtcgtccttgaagaagatggtgcgctcctggacgtagccttcgggcatggcggacttgaagaagtcgtgctgcttcatgtggtcggggtagcggctgaagcactgcacgccgtaggtcagggtggtcacgagggtgggccagggcacgggcagcttgccggtggtgcagatgaacttcagggtcagcttgccgtaggtggcatcgccctcgccctcgccggacacgctgaacttgtggccgtttacgtcgccgtccagctcgaccaggatgggcaccaccccggtgaacagctcctcgcccttgctcaccatggtggcgaattcgaagcttgagctcgagatctgagtccggtagcgctagcggatctgacggttcactaaaccagctctgcttatatagacctcccaccgtacacgcctaccgcccatttgcgtcaatggggcggagttgttacgacattttggaaagtcccgttgattttggtgccaaaacaaactcccattgacgtcaatggggtggagacttggaaatccccgtgagtcaaaccgctatccacgcccattgatgtactgccaaaaccgcatcaccatggtaatagcgatgactaatacgtagatgtactgccaagtaggaaagtcccataaggtcatgtactgggcataatgccaggcgggccatttaccgtcattgacgtcaatagggggcgtacttggcatatgatacacttgatgtactgccaagtgggcagtttaccgtaaatactccacccattgacgtcaatggaaagtccctattggcgttactatgggaacatacgtcattattgacgtcaatgggcgggggtcgttgggcggtcagccaggcgggccatttaccgtaagttatgtaacgcggaactccatatatgggctatgaactaatgaccccgtaattgattactattaaattcctgcagttcaggttatttagatgcttagtttttgtacctttcttgttttgtttaggattttgatagtgttagtatttttatatttttgtacgattgcataatgttcttttttatacagttctgttttaataaaatagacgatagctagagacgttagggcagccacaagccagttaggtagcggatagtaggtaggaacagacttttactatttcataacgcgtcaattaccacctgatttggaccaattcacgggatttgtccaaggtggacgggccacctttacttaacccggaaaaggaacatatataatttatgtgtgttcgataaatagccaaatgcctcgtcatcggaggtcagggtcaggagcccccccctgaacccaggataaccctcaaagtcgggggca

SEQ ID NO: 182 - DNA, 2162 bp, synthetic construct
  source 1..2162: mol_type = other DNA
gagtaactatgactctcttaagtctagttacaactgggcatcgctgcagagatcgcacctcctcgtggtcccgctggtagcccttcgaagggtgactaagtcgatctctgccccaggtacggagccgttgggactcaccagtccaacgtaatactcgacggatcgatccgaacaaacgacccaacacccgtgcgttttattctgtctttttattgccgatcccctcagaagaactcgtcaagaaggcgatagaaggcgatgcgctgcgaatcgggagcggcgataccgtaaagcacgaggaagcggtcagcccattcgccgccaagctcttcagcaatatcacgggtagccaacgctatgtcctgatagcggtcggccgctttacttgtacagctcgtccatgccgagagtgatcccggcggcggtcacgaactccagcaggaccatgtgatcgcgcttctcgttggggtctttgctcagggcggactgggtgctcaggtagtggttgtcgggcagcagcacggggccgtcgccgatgggggtgttctgctggtagtggtcggccagctgcacgctgccgtcctcgatgttgtggcggatcttgaagttcaccttgatgccgttcttctgcttgtcggccatgatatagacgttgtggctgttgtagttgtactccagcttgtgccccaggatgttgccgtcctccttgaagtcgatgcccttcagctcgatgcggttcaccagggtgtcgccctcgaacttcacctcggcgcgggtcttgtagttgccgtcgtccttgaagaagatggtgcgctcctggacgtagccttcgggcatggcggacttgaagaagtcgtgctgcttcatgtggtcggggtagcggctgaagcactgcacgccgtaggtcagggtggtcacgagggtgggccagggcacgggcagcttgccggtggtgcagatgaacttcagggtcagcttgccgtaggtggcatcgccctcgccctcgccggacacgctgaacttgtggccgtttacgtcgccgtccagctcgaccaggatgggcaccaccccggtgaacagctcctcgcccttgctcaccatggtggcgaattcgaagcttgagctcgagatctgagtccggtagcgctagcggatctgacggttcactaaaccagctctgcttatatagacctcccaccgtacacgcctaccgcccatttgcgtcaatggggcggagttgttacgacattttggaaagtcccgttgattttggtgccaaaacaaactcccattgacgtcaatggggtggagacttggaaatccccgtgagtcaaaccgctatccacgcccattgatgtactgccaaaaccgcatcaccatggtaatagcgatgactaatacgtagatgtactgccaagtaggaaagtcccataaggtcatgtactgggcataatgccaggcgggccatttaccgtcattgacgtcaatagggggcgtacttggcatatgatacacttgatgtactgccaagtgggcagtttaccgtaaatactccacccattgacgtcaatggaaagtccctattggcgttactatgggaacatacgtcattattgacgtcaatgggcgggggtcgttgggcggtcagccaggcgggccatttaccgtaagttatgtaacgcggaactccatatatgggctatgaactaatgaccccgtaattgattactattaaattcctgcagttcaggttatttagatgcttagtttttgtacctttcttgttttgtttaggattttgatagtgttagtatttttatatttttgtacgattgcataatgttcttttttatacagttctgttttaataaaatagacgatagctagagacgttagggcagccacaagccagttaggtagcggatagtaggtaggaacagacttttactatttcataacgcgtcaattaccacctgatttggaccaattcacgggatttgtccaaggtggacgggccacctttacttaacccggaaaaggaacatatataatttatgtgtgttcgataaatagccaaatgcctcgtcatcggaaggtttttcttttcctgaggcgaaagtctcaggttttgctttttggcctttcttaaaaaaaaaaaaagc

SEQ ID NO: 183-189 - skipped (7 entries)

SEQ ID NO: 190 - DNA, 3505 bp, synthetic construct
  source 1..3505: mol_type = other DNA
gagtaactatgactctcttaagtctagttacaactgggcatcgctgcagagatcgcacctcctcgtggtcccgctggtagcccttcgaagggtgactaagtcgatctctgccccaggtacggagccgttgggactcaccagtccaacgtaactcctgcctaaattcggtgaaacaaattcctcggtaaaaagccccatggccaagggcaagcgccgcaacctgaccaaccgcaaccaggaccacagccccagccccgagcccagcacccccaccagccccagccccggcaaccccaacacccccgagaacctggacctggacctgaaggcctacctgatgatgatggtggaggacatcaagaaggacttcaacaagagcctgaaggagatccaggagaacaccgccaaggagctgcaggtgctgaaggagaagcaggagaacaccatcaagcaggtggaggtgctgaccgagaaggaggagaaaacctacaagcaggtgatggagatgaacaagaccatcctggacctgaagcgcgaggtcgacaccatcaagaaaacccagagcgaggccaccctggagatcgagaccctgggcaagaagagcggcaccatcgacctgagcatcagcaaccgcatccaggagatggaggagcgcatcagcggcgccgaggacagcatcgagaacatcggcaccaccatcaaggagaacggcaagtgcaagaagatcctgacccagaacatccaggagatccaggacaccatccgccgccccaacgtgcgcatcatcggcgtggacgagaacgaggacttccagctgaagggccccgccaacatcttcaacaagatcatcgaggagaacttccccaacctgaagaacgagatgcacatgaacatccaggaggcctaccgcacccccaaccgcctggaccagaagcgcaacagctctagacacatcatcatccgcaccagcaacgccctgaacaaggaccgcatcctgaaggccgtgcgcgagaagggccaggtgacctacaagggcaagcccatccgcatcacccccgacttcagccccgagaccatgaaggccgccgccgcctggaccgacgtgatccagaccctgcgcgagcacaagctgcagccccgcctgctgtaccccgccaagctgagcatcatcatcgagggcgagaccaaggtgttccacgacaagaccaagttcacccactacctgagcaccaaccccgccctgcagcgcatcatcaccgagaagaaccagtacaagaacggcaacaacgccctggagaaaacccgccgctaatactcgacggatcgatccgaacaaacgacccaacacccgtgcgttttattctgtctttttattgccgatcccctcagaagaactcgtcaagaaggcgatagaaggcgatgcgctgcgaatcgggagcggcgataccgtaaagcacgaggaagcggtcagcccattcgccgccaagctcttcagcaatatcacgggtagccaacgctatgtcctgatagcggtcggccgctttacttgtacagctcgtccatgccgagagtgatcccggcggcggtcacgaactccagcaggaccatgtgatcgcgcttctcgttggggtctttgctcagggcggactgggtgctcaggtagtggttgtcgggcagcagcacggggccgtcgccgatgggggtgttctgctggtagtggtcggccagctgcacgctgccgtcctcgatgttgtggcggatcttgaagttcaccttgatgccgttcttctgcttgtcggccatgatatagacgttgtggctgttgtagttgtactccagcttgtgccccaggatgttgccgtcctccttgaagtcgatgcccttcagctcgatgcggttcaccagggtgtcgccctcgaacttcacctcggcgcgggtcttgtagttgccgtcgtccttgaagaagatggtgcgctcctggacgtagccttcgggcatggcggacttgaagaagtcgtgctgcttcatgtggtcggggtagcggctgaagcactgcacgccgtaggtcagggtggtcacgagggtgggccagggcacgggcagcttgccggtggtgcagatgaacttcagggtcagcttgccgtaggtggcatcgccctcgccctcgccggacacgctgaacttgtggccgtttacgtcgccgtccagctcgaccaggatgggcaccaccccggtgaacagctcctcgcccttgctcaccatggtggcgaattcgaagcttgagctcgagatctgagtccggtagcgctagcggatctgacggttcactaaaccagctctgcttatatagacctcccaccgtacacgcctaccgcccatttgcgtcaatggggcggagttgttacgacattttggaaagtcccgttgattttggtgccaaaacaaactcccattgacgtcaatggggtggagacttggaaatccccgtgagtcaaaccgctatccacgcccattgatgtactgccaaaaccgcatcaccatggtaatagcgatgactaatacgtagatgtactgccaagtaggaaagtcccataaggtcatgtactgggcataatgccaggcgggccatttaccgtcattgacgtcaatagggggcgtacttggcatatgatacacttgatgtactgccaagtgggcagtttaccgtaaatactccacccattgacgtcaatggaaagtccctattggcgttactatgggaacatacgtcattattgacgtcaatgggcgggggtcgttgggcggtcagccaggcgggccatttaccgtaagttatgtaacgcggaactccatatatgggctatgaactaatgaccccgtaattgattactattaaattcctgcagttcaggttatttagatgcttagtttttgtacctttcttgttttgtttaggattttgatagtgttagtatttttatatttttgtacgattgcataatgttcttttttatacagttctgttttaataaaatagacgatagctagagacgttagggcagccacaagccagttaggtagcggatagtaggtaggaacagacttttactatttcataacgcgtcaattaccacctgatttggaccaattcacgggatttgtccaaggtggacgggccacctttacttaacccggaaaaggaacatatataatttatgtgtgttcgataaatagccaaatgcctcgtcatcaccggtagacatgataagatacattgatgagtttggacaaaccacaactagaatgcagtgaaaaaaatgctttatttgtgaaatttgtgatgctattgctttatttgtaaccattataagctgcaataaacaagttaacaacaacaaaaaaaaaaaaaaaaaaaaaaaaaaaaaaacgttgactaaaaaaaaaaaaaaaaaaaaaaaaaaaaaaaaaaaaaaaaaaaaaaaaaaaaaaaaaaaaaaaaaaaaaa

SEQ ID NO: 191 - DNA, 3298 bp, synthetic construct
  source 1..3298: mol_type = other DNA
gagtaactatgactctcttaagtctagttacaactgggcatcgctgcagagatcgcacctcctcgtggtcccgctggtagcccttcgaagggtgactaagtcgatctctgccccaggtacggagccgttgggactcaccagtccaacgtaactcctgcctaaattcggtgaaacaaattcctcggtaaaaagccccatgtcgcttccgtctctgtccttgtgtgcaggagaagcatcgatggaggcgttggagctggagctggaagaagtggagtcccagatccgcgcgctggtggtaagacggtcgcggctacgggaacggcttctagccgtacctaatgctaaggccgtctcatcacctaaggtacgtggaaattacaaccacatcattccctctacctcaaccccgcgtccttctctgtccaggcccagcgcacccggggcgcggctcagccaggcgtcgttcacgccgacacccggctaccacggcgcctgggtgcagccgcgcaaggtgcttcccagatcccggggcagaacgtctccgcctgtgttcgagatctccacggagaaccgcttctcccctctccgcgagtcgggtcccgatgtggccatcatcggtgactcgatcgttcgtcacgtccgtgccgcctcctcaaaaggtaataaagtacgtactttctgctttcctggtgcccgtgtgaaaaatatttctacacagattccaaccatcctgggcgctgccgagagccctggtgccgttgtcctccacgtggggacaaacgacaccgggctccggcagtcggagatcctgaagaaggacttcaggagcctgatcgagacggttcgacgcacctcgcccgccacgcagatcatcgtttctgggccgcttcctacctaccgccgaggaaatgaaaggttcagtagacttttagctttgaatgaatggctaataacatggtgtaaagaacagaaattgctctttgctaataactggaatcttttctgggagcgtcctaggctcttccgtcctgacggcctgcaccccagtcgagccggagctgaactcctgtcggacaacatctccagactacttcgcaccatctgatactcgacggatcgatccgaacaaacgacccaacacccgtgcgttttattctgtctttttattgccgatcccctcagaagaactcgtcaagaaggcgatagaaggcgatgcgctgcgaatcgggagcggcgataccgtaaagcacgaggaagcggtcagcccattcgccgccaagctcttcagcaatatcacgggtagccaacgctatgtcctgatagcggtcggccgctttacttgtacagctcgtccatgccgagagtgatcccggcggcggtcacgaactccagcaggaccatgtgatcgcgcttctcgttggggtctttgctcagggcggactgggtgctcaggtagtggttgtcgggcagcagcacggggccgtcgccgatgggggtgttctgctggtagtggtcggccagctgcacgctgccgtcctcgatgttgtggcggatcttgaagttcaccttgatgccgttcttctgcttgtcggccatgatatagacgttgtggctgttgtagttgtactccagcttgtgccccaggatgttgccgtcctccttgaagtcgatgcccttcagctcgatgcggttcaccagggtgtcgccctcgaacttcacctcggcgcgggtcttgtagttgccgtcgtccttgaagaagatggtgcgctcctggacgtagccttcgggcatggcggacttgaagaagtcgtgctgcttcatgtggtcggggtagcggctgaagcactgcacgccgtaggtcagggtggtcacgagggtgggccagggcacgggcagcttgccggtggtgcagatgaacttcagggtcagcttgccgtaggtggcatcgccctcgccctcgccggacacgctgaacttgtggccgtttacgtcgccgtccagctcgaccaggatgggcaccaccccggtgaacagctcctcgcccttgctcaccatggtggcgaattcgaagcttgagctcgagatctgagtccggtagcgctagcggatctgacggttcactaaaccagctctgcttatatagacctcccaccgtacacgcctaccgcccatttgcgtcaatggggcggagttgttacgacattttggaaagtcccgttgattttggtgccaaaacaaactcccattgacgtcaatggggtggagacttggaaatccccgtgagtcaaaccgctatccacgcccattgatgtactgccaaaaccgcatcaccatggtaatagcgatgactaatacgtagatgtactgccaagtaggaaagtcccataaggtcatgtactgggcataatgccaggcgggccatttaccgtcattgacgtcaatagggggcgtacttggcatatgatacacttgatgtactgccaagtgggcagtttaccgtaaatactccacccattgacgtcaatggaaagtccctattggcgttactatgggaacatacgtcattattgacgtcaatgggcgggggtcgttgggcggtcagccaggcgggccatttaccgtaagttatgtaacgcggaactccatatatgggctatgaactaatgaccccgtaattgattactattaaattcctgcagttcaggttatttagatgcttagtttttgtacctttcttgttttgtttaggattttgatagtgttagtatttttatatttttgtacgattgcataatgttcttttttatacagttctgttttaataaaatagacgatagctagagacgttagggcagccacaagccagttaggtagcggatagtaggtaggaacagacttttactatttcataacgcgtcaattaccacctgatttggaccaattcacgggatttgtccaaggtggacgggccacctttacttaacccggaaaaggaacatatataatttatgtgtgttcgataaatagccaaatgcctcgtcatcaccggtagacatgataagatacattgatgagtttggacaaaccacaactagaatgcagtgaaaaaaatgctttatttgtgaaatttgtgatgctattgctttatttgtaaccattataagctgcaataaacaagttaacaacaacaaaaaaaaaaaaaaaaaaaaaaaaaaaaaaacgttgactaaaaaaaaaaaaaaaaaaaaaaaaaaaaaaaaaaaaaaaaaaaaaaaaaaaaaaaaaaaaaaaaaaaaaa

SEQ ID NO: 192 - DNA, 3451 bp, synthetic construct
  source 1..3451: mol_type = other DNA
gagtaactatgactctcttaagtctagttacaactgggcatcgctgcagagatcgcacctcctcgtggtcccgctggtagcccttcgaagggtgactaagtcgatctctgccccaggtacggagccgttgggactcaccagtccaacgtaactcctgcctaaattcggtgaaacaaattcctcggtaaaaagccccatgagccagaacgacactcgcgttcagcgacaacgcgagcaagacgatcgccggctctcattgcaacgaaacaacgcgtacttctcttacgtctccgcgacttctgcagacagcgagcggtcaatcacccataacccgacaagtttaccattgccaacaactcaagaaagagcgcgttcttgctctccctcactactgtcacaaaacccccaatctccaaacacttgcgaaatttctttacgcttacctacggtgactagtactgtgacaacaacaaccactgcaactgcaatcacaacaacaactggaacggtatcgtcagctcgctcaatttcgtcgacgcaagcacttgctcctactgagccagcgatcaaaacaaaaacacaatttaacggttctgctgcgctatcagcaagccaaaacgtaaacaagaatgccgggtccaccatacagactggaatggatcgctacataacaataaaaagaaaacttagccctcaaaattacaaaagtcaacaaacagaaaacaaatcaaaaattacacgcggcaatgctaacatgctcactaacaaaacgccagaaaacaccaacagatttgagctgctggcaaattctactgatgaaagtatacaaccggcaaagtcacctaagaaggtcaagcctcctccaatatacattcgcgaaaaaagctcaagtgcattagtgaacaaaatagccacacttataggagaaaactcattttacgtaatacccttaagaaaagggaacataaatgaaacaaaggttcaaactgaaaccgaggatagccatcgtctactaaccaaattcttggatgaagcaggaaaaaacttttatacataccaactaaaaagcgcaaggggcctacaggttgttctcaaagggattgaggcaactgtttcgaccactgaaatcgtagaagcgctcaaggaaaagaactttagtgcaaaaatggtcatgaacatactaaacaaaaataaggaaccacaaccaatgttcaaaatcgagttggagccagagcgccagacactgaaaaaaaaatgatactcgacggatcgatccgaacaaacgacccaacacccgtgcgttttattctgtctttttattgccgatcccctcagaagaactcgtcaagaaggcgatagaaggcgatgcgctgcgaatcgggagcggcgataccgtaaagcacgaggaagcggtcagcccattcgccgccaagctcttcagcaatatcacgggtagccaacgctatgtcctgatagcggtcggccgctttacttgtacagctcgtccatgccgagagtgatcccggcggcggtcacgaactccagcaggaccatgtgatcgcgcttctcgttggggtctttgctcagggcggactgggtgctcaggtagtggttgtcgggcagcagcacggggccgtcgccgatgggggtgttctgctggtagtggtcggccagctgcacgctgccgtcctcgatgttgtggcggatcttgaagttcaccttgatgccgttcttctgcttgtcggccatgatatagacgttgtggctgttgtagttgtactccagcttgtgccccaggatgttgccgtcctccttgaagtcgatgcccttcagctcgatgcggttcaccagggtgtcgccctcgaacttcacctcggcgcgggtcttgtagttgccgtcgtccttgaagaagatggtgcgctcctggacgtagccttcgggcatggcggacttgaagaagtcgtgctgcttcatgtggtcggggtagcggctgaagcactgcacgccgtaggtcagggtggtcacgagggtgggccagggcacgggcagcttgccggtggtgcagatgaacttcagggtcagcttgccgtaggtggcatcgccctcgccctcgccggacacgctgaacttgtggccgtttacgtcgccgtccagctcgaccaggatgggcaccaccccggtgaacagctcctcgcccttgctcaccatggtggcgaattcgaagcttgagctcgagatctgagtccggtagcgctagcggatctgacggttcactaaaccagctctgcttatatagacctcccaccgtacacgcctaccgcccatttgcgtcaatggggcggagttgttacgacattttggaaagtcccgttgattttggtgccaaaacaaactcccattgacgtcaatggggtggagacttggaaatccccgtgagtcaaaccgctatccacgcccattgatgtactgccaaaaccgcatcaccatggtaatagcgatgactaatacgtagatgtactgccaagtaggaaagtcccataaggtcatgtactgggcataatgccaggcgggccatttaccgtcattgacgtcaatagggggcgtacttggcatatgatacacttgatgtactgccaagtgggcagtttaccgtaaatactccacccattgacgtcaatggaaagtccctattggcgttactatgggaacatacgtcattattgacgtcaatgggcgggggtcgttgggcggtcagccaggcgggccatttaccgtaagttatgtaacgcggaactccatatatgggctatgaactaatgaccccgtaattgattactattaaattcctgcagttcaggttatttagatgcttagtttttgtacctttcttgttttgtttaggattttgatagtgttagtatttttatatttttgtacgattgcataatgttcttttttatacagttctgttttaataaaatagacgatagctagagacgttagggcagccacaagccagttaggtagcggatagtaggtaggaacagacttttactatttcataacgcgtcaattaccacctgatttggaccaattcacgggatttgtccaaggtggacgggccacctttacttaacccggaaaaggaacatatataatttatgtgtgttcgataaatagccaaatgcctcgtcatcaccggtagacatgataagatacattgatgagtttggacaaaccacaactagaatgcagtgaaaaaaatgctttatttgtgaaatttgtgatgctattgctttatttgtaaccattataagctgcaataaacaagttaacaacaacaaaaaaaaaaaaaaaaaaaaaaaaaaaaaaacgttgactaaaaaaaaaaaaaaaaaaaaaaaaaaaaaaaaaaaaaaaaaaaaaaaaaaaaaaaaaaaaaaaaaaaaaa

SEQ ID NO: 193 - DNA, 3271 bp, synthetic construct
  source 1..3271: mol_type = other DNA
gagtaactatgactctcttaagtctagttacaactgggcatcgctgcagagatcgcacctcctcgtggtcccgctggtagcccttcgaagggtgactaagtcgatctctgccccaggtacggagccgttgggactcaccagtccaacgtaactcctgcctaaattcggtgaaacaaattcctcggtaaaaagccccatggcctcaccgtctgtttcacccggtgtctttgtctgttcagcgtgtgaaatgtttagttactcctctgcctcctttagtgaagggaataggtgcagaaagtgtagtttatttatggctatggaggcgagacttagcgagcttgagacgcggttccgcagcttggagttagctggagttgcgtcaggtagccaggagaagctagctgctgcggagccgcctagcgtagctacagctagcggtcccccggcagcagccgagcagccggctagccagggcggctgggtgacggttcgtaggaagcgtagcccaaaacaaaggcccacggtgcaccaccaaccgcttcccgtggctaaccgcttttccccactcggcgacacacccgctgagaaaccgaccctggtaattggcgactctgttttgcgctacgtgaagccgactccagcgaccatagttaagtgcattccgggggccagagcgggcgacatagaagcaaatttacggctgctggcgagacgtaatcgtaaatttggtaaagttattattcacgtcggagccaacgacacccggcttcgtcagtcggaggtcaccaaaattaacttggagtcggtgtgtaactacgcaaaaacgatgtcggactccgtagcattctctggtcccctccccaatctggccagcgaggagatgtttagccgcatgtcgtcgcttcgtcgctggctgtcacggtggtgccccgaaaaccaggtggcctttatagacaattggagcactttttggggaaaacctggtctgattaggagagacggtgtccatcccacacgggatggtgcttctctcatttctagtaatttggctaattttattagacccaaagtgacctgatactcgacggatcgatccgaacaaacgacccaacacccgtgcgttttattctgtctttttattgccgatcccctcagaagaactcgtcaagaaggcgatagaaggcgatgcgctgcgaatcgggagcggcgataccgtaaagcacgaggaagcggtcagcccattcgccgccaagctcttcagcaatatcacgggtagccaacgctatgtcctgatagcggtcggccgctttacttgtacagctcgtccatgccgagagtgatcccggcggcggtcacgaactccagcaggaccatgtgatcgcgcttctcgttggggtctttgctcagggcggactgggtgctcaggtagtggttgtcgggcagcagcacggggccgtcgccgatgggggtgttctgctggtagtggtcggccagctgcacgctgccgtcctcgatgttgtggcggatcttgaagttcaccttgatgccgttcttctgcttgtcggccatgatatagacgttgtggctgttgtagttgtactccagcttgtgccccaggatgttgccgtcctccttgaagtcgatgcccttcagctcgatgcggttcaccagggtgtcgccctcgaacttcacctcggcgcgggtcttgtagttgccgtcgtccttgaagaagatggtgcgctcctggacgtagccttcgggcatggcggacttgaagaagtcgtgctgcttcatgtggtcggggtagcggctgaagcactgcacgccgtaggtcagggtggtcacgagggtgggccagggcacgggcagcttgccggtggtgcagatgaacttcagggtcagcttgccgtaggtggcatcgccctcgccctcgccggacacgctgaacttgtggccgtttacgtcgccgtccagctcgaccaggatgggcaccaccccggtgaacagctcctcgcccttgctcaccatggtggcgaattcgaagcttgagctcgagatctgagtccggtagcgctagcggatctgacggttcactaaaccagctctgcttatatagacctcccaccgtacacgcctaccgcccatttgcgtcaatggggcggagttgttacgacattttggaaagtcccgttgattttggtgccaaaacaaactcccattgacgtcaatggggtggagacttggaaatccccgtgagtcaaaccgctatccacgcccattgatgtactgccaaaaccgcatcaccatggtaatagcgatgactaatacgtagatgtactgccaagtaggaaagtcccataaggtcatgtactgggcataatgccaggcgggccatttaccgtcattgacgtcaatagggggcgtacttggcatatgatacacttgatgtactgccaagtgggcagtttaccgtaaatactccacccattgacgtcaatggaaagtccctattggcgttactatgggaacatacgtcattattgacgtcaatgggcgggggtcgttgggcggtcagccaggcgggccatttaccgtaagttatgtaacgcggaactccatatatgggctatgaactaatgaccccgtaattgattactattaaattcctgcagttcaggttatttagatgcttagtttttgtacctttcttgttttgtttaggattttgatagtgttagtatttttatatttttgtacgattgcataatgttcttttttatacagttctgttttaataaaatagacgatagctagagacgttagggcagccacaagccagttaggtagcggatagtaggtaggaacagacttttactatttcataacgcgtcaattaccacctgatttggaccaattcacgggatttgtccaaggtggacgggccacctttacttaacccggaaaaggaacatatataatttatgtgtgttcgataaatagccaaatgcctcgtcatcaccggtagacatgataagatacattgatgagtttggacaaaccacaactagaatgcagtgaaaaaaatgctttatttgtgaaatttgtgatgctattgctttatttgtaaccattataagctgcaataaacaagttaacaacaacaaaaaaaaaaaaaaaaaaaaaaaaaaaaaaacgttgactaaaaaaaaaaaaaaaaaaaaaaaaaaaaaaaaaaaaaaaaaaaaaaaaaaaaaaaaaaaaaaaaaaaaaa

SEQ ID NO: 194 - DNA, 3610 bp, synthetic construct
  source 1..3610: mol_type = other DNA
gagtaactatgactctcttaagtctagttacaactgggcatcgctgcagagatcgcacctcctcgtggtcccgctggtagcccttcgaagggtgactaagtcgatctctgccccaggtacggagccgttgggactcaccagtccaacgtaactcctgcctaaattcggtgaaacaaattcctcggtaaaaagccccatgaagaacaaatatctaaacattatggcaaaaaatcaaaacactaaaaaacggatattggaacaagacttggagactgaactaagaactggttttaatttcccatctgaaaatgaaaactggcaaagatttattgtactggaatcactgactgatgacatgcccctgaccaaactgtccccttttgcgatccacaaaggaatcacaggaattgcaggaacagtaaaagacattaaaaagctgcgatctggacaaattttggtggaatgtgctaggaaagctaactcagaaaatttactacaagcaacaactttggctggaattactatgaaagcattccctcattctaccctgaacaacagcaaaggtgtaatccgcaccagagaattacaagatatggacgaatctgaaatcgctttagaattaaaaccaataggtgtaatcgacgtaaaaagaataatcatcaaaaaggatgggcagatgattaaaacgggaacatacatcctgaccttcaacagaccacaaccaccagagaaaatcaaacttggatatttaagtgttgctgtagatatattcataccaaatccactgagatgttttaaatgccagaaatttggtcatggatctgcaggatgcaaaaataagacaacatgtcaaaactgtggtgaggatgatcatggaatgaactgcacaaaacctcctaaatgtaaaaactgccttggagatcatgcagcctcatcaaagaattgtcccatttggcataaagagaaagaaatacaaaaaataaaacacacaaggaagatgagttatcctgaagctcgtaaaatagttgaagctcttcctgccttctgtctgaaaaagccctattctgttgcagtcacaccaaaaactcaatcaataagttgtcagacggatctaacttggctattcaaggacaaacctcaaaccataagcaacaccaaaaactcaacttcccaaaaaacaaaaaatgaactcattcaaactggaccaattcaagactcatacctagaacagaaagaatcaaaagtgaaaaagaaaactccaagtacaacaaatcaacaaccaaatcaagataaatgtcgaactcacaaagatgacaatcctaaagatattgaaatgacggagacaacgaccagtcgtagtcgtagtctctcacctaaatgtaaaaataaaggacctgtacctatatttcccacttgatactcgacggatcgatccgaacaaacgacccaacacccgtgcgttttattctgtctttttattgccgatcccctcagaagaactcgtcaagaaggcgatagaaggcgatgcgctgcgaatcgggagcggcgataccgtaaagcacgaggaagcggtcagcccattcgccgccaagctcttcagcaatatcacgggtagccaacgctatgtcctgatagcggtcggccgctttacttgtacagctcgtccatgccgagagtgatcccggcggcggtcacgaactccagcaggaccatgtgatcgcgcttctcgttggggtctttgctcagggcggactgggtgctcaggtagtggttgtcgggcagcagcacggggccgtcgccgatgggggtgttctgctggtagtggtcggccagctgcacgctgccgtcctcgatgttgtggcggatcttgaagttcaccttgatgccgttcttctgcttgtcggccatgatatagacgttgtggctgttgtagttgtactccagcttgtgccccaggatgttgccgtcctccttgaagtcgatgcccttcagctcgatgcggttcaccagggtgtcgccctcgaacttcacctcggcgcgggtcttgtagttgccgtcgtccttgaagaagatggtgcgctcctggacgtagccttcgggcatggcggacttgaagaagtcgtgctgcttcatgtggtcggggtagcggctgaagcactgcacgccgtaggtcagggtggtcacgagggtgggccagggcacgggcagcttgccggtggtgcagatgaacttcagggtcagcttgccgtaggtggcatcgccctcgccctcgccggacacgctgaacttgtggccgtttacgtcgccgtccagctcgaccaggatgggcaccaccccggtgaacagctcctcgcccttgctcaccatggtggcgaattcgaagcttgagctcgagatctgagtccggtagcgctagcggatctgacggttcactaaaccagctctgcttatatagacctcccaccgtacacgcctaccgcccatttgcgtcaatggggcggagttgttacgacattttggaaagtcccgttgattttggtgccaaaacaaactcccattgacgtcaatggggtggagacttggaaatccccgtgagtcaaaccgctatccacgcccattgatgtactgccaaaaccgcatcaccatggtaatagcgatgactaatacgtagatgtactgccaagtaggaaagtcccataaggtcatgtactgggcataatgccaggcgggccatttaccgtcattgacgtcaatagggggcgtacttggcatatgatacacttgatgtactgccaagtgggcagtttaccgtaaatactccacccattgacgtcaatggaaagtccctattggcgttactatgggaacatacgtcattattgacgtcaatgggcgggggtcgttgggcggtcagccaggcgggccatttaccgtaagttatgtaacgcggaactccatatatgggctatgaactaatgaccccgtaattgattactattaaattcctgcagttcaggttatttagatgcttagtttttgtacctttcttgttttgtttaggattttgatagtgttagtatttttatatttttgtacgattgcataatgttcttttttatacagttctgttttaataaaatagacgatagctagagacgttagggcagccacaagccagttaggtagcggatagtaggtaggaacagacttttactatttcataacgcgtcaattaccacctgatttggaccaattcacgggatttgtccaaggtggacgggccacctttacttaacccggaaaaggaacatatataatttatgtgtgttcgataaatagccaaatgcctcgtcatcaccggtagacatgataagatacattgatgagtttggacaaaccacaactagaatgcagtgaaaaaaatgctttatttgtgaaatttgtgatgctattgctttatttgtaaccattataagctgcaataaacaagttaacaacaacaaaaaaaaaaaaaaaaaaaaaaaaaaaaaaacgttgactaaaaaaaaaaaaaaaaaaaaaaaaaaaaaaaaaaaaaaaaaaaaaaaaaaaaaaaaaaaaaaaaaaaaaa

SEQ ID NO: 195 - DNA, 3511 bp, synthetic construct
  source 1..3511: mol_type = other DNA
gagtaactatgactctcttaagtctagttacaactgggcatcgctgcagagatcgcacctcctcgtggtcccgctggtagcccttcgaagggtgactaagtcgatctctgccccaggtacggagccgttgggactcaccagtccaacgtaactcctgcctaaattcggtgaaacaaattcctcggtaaaaagccccatggccaagggcaagcgccgcaacctgaccaaccgcaaccaggaccacagccccagccccgagcccagcacccccaccagccccagccccggcaaccccaacacccccgagaacctggacctggacctgaaggcctacctgatgatgatggtggaggacatcaagaaggacttcaacaagagcctgaaggagatccaggagaacaccgccaaggagctgcaggtgctgaaggagaagcaggagaacaccatcaagcaggtggaggtgctgaccgagaaggaggagaaaacctacaagcaggtgatggagatgaacaagaccatcctggacctgaagcgcgaggtcgacaccatcaagaaaacccagagcgaggccaccctggagatcgagaccctgggcaagaagagcggcaccatcgacctgagcatcagcaaccgcatccaggagatggaggagcgcatcagcggcgccgaggacagcatcgagaacatcggcaccaccatcaaggagaacggcaagtgcaagaagatcctgacccagaacatccaggagatccaggacaccatccgccgccccaacgtgcgcatcatcggcgtggacgagaacgaggacttccagctgaagggccccgccaacatcttcaacaagatcatcgaggagaacttccccaacctgaagaacgagatgcacatgaacatccaggaggcctaccgcacccccaaccgcctggaccagaagcgcaacagctctagacacatcatcatccgcaccagcaacgccctgaacaaggaccgcatcctgaaggccgtgcgcgagaagggccaggtgacctacaagggcaagcccatccgcatcacccccgacttcagccccgagaccatgaaggccgccgccgcctggaccgacgtgatccagaccctgcgcgagcacaagctgcagccccgcctgctgtaccccgccaagctgagcatcatcatcgagggcgagaccaaggtgttccacgacaagaccaagttcacccactacctgagcaccaaccccgccctgcagcgcatcatcaccgagaagaaccagtacaagaacggcaacaacgccctggagaaaacccgccgctaatactcgacggatcgatccgaacaaacgacccaacacccgtgcgttttattctgtctttttattgccgatcccctcagaagaactcgtcaagaaggcgatagaaggcgatgcgctgcgaatcgggagcggcgataccgtaaagcacgaggaagcggtcagcccattcgccgccaagctcttcagcaatatcacgggtagccaacgctatgtcctgatagcggtcggccgctctattatcacttgtacagctcgtccatgccgagagtgatcccggcggcggtcacgaactccagcaggaccatgtgatcgcgcttctcgttggggtctttgctcagggcggactgggtgctcaggtagtggttgtcgggcagcagcacggggccgtcgccgatgggggtgttctgctggtagtggtcggccagctgcacgctgccgtcctcgatgttgtggcggatcttgaagttcaccttgatgccgttcttctgcttgtcggccatgatatagacgttgtggctgttgtagttgtactccagcttgtgccccaggatgttgccgtcctccttgaagtcgatgcccttcagctcgatgcggttcaccagggtgtcgccctcgaacttcacctcggcgcgggtcttgtagttgccgtcgtccttgaagaagatggtgcgctcctggacgtagccttcgggcatggcggacttgaagaagtcgtgctgcttcatgtggtcggggtagcggctgaagcactgcacgccgtaggtcagggtggtcacgagggtgggccagggcacgggcagcttgccggtggtgcagatgaacttcagggtcagcttgccgtaggtggcatcgccctcgccctcgccggacacgctgaacttgtggccgtttacgtcgccgtccagctcgaccaggatgggcaccaccccggtgaacagctcctcgcccttgctcaccatggtggcgaattcgaagcttgagctcgagatctgagtccggtagcgctagcggatctgacggttcactaaaccagctctgcttatatagacctcccaccgtacacgcctaccgcccatttgcgtcaatggggcggagttgttacgacattttggaaagtcccgttgattttggtgccaaaacaaactcccattgacgtcaatggggtggagacttggaaatccccgtgagtcaaaccgctatccacgcccattgatgtactgccaaaaccgcatcaccatggtaatagcgatgactaatacgtagatgtactgccaagtaggaaagtcccataaggtcatgtactgggcataatgccaggcgggccatttaccgtcattgacgtcaatagggggcgtacttggcatatgatacacttgatgtactgccaagtgggcagtttaccgtaaatactccacccattgacgtcaatggaaagtccctattggcgttactatgggaacatacgtcattattgacgtcaatgggcgggggtcgttgggcggtcagccaggcgggccatttaccgtaagttatgtaacgcggaactccatatatgggctatgaactaatgaccccgtaattgattactattaaattcctgcagttcaggttatttagatgcttagtttttgtacctttcttgttttgtttaggattttgatagtgttagtatttttatatttttgtacgattgcataatgttcttttttatacagttctgttttaataaaatagacgatagctagagacgttagggcagccacaagccagttaggtagcggatagtaggtaggaacagacttttactatttcataacgcgtcaattaccacctgatttggaccaattcacgggatttgtccaaggtggacgggccacctttacttaacccggaaaaggaacatatataatttatgtgtgttcgataaatagccaaatgcctcgtcatcaccggtagacatgataagatacattgatgagtttggacaaaccacaactagaatgcagtgaaaaaaatgctttatttgtgaaatttgtgatgctattgctttatttgtaaccattataagctgcaataaacaagttaacaacaacaaaaaaaaaaaaaaaaaaaaaaaaaaaaaaacgttgactaaaaaaaaaaaaaaaaaaaaaaaaaaaaaaaaaaaaaaaaaaaaaaaaaaaaaaaaaaaaaaaaaaaaaa

SEQ ID NO: 196 - DNA, 3304 bp, synthetic construct
  source 1..3304: mol_type = other DNA
gagtaactatgactctcttaagtctagttacaactgggcatcgctgcagagatcgcacctcctcgtggtcccgctggtagcccttcgaagggtgactaagtcgatctctgccccaggtacggagccgttgggactcaccagtccaacgtaactcctgcctaaattcggtgaaacaaattcctcggtaaaaagccccatgtcgcttccgtctctgtccttgtgtgcaggagaagcatcgatggaggcgttggagctggagctggaagaagtggagtcccagatccgcgcgctggtggtaagacggtcgcggctacgggaacggcttctagccgtacctaatgctaaggccgtctcatcacctaaggtacgtggaaattacaaccacatcattccctctacctcaaccccgcgtccttctctgtccaggcccagcgcacccggggcgcggctcagccaggcgtcgttcacgccgacacccggctaccacggcgcctgggtgcagccgcgcaaggtgcttcccagatcccggggcagaacgtctccgcctgtgttcgagatctccacggagaaccgcttctcccctctccgcgagtcgggtcccgatgtggccatcatcggtgactcgatcgttcgtcacgtccgtgccgcctcctcaaaaggtaataaagtacgtactttctgctttcctggtgcccgtgtgaaaaatatttctacacagattccaaccatcctgggcgctgccgagagccctggtgccgttgtcctccacgtggggacaaacgacaccgggctccggcagtcggagatcctgaagaaggacttcaggagcctgatcgagacggttcgacgcacctcgcccgccacgcagatcatcgtttctgggccgcttcctacctaccgccgaggaaatgaaaggttcagtagacttttagctttgaatgaatggctaataacatggtgtaaagaacagaaattgctctttgctaataactggaatcttttctgggagcgtcctaggctcttccgtcctgacggcctgcaccccagtcgagccggagctgaactcctgtcggacaacatctccagactacttcgcaccatctaatactcgacggatcgatccgaacaaacgacccaacacccgtgcgttttattctgtctttttattgccgatcccctcagaagaactcgtcaagaaggcgatagaaggcgatgcgctgcgaatcgggagcggcgataccgtaaagcacgaggaagcggtcagcccattcgccgccaagctcttcagcaatatcacgggtagccaacgctatgtcctgatagcggtcggccgcttcattactacttgtacagctcgtccatgccgagagtgatcccggcggcggtcacgaactccagcaggaccatgtgatcgcgcttctcgttggggtctttgctcagggcggactgggtgctcaggtagtggttgtcgggcagcagcacggggccgtcgccgatgggggtgttctgctggtagtggtcggccagctgcacgctgccgtcctcgatgttgtggcggatcttgaagttcaccttgatgccgttcttctgcttgtcggccatgatatagacgttgtggctgttgtagttgtactccagcttgtgccccaggatgttgccgtcctccttgaagtcgatgcccttcagctcgatgcggttcaccagggtgtcgccctcgaacttcacctcggcgcgggtcttgtagttgccgtcgtccttgaagaagatggtgcgctcctggacgtagccttcgggcatggcggacttgaagaagtcgtgctgcttcatgtggtcggggtagcggctgaagcactgcacgccgtaggtcagggtggtcacgagggtgggccagggcacgggcagcttgccggtggtgcagatgaacttcagggtcagcttgccgtaggtggcatcgccctcgccctcgccggacacgctgaacttgtggccgtttacgtcgccgtccagctcgaccaggatgggcaccaccccggtgaacagctcctcgcccttgctcaccatggtggcgaattcgaagcttgagctcgagatctgagtccggtagcgctagcggatctgacggttcactaaaccagctctgcttatatagacctcccaccgtacacgcctaccgcccatttgcgtcaatggggcggagttgttacgacattttggaaagtcccgttgattttggtgccaaaacaaactcccattgacgtcaatggggtggagacttggaaatccccgtgagtcaaaccgctatccacgcccattgatgtactgccaaaaccgcatcaccatggtaatagcgatgactaatacgtagatgtactgccaagtaggaaagtcccataaggtcatgtactgggcataatgccaggcgggccatttaccgtcattgacgtcaatagggggcgtacttggcatatgatacacttgatgtactgccaagtgggcagtttaccgtaaatactccacccattgacgtcaatggaaagtccctattggcgttactatgggaacatacgtcattattgacgtcaatgggcgggggtcgttgggcggtcagccaggcgggccatttaccgtaagttatgtaacgcggaactccatatatgggctatgaactaatgaccccgtaattgattactattaaattcctgcagttcaggttatttagatgcttagtttttgtacctttcttgttttgtttaggattttgatagtgttagtatttttatatttttgtacgattgcataatgttcttttttatacagttctgttttaataaaatagacgatagctagagacgttagggcagccacaagccagttaggtagcggatagtaggtaggaacagacttttactatttcataacgcgtcaattaccacctgatttggaccaattcacgggatttgtccaaggtggacgggccacctttacttaacccggaaaaggaacatatataatttatgtgtgttcgataaatagccaaatgcctcgtcatcaccggtagacatgataagatacattgatgagtttggacaaaccacaactagaatgcagtgaaaaaaatgctttatttgtgaaatttgtgatgctattgctttatttgtaaccattataagctgcaataaacaagttaacaacaacaaaaaaaaaaaaaaaaaaaaaaaaaaaaaaacgttgactaaaaaaaaaaaaaaaaaaaaaaaaaaaaaaaaaaaaaaaaaaaaaaaaaaaaaaaaaaaaaaaaaaaaaa

SEQ ID NO: 197 - DNA, 3457 bp, synthetic construct
  source 1..3457: mol_type = other DNA
gagtaactatgactctcttaagtctagttacaactgggcatcgctgcagagatcgcacctcctcgtggtcccgctggtagcccttcgaagggtgactaagtcgatctctgccccaggtacggagccgttgggactcaccagtccaacgtaactcctgcctaaattcggtgaaacaaattcctcggtaaaaagccccatgagccagaacgacactcgcgttcagcgacaacgcgagcaagacgatcgccggctctcattgcaacgaaacaacgcgtacttctcttacgtctccgcgacttctgcagacagcgagcggtcaatcacccataacccgacaagtttaccattgccaacaactcaagaaagagcgcgttcttgctctccctcactactgtcacaaaacccccaatctccaaacacttgcgaaatttctttacgcttacctacggtgactagtactgtgacaacaacaaccactgcaactgcaatcacaacaacaactggaacggtatcgtcagctcgctcaatttcgtcgacgcaagcacttgctcctactgagccagcgatcaaaacaaaaacacaatttaacggttctgctgcgctatcagcaagccaaaacgtaaacaagaatgccgggtccaccatacagactggaatggatcgctacataacaataaaaagaaaacttagccctcaaaattacaaaagtcaacaaacagaaaacaaatcaaaaattacacgcggcaatgctaacatgctcactaacaaaacgccagaaaacaccaacagatttgagctgctggcaaattctactgatgaaagtatacaaccggcaaagtcacctaagaaggtcaagcctcctccaatatacattcgcgaaaaaagctcaagtgcattagtgaacaaaatagccacacttataggagaaaactcattttacgtaatacccttaagaaaagggaacataaatgaaacaaaggttcaaactgaaaccgaggatagccatcgtctactaaccaaattcttggatgaagcaggaaaaaacttttatacataccaactaaaaagcgcaaggggcctacaggttgttctcaaagggattgaggcaactgtttcgaccactgaaatcgtagaagcgctcaaggaaaagaactttagtgcaaaaatggtcatgaacatactaaacaaaaataaggaaccacaaccaatgttcaaaatcgagttggagccagagcgccagacactgaaaaaaaaataatactcgacggatcgatccgaacaaacgacccaacacccgtgcgttttattctgtctttttattgccgatcccctcagaagaactcgtcaagaaggcgatagaaggcgatgcgctgcgaatcgggagcggcgataccgtaaagcacgaggaagcggtcagcccattcgccgccaagctcttcagcaatatcacgggtagccaacgctatgtcctgatagcggtcggccgctctattatcacttgtacagctcgtccatgccgagagtgatcccggcggcggtcacgaactccagcaggaccatgtgatcgcgcttctcgttggggtctttgctcagggcggactgggtgctcaggtagtggttgtcgggcagcagcacggggccgtcgccgatgggggtgttctgctggtagtggtcggccagctgcacgctgccgtcctcgatgttgtggcggatcttgaagttcaccttgatgccgttcttctgcttgtcggccatgatatagacgttgtggctgttgtagttgtactccagcttgtgccccaggatgttgccgtcctccttgaagtcgatgcccttcagctcgatgcggttcaccagggtgtcgccctcgaacttcacctcggcgcgggtcttgtagttgccgtcgtccttgaagaagatggtgcgctcctggacgtagccttcgggcatggcggacttgaagaagtcgtgctgcttcatgtggtcggggtagcggctgaagcactgcacgccgtaggtcagggtggtcacgagggtgggccagggcacgggcagcttgccggtggtgcagatgaacttcagggtcagcttgccgtaggtggcatcgccctcgccctcgccggacacgctgaacttgtggccgtttacgtcgccgtccagctcgaccaggatgggcaccaccccggtgaacagctcctcgcccttgctcaccatggtggcgaattcgaagcttgagctcgagatctgagtccggtagcgctagcggatctgacggttcactaaaccagctctgcttatatagacctcccaccgtacacgcctaccgcccatttgcgtcaatggggcggagttgttacgacattttggaaagtcccgttgattttggtgccaaaacaaactcccattgacgtcaatggggtggagacttggaaatccccgtgagtcaaaccgctatccacgcccattgatgtactgccaaaaccgcatcaccatggtaatagcgatgactaatacgtagatgtactgccaagtaggaaagtcccataaggtcatgtactgggcataatgccaggcgggccatttaccgtcattgacgtcaatagggggcgtacttggcatatgatacacttgatgtactgccaagtgggcagtttaccgtaaatactccacccattgacgtcaatggaaagtccctattggcgttactatgggaacatacgtcattattgacgtcaatgggcgggggtcgttgggcggtcagccaggcgggccatttaccgtaagttatgtaacgcggaactccatatatgggctatgaactaatgaccccgtaattgattactattaaattcctgcagttcaggttatttagatgcttagtttttgtacctttcttgttttgtttaggattttgatagtgttagtatttttatatttttgtacgattgcataatgttcttttttatacagttctgttttaataaaatagacgatagctagagacgttagggcagccacaagccagttaggtagcggatagtaggtaggaacagacttttactatttcataacgcgtcaattaccacctgatttggaccaattcacgggatttgtccaaggtggacgggccacctttacttaacccggaaaaggaacatatataatttatgtgtgttcgataaatagccaaatgcctcgtcatcaccggtagacatgataagatacattgatgagtttggacaaaccacaactagaatgcagtgaaaaaaatgctttatttgtgaaatttgtgatgctattgctttatttgtaaccattataagctgcaataaacaagttaacaacaacaaaaaaaaaaaaaaaaaaaaaaaaaaaaaaacgttgactaaaaaaaaaaaaaaaaaaaaaaaaaaaaaaaaaaaaaaaaaaaaaaaaaaaaaaaaaaaaaaaaaaaaaa

SEQ ID NO: 198 - DNA, 3277 bp, synthetic construct
  source 1..3277: mol_type = other DNA
gagtaactatgactctcttaagtctagttacaactgggcatcgctgcagagatcgcacctcctcgtggtcccgctggtagcccttcgaagggtgactaagtcgatctctgccccaggtacggagccgttgggactcaccagtccaacgtaactcctgcctaaattcggtgaaacaaattcctcggtaaaaagccccatggcctcaccgtctgtttcacccggtgtctttgtctgttcagcgtgtgaaatgtttagttactcctctgcctcctttagtgaagggaataggtgcagaaagtgtagtttatttatggctatggaggcgagacttagcgagcttgagacgcggttccgcagcttggagttagctggagttgcgtcaggtagccaggagaagctagctgctgcggagccgcctagcgtagctacagctagcggtcccccggcagcagccgagcagccggctagccagggcggctgggtgacggttcgtaggaagcgtagcccaaaacaaaggcccacggtgcaccaccaaccgcttcccgtggctaaccgcttttccccactcggcgacacacccgctgagaaaccgaccctggtaattggcgactctgttttgcgctacgtgaagccgactccagcgaccatagttaagtgcattccgggggccagagcgggcgacatagaagcaaatttacggctgctggcgagacgtaatcgtaaatttggtaaagttattattcacgtcggagccaacgacacccggcttcgtcagtcggaggtcaccaaaattaacttggagtcggtgtgtaactacgcaaaaacgatgtcggactccgtagcattctctggtcccctccccaatctggccagcgaggagatgtttagccgcatgtcgtcgcttcgtcgctggctgtcacggtggtgccccgaaaaccaggtggcctttatagacaattggagcactttttggggaaaacctggtctgattaggagagacggtgtccatcccacacgggatggtgcttctctcatttctagtaatttggctaattttattagacccaaagtgacctaatactcgacggatcgatccgaacaaacgacccaacacccgtgcgttttattctgtctttttattgccgatcccctcagaagaactcgtcaagaaggcgatagaaggcgatgcgctgcgaatcgggagcggcgataccgtaaagcacgaggaagcggtcagcccattcgccgccaagctcttcagcaatatcacgggtagccaacgctatgtcctgatagcggtcggccgctctattatcacttgtacagctcgtccatgccgagagtgatcccggcggcggtcacgaactccagcaggaccatgtgatcgcgcttctcgttggggtctttgctcagggcggactgggtgctcaggtagtggttgtcgggcagcagcacggggccgtcgccgatgggggtgttctgctggtagtggtcggccagctgcacgctgccgtcctcgatgttgtggcggatcttgaagttcaccttgatgccgttcttctgcttgtcggccatgatatagacgttgtggctgttgtagttgtactccagcttgtgccccaggatgttgccgtcctccttgaagtcgatgcccttcagctcgatgcggttcaccagggtgtcgccctcgaacttcacctcggcgcgggtcttgtagttgccgtcgtccttgaagaagatggtgcgctcctggacgtagccttcgggcatggcggacttgaagaagtcgtgctgcttcatgtggtcggggtagcggctgaagcactgcacgccgtaggtcagggtggtcacgagggtgggccagggcacgggcagcttgccggtggtgcagatgaacttcagggtcagcttgccgtaggtggcatcgccctcgccctcgccggacacgctgaacttgtggccgtttacgtcgccgtccagctcgaccaggatgggcaccaccccggtgaacagctcctcgcccttgctcaccatggtggcgaattcgaagcttgagctcgagatctgagtccggtagcgctagcggatctgacggttcactaaaccagctctgcttatatagacctcccaccgtacacgcctaccgcccatttgcgtcaatggggcggagttgttacgacattttggaaagtcccgttgattttggtgccaaaacaaactcccattgacgtcaatggggtggagacttggaaatccccgtgagtcaaaccgctatccacgcccattgatgtactgccaaaaccgcatcaccatggtaatagcgatgactaatacgtagatgtactgccaagtaggaaagtcccataaggtcatgtactgggcataatgccaggcgggccatttaccgtcattgacgtcaatagggggcgtacttggcatatgatacacttgatgtactgccaagtgggcagtttaccgtaaatactccacccattgacgtcaatggaaagtccctattggcgttactatgggaacatacgtcattattgacgtcaatgggcgggggtcgttgggcggtcagccaggcgggccatttaccgtaagttatgtaacgcggaactccatatatgggctatgaactaatgaccccgtaattgattactattaaattcctgcagttcaggttatttagatgcttagtttttgtacctttcttgttttgtttaggattttgatagtgttagtatttttatatttttgtacgattgcataatgttcttttttatacagttctgttttaataaaatagacgatagctagagacgttagggcagccacaagccagttaggtagcggatagtaggtaggaacagacttttactatttcataacgcgtcaattaccacctgatttggaccaattcacgggatttgtccaaggtggacgggccacctttacttaacccggaaaaggaacatatataatttatgtgtgttcgataaatagccaaatgcctcgtcatcaccggtagacatgataagatacattgatgagtttggacaaaccacaactagaatgcagtgaaaaaaatgctttatttgtgaaatttgtgatgctattgctttatttgtaaccattataagctgcaataaacaagttaacaacaacaaaaaaaaaaaaaaaaaaaaaaaaaaaaaaacgttgactaaaaaaaaaaaaaaaaaaaaaaaaaaaaaaaaaaaaaaaaaaaaaaaaaaaaaaaaaaaaaaaaaaaaaa

SEQ ID NO: 199 - DNA, 3616 bp, synthetic construct
  source 1..3616: mol_type = other DNA
gagtaactatgactctcttaagtctagttacaactgggcatcgctgcagagatcgcacctcctcgtggtcccgctggtagcccttcgaagggtgactaagtcgatctctgccccaggtacggagccgttgggactcaccagtccaacgtaactcctgcctaaattcggtgaaacaaattcctcggtaaaaagccccatgaagaacaaatatctaaacattatggcaaaaaatcaaaacactaaaaaacggatattggaacaagacttggagactgaactaagaactggttttaatttcccatctgaaaatgaaaactggcaaagatttattgtactggaatcactgactgatgacatgcccctgaccaaactgtccccttttgcgatccacaaaggaatcacaggaattgcaggaacagtaaaagacattaaaaagctgcgatctggacaaattttggtggaatgtgctaggaaagctaactcagaaaatttactacaagcaacaactttggctggaattactatgaaagcattccctcattctaccctgaacaacagcaaaggtgtaatccgcaccagagaattacaagatatggacgaatctgaaatcgctttagaattaaaaccaataggtgtaatcgacgtaaaaagaataatcatcaaaaaggatgggcagatgattaaaacgggaacatacatcctgaccttcaacagaccacaaccaccagagaaaatcaaacttggatatttaagtgttgctgtagatatattcataccaaatccactgagatgttttaaatgccagaaatttggtcatggatctgcaggatgcaaaaataagacaacatgtcaaaactgtggtgaggatgatcatggaatgaactgcacaaaacctcctaaatgtaaaaactgccttggagatcatgcagcctcatcaaagaattgtcccatttggcataaagagaaagaaatacaaaaaataaaacacacaaggaagatgagttatcctgaagctcgtaaaatagttgaagctcttcctgccttctgtctgaaaaagccctattctgttgcagtcacaccaaaaactcaatcaataagttgtcagacggatctaacttggctattcaaggacaaacctcaaaccataagcaacaccaaaaactcaacttcccaaaaaacaaaaaatgaactcattcaaactggaccaattcaagactcatacctagaacagaaagaatcaaaagtgaaaaagaaaactccaagtacaacaaatcaacaaccaaatcaagataaatgtcgaactcacaaagatgacaatcctaaagatattgaaatgacggagacaacgaccagtcgtagtcgtagtctctcacctaaatgtaaaaataaaggacctgtacctatatttcccacttaatactcgacggatcgatccgaacaaacgacccaacacccgtgcgttttattctgtctttttattgccgatcccctcagaagaactcgtcaagaaggcgatagaaggcgatgcgctgcgaatcgggagcggcgataccgtaaagcacgaggaagcggtcagcccattcgccgccaagctcttcagcaatatcacgggtagccaacgctatgtcctgatagcggtcggccgctctattatcacttgtacagctcgtccatgccgagagtgatcccggcggcggtcacgaactccagcaggaccatgtgatcgcgcttctcgttggggtctttgctcagggcggactgggtgctcaggtagtggttgtcgggcagcagcacggggccgtcgccgatgggggtgttctgctggtagtggtcggccagctgcacgctgccgtcctcgatgttgtggcggatcttgaagttcaccttgatgccgttcttctgcttgtcggccatgatatagacgttgtggctgttgtagttgtactccagcttgtgccccaggatgttgccgtcctccttgaagtcgatgcccttcagctcgatgcggttcaccagggtgtcgccctcgaacttcacctcggcgcgggtcttgtagttgccgtcgtccttgaagaagatggtgcgctcctggacgtagccttcgggcatggcggacttgaagaagtcgtgctgcttcatgtggtcggggtagcggctgaagcactgcacgccgtaggtcagggtggtcacgagggtgggccagggcacgggcagcttgccggtggtgcagatgaacttcagggtcagcttgccgtaggtggcatcgccctcgccctcgccggacacgctgaacttgtggccgtttacgtcgccgtccagctcgaccaggatgggcaccaccccggtgaacagctcctcgcccttgctcaccatggtggcgaattcgaagcttgagctcgagatctgagtccggtagcgctagcggatctgacggttcactaaaccagctctgcttatatagacctcccaccgtacacgcctaccgcccatttgcgtcaatggggcggagttgttacgacattttggaaagtcccgttgattttggtgccaaaacaaactcccattgacgtcaatggggtggagacttggaaatccccgtgagtcaaaccgctatccacgcccattgatgtactgccaaaaccgcatcaccatggtaatagcgatgactaatacgtagatgtactgccaagtaggaaagtcccataaggtcatgtactgggcataatgccaggcgggccatttaccgtcattgacgtcaatagggggcgtacttggcatatgatacacttgatgtactgccaagtgggcagtttaccgtaaatactccacccattgacgtcaatggaaagtccctattggcgttactatgggaacatacgtcattattgacgtcaatgggcgggggtcgttgggcggtcagccaggcgggccatttaccgtaagttatgtaacgcggaactccatatatgggctatgaactaatgaccccgtaattgattactattaaattcctgcagttcaggttatttagatgcttagtttttgtacctttcttgttttgtttaggattttgatagtgttagtatttttatatttttgtacgattgcataatgttcttttttatacagttctgttttaataaaatagacgatagctagagacgttagggcagccacaagccagttaggtagcggatagtaggtaggaacagacttttactatttcataacgcgtcaattaccacctgatttggaccaattcacgggatttgtccaaggtggacgggccacctttacttaacccggaaaaggaacatatataatttatgtgtgttcgataaatagccaaatgcctcgtcatcaccggtagacatgataagatacattgatgagtttggacaaaccacaactagaatgcagtgaaaaaaatgctttatttgtgaaatttgtgatgctattgctttatttgtaaccattataagctgcaataaacaagttaacaacaacaaaaaaaaaaaaaaaaaaaaaaaaaaaaaaacgttgactaaaaaaaaaaaaaaaaaaaaaaaaaaaaaaaaaaaaaaaaaaaaaaaaaaaaaaaaaaaaaaaaaaaaaa

SEQ ID NO: 200 - DNA, 3523 bp, synthetic construct
  source 1..3523: mol_type = other DNA
gagtaactatgactctcttaagtctagttacaactgggcatcgctgcagagatcgcacctcctcgtggtcccgctggtagcccttcgaagggtgactaagtcgatctctgccccaggtacggagccgttgggactcaccagtccaacgtaactcctgcctaaattcggtgaaacaaattcctcggtaaaaagccccatggccaagggcaagcgccgcaacctgaccaaccgcaaccaggaccacagccccagccccgagcccagcacccccaccagccccagccccggcaaccccaacacccccgagaacctggacctggacctgaaggcctacctgatgatgatggtggaggacatcaagaaggacttcaacaagagcctgaaggagatccaggagaacaccgccaaggagctgcaggtgctgaaggagaagcaggagaacaccatcaagcaggtggaggtgctgaccgagaaggaggagaaaacctacaagcaggtgatggagatgaacaagaccatcctggacctgaagcgcgaggtcgacaccatcaagaaaacccagagcgaggccaccctggagatcgagaccctgggcaagaagagcggcaccatcgacctgagcatcagcaaccgcatccaggagatggaggagcgcatcagcggcgccgaggacagcatcgagaacatcggcaccaccatcaaggagaacggcaagtgcaagaagatcctgacccagaacatccaggagatccaggacaccatccgccgccccaacgtgcgcatcatcggcgtggacgagaacgaggacttccagctgaagggccccgccaacatcttcaacaagatcatcgaggagaacttccccaacctgaagaacgagatgcacatgaacatccaggaggcctaccgcacccccaaccgcctggaccagaagcgcaacagctctagacacatcatcatccgcaccagcaacgccctgaacaaggaccgcatcctgaaggccgtgcgcgagaagggccaggtgacctacaagggcaagcccatccgcatcacccccgacttcagccccgagaccatgaaggccgccgccgcctggaccgacgtgatccagaccctgcgcgagcacaagctgcagccccgcctgctgtaccccgccaagctgagcatcatcatcgagggcgagaccaaggtgttccacgacaagaccaagttcacccactacctgagcaccaaccccgccctgcagcgcatcatcaccgagaagaaccagtacaagaacggcaacaacgccctggagaaaacccgccgctaagggaggggcgggtctgggtactcgacggatcgatccgaacaaacgacccaacacccgtgcgttttattctgtctttttattgccgatcccctcagaagaactcgtcaagaaggcgatagaaggcgatgcgctgcgaatcgggagcggcgataccgtaaagcacgaggaagcggtcagcccattcgccgccaagctcttcagcaatatcacgggtagccaacgctatgtcctgatagcggtcggccgctttacttgtacagctcgtccatgccgagagtgatcccggcggcggtcacgaactccagcaggaccatgtgatcgcgcttctcgttggggtctttgctcagggcggactgggtgctcaggtagtggttgtcgggcagcagcacggggccgtcgccgatgggggtgttctgctggtagtggtcggccagctgcacgctgccgtcctcgatgttgtggcggatcttgaagttcaccttgatgccgttcttctgcttgtcggccatgatatagacgttgtggctgttgtagttgtactccagcttgtgccccaggatgttgccgtcctccttgaagtcgatgcccttcagctcgatgcggttcaccagggtgtcgccctcgaacttcacctcggcgcgggtcttgtagttgccgtcgtccttgaagaagatggtgcgctcctggacgtagccttcgggcatggcggacttgaagaagtcgtgctgcttcatgtggtcggggtagcggctgaagcactgcacgccgtaggtcagggtggtcacgagggtgggccagggcacgggcagcttgccggtggtgcagatgaacttcagggtcagcttgccgtaggtggcatcgccctcgccctcgccggacacgctgaacttgtggccgtttacgtcgccgtccagctcgaccaggatgggcaccaccccggtgaacagctcctcgcccttgctcaccatggtggcgaattcgaagcttgagctcgagatctgagtccggtagcgctagcggatctgacggttcactaaaccagctctgcttatatagacctcccaccgtacacgcctaccgcccatttgcgtcaatggggcggagttgttacgacattttggaaagtcccgttgattttggtgccaaaacaaactcccattgacgtcaatggggtggagacttggaaatccccgtgagtcaaaccgctatccacgcccattgatgtactgccaaaaccgcatcaccatggtaatagcgatgactaatacgtagatgtactgccaagtaggaaagtcccataaggtcatgtactgggcataatgccaggcgggccatttaccgtcattgacgtcaatagggggcgtacttggcatatgatacacttgatgtactgccaagtgggcagtttaccgtaaatactccacccattgacgtcaatggaaagtccctattggcgttactatgggaacatacgtcattattgacgtcaatgggcgggggtcgttgggcggtcagccaggcgggccatttaccgtaagttatgtaacgcggaactccatatatgggctatgaactaatgaccccgtaattgattactattaaattcctgcagttcaggttatttagatgcttagtttttgtacctttcttgttttgtttaggattttgatagtgttagtatttttatatttttgtacgattgcataatgttcttttttatacagttctgttttaataaaatagacgatagctagagacgttagggcagccacaagccagttaggtagcggatagtaggtaggaacagacttttactatttcataacgcgtcaattaccacctgatttggaccaattcacgggatttgtccaaggtggacgggccacctttacttaacccggaaaaggaacatatataatttatgtgtgttcgataaatagccaaatgcctcgtcatcaccggtagacatgataagatacattgatgagtttggacaaaccacaactagaatgcagtgaaaaaaatgctttatttgtgaaatttgtgatgctattgctttatttgtaaccattataagctgcaataaacaagttaacaacaacaaaaaaaaaaaaaaaaaaaaaaaaaaaaaaacgttgactaaaaaaaaaaaaaaaaaaaaaaaaaaaaaaaaaaaaaaaaaaaaaaaaaaaaaaaaaaaaaaaaaaaaaa

SEQ ID NO: 201 - DNA, 3316 bp, synthetic construct
  source 1..3316: mol_type = other DNA
gagtaactatgactctcttaagtctagttacaactgggcatcgctgcagagatcgcacctcctcgtggtcccgctggtagcccttcgaagggtgactaagtcgatctctgccccaggtacggagccgttgggactcaccagtccaacgtaactcctgcctaaattcggtgaaacaaattcctcggtaaaaagccccatgtcgcttccgtctctgtccttgtgtgcaggagaagcatcgatggaggcgttggagctggagctggaagaagtggagtcccagatccgcgcgctggtggtaagacggtcgcggctacgggaacggcttctagccgtacctaatgctaaggccgtctcatcacctaaggtacgtggaaattacaaccacatcattccctctacctcaaccccgcgtccttctctgtccaggcccagcgcacccggggcgcggctcagccaggcgtcgttcacgccgacacccggctaccacggcgcctgggtgcagccgcgcaaggtgcttcccagatcccggggcagaacgtctccgcctgtgttcgagatctccacggagaaccgcttctcccctctccgcgagtcgggtcccgatgtggccatcatcggtgactcgatcgttcgtcacgtccgtgccgcctcctcaaaaggtaataaagtacgtactttctgctttcctggtgcccgtgtgaaaaatatttctacacagattccaaccatcctgggcgctgccgagagccctggtgccgttgtcctccacgtggggacaaacgacaccgggctccggcagtcggagatcctgaagaaggacttcaggagcctgatcgagacggttcgacgcacctcgcccgccacgcagatcatcgtttctgggccgcttcctacctaccgccgaggaaatgaaaggttcagtagacttttagctttgaatgaatggctaataacatggtgtaaagaacagaaattgctctttgctaataactggaatcttttctgggagcgtcctaggctcttccgtcctgacggcctgcaccccagtcgagccggagctgaactcctgtcggacaacatctccagactacttcgcaccatctgagggaggggcgggtctgggtactcgacggatcgatccgaacaaacgacccaacacccgtgcgttttattctgtctttttattgccgatcccctcagaagaactcgtcaagaaggcgatagaaggcgatgcgctgcgaatcgggagcggcgataccgtaaagcacgaggaagcggtcagcccattcgccgccaagctcttcagcaatatcacgggtagccaacgctatgtcctgatagcggtcggccgctttacttgtacagctcgtccatgccgagagtgatcccggcggcggtcacgaactccagcaggaccatgtgatcgcgcttctcgttggggtctttgctcagggcggactgggtgctcaggtagtggttgtcgggcagcagcacggggccgtcgccgatgggggtgttctgctggtagtggtcggccagctgcacgctgccgtcctcgatgttgtggcggatcttgaagttcaccttgatgccgttcttctgcttgtcggccatgatatagacgttgtggctgttgtagttgtactccagcttgtgccccaggatgttgccgtcctccttgaagtcgatgcccttcagctcgatgcggttcaccagggtgtcgccctcgaacttcacctcggcgcgggtcttgtagttgccgtcgtccttgaagaagatggtgcgctcctggacgtagccttcgggcatggcggacttgaagaagtcgtgctgcttcatgtggtcggggtagcggctgaagcactgcacgccgtaggtcagggtggtcacgagggtgggccagggcacgggcagcttgccggtggtgcagatgaacttcagggtcagcttgccgtaggtggcatcgccctcgccctcgccggacacgctgaacttgtggccgtttacgtcgccgtccagctcgaccaggatgggcaccaccccggtgaacagctcctcgcccttgctcaccatggtggcgaattcgaagcttgagctcgagatctgagtccggtagcgctagcggatctgacggttcactaaaccagctctgcttatatagacctcccaccgtacacgcctaccgcccatttgcgtcaatggggcggagttgttacgacattttggaaagtcccgttgattttggtgccaaaacaaactcccattgacgtcaatggggtggagacttggaaatccccgtgagtcaaaccgctatccacgcccattgatgtactgccaaaaccgcatcaccatggtaatagcgatgactaatacgtagatgtactgccaagtaggaaagtcccataaggtcatgtactgggcataatgccaggcgggccatttaccgtcattgacgtcaatagggggcgtacttggcatatgatacacttgatgtactgccaagtgggcagtttaccgtaaatactccacccattgacgtcaatggaaagtccctattggcgttactatgggaacatacgtcattattgacgtcaatgggcgggggtcgttgggcggtcagccaggcgggccatttaccgtaagttatgtaacgcggaactccatatatgggctatgaactaatgaccccgtaattgattactattaaattcctgcagttcaggttatttagatgcttagtttttgtacctttcttgttttgtttaggattttgatagtgttagtatttttatatttttgtacgattgcataatgttcttttttatacagttctgttttaataaaatagacgatagctagagacgttagggcagccacaagccagttaggtagcggatagtaggtaggaacagacttttactatttcataacgcgtcaattaccacctgatttggaccaattcacgggatttgtccaaggtggacgggccacctttacttaacccggaaaaggaacatatataatttatgtgtgttcgataaatagccaaatgcctcgtcatcaccggtagacatgataagatacattgatgagtttggacaaaccacaactagaatgcagtgaaaaaaatgctttatttgtgaaatttgtgatgctattgctttatttgtaaccattataagctgcaataaacaagttaacaacaacaaaaaaaaaaaaaaaaaaaaaaaaaaaaaaacgttgactaaaaaaaaaaaaaaaaaaaaaaaaaaaaaaaaaaaaaaaaaaaaaaaaaaaaaaaaaaaaaaaaaaaaaa

SEQ ID NO: 202 - DNA, 3469 bp, synthetic construct
  source 1..3469: mol_type = other DNA
gagtaactatgactctcttaagtctagttacaactgggcatcgctgcagagatcgcacctcctcgtggtcccgctggtagcccttcgaagggtgactaagtcgatctctgccccaggtacggagccgttgggactcaccagtccaacgtaactcctgcctaaattcggtgaaacaaattcctcggtaaaaagccccatgagccagaacgacactcgcgttcagcgacaacgcgagcaagacgatcgccggctctcattgcaacgaaacaacgcgtacttctcttacgtctccgcgacttctgcagacagcgagcggtcaatcacccataacccgacaagtttaccattgccaacaactcaagaaagagcgcgttcttgctctccctcactactgtcacaaaacccccaatctccaaacacttgcgaaatttctttacgcttacctacggtgactagtactgtgacaacaacaaccactgcaactgcaatcacaacaacaactggaacggtatcgtcagctcgctcaatttcgtcgacgcaagcacttgctcctactgagccagcgatcaaaacaaaaacacaatttaacggttctgctgcgctatcagcaagccaaaacgtaaacaagaatgccgggtccaccatacagactggaatggatcgctacataacaataaaaagaaaacttagccctcaaaattacaaaagtcaacaaacagaaaacaaatcaaaaattacacgcggcaatgctaacatgctcactaacaaaacgccagaaaacaccaacagatttgagctgctggcaaattctactgatgaaagtatacaaccggcaaagtcacctaagaaggtcaagcctcctccaatatacattcgcgaaaaaagctcaagtgcattagtgaacaaaatagccacacttataggagaaaactcattttacgtaatacccttaagaaaagggaacataaatgaaacaaaggttcaaactgaaaccgaggatagccatcgtctactaaccaaattcttggatgaagcaggaaaaaacttttatacataccaactaaaaagcgcaaggggcctacaggttgttctcaaagggattgaggcaactgtttcgaccactgaaatcgtagaagcgctcaaggaaaagaactttagtgcaaaaatggtcatgaacatactaaacaaaaataaggaaccacaaccaatgttcaaaatcgagttggagccagagcgccagacactgaaaaaaaaatgagggaggggcgggtctgggtactcgacggatcgatccgaacaaacgacccaacacccgtgcgttttattctgtctttttattgccgatcccctcagaagaactcgtcaagaaggcgatagaaggcgatgcgctgcgaatcgggagcggcgataccgtaaagcacgaggaagcggtcagcccattcgccgccaagctcttcagcaatatcacgggtagccaacgctatgtcctgatagcggtcggccgctttacttgtacagctcgtccatgccgagagtgatcccggcggcggtcacgaactccagcaggaccatgtgatcgcgcttctcgttggggtctttgctcagggcggactgggtgctcaggtagtggttgtcgggcagcagcacggggccgtcgccgatgggggtgttctgctggtagtggtcggccagctgcacgctgccgtcctcgatgttgtggcggatcttgaagttcaccttgatgccgttcttctgcttgtcggccatgatatagacgttgtggctgttgtagttgtactccagcttgtgccccaggatgttgccgtcctccttgaagtcgatgcccttcagctcgatgcggttcaccagggtgtcgccctcgaacttcacctcggcgcgggtcttgtagttgccgtcgtccttgaagaagatggtgcgctcctggacgtagccttcgggcatggcggacttgaagaagtcgtgctgcttcatgtggtcggggtagcggctgaagcactgcacgccgtaggtcagggtggtcacgagggtgggccagggcacgggcagcttgccggtggtgcagatgaacttcagggtcagcttgccgtaggtggcatcgccctcgccctcgccggacacgctgaacttgtggccgtttacgtcgccgtccagctcgaccaggatgggcaccaccccggtgaacagctcctcgcccttgctcaccatggtggcgaattcgaagcttgagctcgagatctgagtccggtagcgctagcggatctgacggttcactaaaccagctctgcttatatagacctcccaccgtacacgcctaccgcccatttgcgtcaatggggcggagttgttacgacattttggaaagtcccgttgattttggtgccaaaacaaactcccattgacgtcaatggggtggagacttggaaatccccgtgagtcaaaccgctatccacgcccattgatgtactgccaaaaccgcatcaccatggtaatagcgatgactaatacgtagatgtactgccaagtaggaaagtcccataaggtcatgtactgggcataatgccaggcgggccatttaccgtcattgacgtcaatagggggcgtacttggcatatgatacacttgatgtactgccaagtgggcagtttaccgtaaatactccacccattgacgtcaatggaaagtccctattggcgttactatgggaacatacgtcattattgacgtcaatgggcgggggtcgttgggcggtcagccaggcgggccatttaccgtaagttatgtaacgcggaactccatatatgggctatgaactaatgaccccgtaattgattactattaaattcctgcagttcaggttatttagatgcttagtttttgtacctttcttgttttgtttaggattttgatagtgttagtatttttatatttttgtacgattgcataatgttcttttttatacagttctgttttaataaaatagacgatagctagagacgttagggcagccacaagccagttaggtagcggatagtaggtaggaacagacttttactatttcataacgcgtcaattaccacctgatttggaccaattcacgggatttgtccaaggtggacgggccacctttacttaacccggaaaaggaacatatataatttatgtgtgttcgataaatagccaaatgcctcgtcatcaccggtagacatgataagatacattgatgagtttggacaaaccacaactagaatgcagtgaaaaaaatgctttatttgtgaaatttgtgatgctattgctttatttgtaaccattataagctgcaataaacaagttaacaacaacaaaaaaaaaaaaaaaaaaaaaaaaaaaaaaacgttgactaaaaaaaaaaaaaaaaaaaaaaaaaaaaaaaaaaaaaaaaaaaaaaaaaaaaaaaaaaaaaaaaaaaaaa

SEQ ID NO: 203 - DNA, 3289 bp, synthetic construct
  source 1..3289: mol_type = other DNA
gagtaactatgactctcttaagtctagttacaactgggcatcgctgcagagatcgcacctcctcgtggtcccgctggtagcccttcgaagggtgactaagtcgatctctgccccaggtacggagccgttgggactcaccagtccaacgtaactcctgcctaaattcggtgaaacaaattcctcggtaaaaagccccatggcctcaccgtctgtttcacccggtgtctttgtctgttcagcgtgtgaaatgtttagttactcctctgcctcctttagtgaagggaataggtgcagaaagtgtagtttatttatggctatggaggcgagacttagcgagcttgagacgcggttccgcagcttggagttagctggagttgcgtcaggtagccaggagaagctagctgctgcggagccgcctagcgtagctacagctagcggtcccccggcagcagccgagcagccggctagccagggcggctgggtgacggttcgtaggaagcgtagcccaaaacaaaggcccacggtgcaccaccaaccgcttcccgtggctaaccgcttttccccactcggcgacacacccgctgagaaaccgaccctggtaattggcgactctgttttgcgctacgtgaagccgactccagcgaccatagttaagtgcattccgggggccagagcgggcgacatagaagcaaatttacggctgctggcgagacgtaatcgtaaatttggtaaagttattattcacgtcggagccaacgacacccggcttcgtcagtcggaggtcaccaaaattaacttggagtcggtgtgtaactacgcaaaaacgatgtcggactccgtagcattctctggtcccctccccaatctggccagcgaggagatgtttagccgcatgtcgtcgcttcgtcgctggctgtcacggtggtgccccgaaaaccaggtggcctttatagacaattggagcactttttggggaaaacctggtctgattaggagagacggtgtccatcccacacgggatggtgcttctctcatttctagtaatttggctaattttattagacccaaagtgacctgagggaggggcgggtctgggtactcgacggatcgatccgaacaaacgacccaacacccgtgcgttttattctgtctttttattgccgatcccctcagaagaactcgtcaagaaggcgatagaaggcgatgcgctgcgaatcgggagcggcgataccgtaaagcacgaggaagcggtcagcccattcgccgccaagctcttcagcaatatcacgggtagccaacgctatgtcctgatagcggtcggccgctttacttgtacagctcgtccatgccgagagtgatcccggcggcggtcacgaactccagcaggaccatgtgatcgcgcttctcgttggggtctttgctcagggcggactgggtgctcaggtagtggttgtcgggcagcagcacggggccgtcgccgatgggggtgttctgctggtagtggtcggccagctgcacgctgccgtcctcgatgttgtggcggatcttgaagttcaccttgatgccgttcttctgcttgtcggccatgatatagacgttgtggctgttgtagttgtactccagcttgtgccccaggatgttgccgtcctccttgaagtcgatgcccttcagctcgatgcggttcaccagggtgtcgccctcgaacttcacctcggcgcgggtcttgtagttgccgtcgtccttgaagaagatggtgcgctcctggacgtagccttcgggcatggcggacttgaagaagtcgtgctgcttcatgtggtcggggtagcggctgaagcactgcacgccgtaggtcagggtggtcacgagggtgggccagggcacgggcagcttgccggtggtgcagatgaacttcagggtcagcttgccgtaggtggcatcgccctcgccctcgccggacacgctgaacttgtggccgtttacgtcgccgtccagctcgaccaggatgggcaccaccccggtgaacagctcctcgcccttgctcaccatggtggcgaattcgaagcttgagctcgagatctgagtccggtagcgctagcggatctgacggttcactaaaccagctctgcttatatagacctcccaccgtacacgcctaccgcccatttgcgtcaatggggcggagttgttacgacattttggaaagtcccgttgattttggtgccaaaacaaactcccattgacgtcaatggggtggagacttggaaatccccgtgagtcaaaccgctatccacgcccattgatgtactgccaaaaccgcatcaccatggtaatagcgatgactaatacgtagatgtactgccaagtaggaaagtcccataaggtcatgtactgggcataatgccaggcgggccatttaccgtcattgacgtcaatagggggcgtacttggcatatgatacacttgatgtactgccaagtgggcagtttaccgtaaatactccacccattgacgtcaatggaaagtccctattggcgttactatgggaacatacgtcattattgacgtcaatgggcgggggtcgttgggcggtcagccaggcgggccatttaccgtaagttatgtaacgcggaactccatatatgggctatgaactaatgaccccgtaattgattactattaaattcctgcagttcaggttatttagatgcttagtttttgtacctttcttgttttgtttaggattttgatagtgttagtatttttatatttttgtacgattgcataatgttcttttttatacagttctgttttaataaaatagacgatagctagagacgttagggcagccacaagccagttaggtagcggatagtaggtaggaacagacttttactatttcataacgcgtcaattaccacctgatttggaccaattcacgggatttgtccaaggtggacgggccacctttacttaacccggaaaaggaacatatataatttatgtgtgttcgataaatagccaaatgcctcgtcatcaccggtagacatgataagatacattgatgagtttggacaaaccacaactagaatgcagtgaaaaaaatgctttatttgtgaaatttgtgatgctattgctttatttgtaaccattataagctgcaataaacaagttaacaacaacaaaaaaaaaaaaaaaaaaaaaaaaaaaaaaacgttgactaaaaaaaaaaaaaaaaaaaaaaaaaaaaaaaaaaaaaaaaaaaaaaaaaaaaaaaaaaaaaaaaaaaaaa

SEQ ID NO: 204 - DNA, 3628 bp, synthetic construct
  source 1..3628: mol_type = other DNA
gagtaactatgactctcttaagtctagttacaactgggcatcgctgcagagatcgcacctcctcgtggtcccgctggtagcccttcgaagggtgactaagtcgatctctgccccaggtacggagccgttgggactcaccagtccaacgtaactcctgcctaaattcggtgaaacaaattcctcggtaaaaagccccatgaagaacaaatatctaaacattatggcaaaaaatcaaaacactaaaaaacggatattggaacaagacttggagactgaactaagaactggttttaatttcccatctgaaaatgaaaactggcaaagatttattgtactggaatcactgactgatgacatgcccctgaccaaactgtccccttttgcgatccacaaaggaatcacaggaattgcaggaacagtaaaagacattaaaaagctgcgatctggacaaattttggtggaatgtgctaggaaagctaactcagaaaatttactacaagcaacaactttggctggaattactatgaaagcattccctcattctaccctgaacaacagcaaaggtgtaatccgcaccagagaattacaagatatggacgaatctgaaatcgctttagaattaaaaccaataggtgtaatcgacgtaaaaagaataatcatcaaaaaggatgggcagatgattaaaacgggaacatacatcctgaccttcaacagaccacaaccaccagagaaaatcaaacttggatatttaagtgttgctgtagatatattcataccaaatccactgagatgttttaaatgccagaaatttggtcatggatctgcaggatgcaaaaataagacaacatgtcaaaactgtggtgaggatgatcatggaatgaactgcacaaaacctcctaaatgtaaaaactgccttggagatcatgcagcctcatcaaagaattgtcccatttggcataaagagaaagaaatacaaaaaataaaacacacaaggaagatgagttatcctgaagctcgtaaaatagttgaagctcttcctgccttctgtctgaaaaagccctattctgttgcagtcacaccaaaaactcaatcaataagttgtcagacggatctaacttggctattcaaggacaaacctcaaaccataagcaacaccaaaaactcaacttcccaaaaaacaaaaaatgaactcattcaaactggaccaattcaagactcatacctagaacagaaagaatcaaaagtgaaaaagaaaactccaagtacaacaaatcaacaaccaaatcaagataaatgtcgaactcacaaagatgacaatcctaaagatattgaaatgacggagacaacgaccagtcgtagtcgtagtctctcacctaaatgtaaaaataaaggacctgtacctatatttcccacttgagggaggggcgggtctgggtactcgacggatcgatccgaacaaacgacccaacacccgtgcgttttattctgtctttttattgccgatcccctcagaagaactcgtcaagaaggcgatagaaggcgatgcgctgcgaatcgggagcggcgataccgtaaagcacgaggaagcggtcagcccattcgccgccaagctcttcagcaatatcacgggtagccaacgctatgtcctgatagcggtcggccgctttacttgtacagctcgtccatgccgagagtgatcccggcggcggtcacgaactccagcaggaccatgtgatcgcgcttctcgttggggtctttgctcagggcggactgggtgctcaggtagtggttgtcgggcagcagcacggggccgtcgccgatgggggtgttctgctggtagtggtcggccagctgcacgctgccgtcctcgatgttgtggcggatcttgaagttcaccttgatgccgttcttctgcttgtcggccatgatatagacgttgtggctgttgtagttgtactccagcttgtgccccaggatgttgccgtcctccttgaagtcgatgcccttcagctcgatgcggttcaccagggtgtcgccctcgaacttcacctcggcgcgggtcttgtagttgccgtcgtccttgaagaagatggtgcgctcctggacgtagccttcgggcatggcggacttgaagaagtcgtgctgcttcatgtggtcggggtagcggctgaagcactgcacgccgtaggtcagggtggtcacgagggtgggccagggcacgggcagcttgccggtggtgcagatgaacttcagggtcagcttgccgtaggtggcatcgccctcgccctcgccggacacgctgaacttgtggccgtttacgtcgccgtccagctcgaccaggatgggcaccaccccggtgaacagctcctcgcccttgctcaccatggtggcgaattcgaagcttgagctcgagatctgagtccggtagcgctagcggatctgacggttcactaaaccagctctgcttatatagacctcccaccgtacacgcctaccgcccatttgcgtcaatggggcggagttgttacgacattttggaaagtcccgttgattttggtgccaaaacaaactcccattgacgtcaatggggtggagacttggaaatccccgtgagtcaaaccgctatccacgcccattgatgtactgccaaaaccgcatcaccatggtaatagcgatgactaatacgtagatgtactgccaagtaggaaagtcccataaggtcatgtactgggcataatgccaggcgggccatttaccgtcattgacgtcaatagggggcgtacttggcatatgatacacttgatgtactgccaagtgggcagtttaccgtaaatactccacccattgacgtcaatggaaagtccctattggcgttactatgggaacatacgtcattattgacgtcaatgggcgggggtcgttgggcggtcagccaggcgggccatttaccgtaagttatgtaacgcggaactccatatatgggctatgaactaatgaccccgtaattgattactattaaattcctgcagttcaggttatttagatgcttagtttttgtacctttcttgttttgtttaggattttgatagtgttagtatttttatatttttgtacgattgcataatgttcttttttatacagttctgttttaataaaatagacgatagctagagacgttagggcagccacaagccagttaggtagcggatagtaggtaggaacagacttttactatttcataacgcgtcaattaccacctgatttggaccaattcacgggatttgtccaaggtggacgggccacctttacttaacccggaaaaggaacatatataatttatgtgtgttcgataaatagccaaatgcctcgtcatcaccggtagacatgataagatacattgatgagtttggacaaaccacaactagaatgcagtgaaaaaaatgctttatttgtgaaatttgtgatgctattgctttatttgtaaccattataagctgcaataaacaagttaacaacaacaaaaaaaaaaaaaaaaaaaaaaaaaaaaaaacgttgactaaaaaaaaaaaaaaaaaaaaaaaaaaaaaaaaaaaaaaaaaaaaaaaaaaaaaaaaaaaaaaaaaaaaaa

SEQ ID NO: 205 - DNA, 42 bp, synthetic construct
  source 1..42: mol_type = other DNA
cgcctcccgggttcaagcgattctcctgcctcagcctcccga

SEQ ID NO: 206 - DNA, 134 bp, synthetic construct
  source 1..134: mol_type = other DNA
gctcgctttcttgctgtccaatttctattaaaggttcctttgttccctaagtccaactactaaactgggggatattatgaagggccttgagcatctggattctgcctaataaaaaacatttattttcattgcaa

SEQ ID NO: 207 - DNA, 134 bp, synthetic construct; identical to SEQ ID NO: 206
  source 1..134: mol_type = other DNA

SEQ ID NO: 208 - DNA, 111 bp, synthetic construct
  source 1..111: mol_type = other DNA
gctggagcctcggtggccatgcttcttgccccttgggcctccccccagcccctcctccccttcctgcacccgtacccccgtggtctttgaataaagtctgagtgggcggca

SEQ ID NO: 209-214 - skipped (6 entries)

SEQ ID NO: 215 - DNA, 130 bp, Taeniopygia guttata
  source 1..130: mol_type = genomic DNA
gtctagttacaactgggcatcgctgcagagatcgcacctcctcgtggtcccgctggtagcccttcgaagggtgactaagtcgatctctgccccaggtacggagccgttgggactcaccagtccaacgtaa

SEQ ID NO: 216 - DNA, 325 bp, Taeniopygia guttata
  source 1..325: mol_type = genomic DNA
ttcaggttatttagatgcttagtttttgtacctttcttgttttgtttaggattttgatagtgttagtatttttatatttttgtacgattgcataatgttcttttttatacagttctgttttaataaaatagacgatagctagagacgttagggcagccacaagccagttaggtagcggatagtaggtaggaacagacttttactatttcataacgcgtcaattaccacctgatttggaccaattcacgggatttgtccaaggtggacgggccacctttacttaacccggaaaaggaacatatataatttatgtgtgttcgataaa

SEQ ID NO: 217 - DNA, 247 bp, Zonotrichia albicollis
  source 1..247: mol_type = genomic DNA
cgacttgagaaggtctggttacaactgggcatagctgcagagatcgcgcctcctcgtggccccgctggtaagcccttaacagggtgactaagtcgatctctgccccagtccaggagccgctgggtttcaccagcccagcgattccttccaaattcggtgaaacaaattcctcggtaaaagccgcgtggcttattgcctgaaacctggccccccggtttcagacaggggcaaagagttcggaagtgga

SEQ ID NO: 218 - DNA, 350 bp, Zonotrichia albicollis
  source 1..350: mol_type = genomic DNA
gtagtcacattgcactttctgtaacttgcactgggtgtgggatgtgggcctggggtgtgggttatggggtatatatgtgggatattctggtgggaatgtccattcactgtatgcctatctttttaataaaaagacggtagctaggttcgcgaagcagccacaagccaatagccagttaggtagctcatagtgggtaggtgacaggaacctttgactcagaacgcgtccattaacatctagaacggaccaaacttcggacatgcaccgattaaccggatttgtccaaggtggacgggccacctttacttaacccggaaagggaacatatatagttatatgtgttcgtaata

SEQ ID NO: 219 - DNA, 156 bp, Parhyale hawaiensis
  source 1..156: mol_type = genomic DNA
cccccccgcaggtgccaccttgacgtggtgggggcttagctgctccaatgatgactgagggctgtgctggcggtagtgtaactaccggcaggtccaaccaagccagagaggcctcagctgaggagcacaaccaagagcacctaacccattagcatt

SEQ ID NO: 220 - DNA, 91 bp, Parhyale hawaiensis
  source 1..91: mol_type = genomic DNA
acacttgggaagtgttcgacttgtggttttgcgaaacgaaatccagcatatctatcttgtttgctgtgccatacaacgtcgttgtgttgat

SEQ ID NO: 221-229 - skipped (9 entries)

SEQ ID NO: 230 - protein, 965 aa, synthetic construct
MCFLIPVVTNTRKTREVRCKRNPHNLRSIHVSTISQLSLSVGLWNCQSAVNKADFITSIATYSDYNLMALTRTWLRPEDTATHATLSANFSFSHTPRQIGRGGGTGLLISKEWKFTLIPSLPTISSFEFHAVTIIHPFYINVVVIYRPPGKHGRFLMELDVLLSSFSNFDTPLLVLGHFNIRVDKPQRHDFQTLLASFDLKRAPTSATHKSGNQLDLIYTRHCFTDQTIVTPLQMSDHFLLSLNIHITPEPPHTPTLVTFRRNLRSLSPNRLSTIVSDSLPPSRKLTALDSNSATNTLCSTLASCLDRLCPLASRPARASPPAPWLSDALREHRSKLRAAERIWRKTKNPAHLLTYQTLLSSFSAEVTSAKQTYYRLKINNATNPRLLFKTFSSLLYPPPPPASSTLTTDDFATFFCTKTAKISAQFAAPTTNTQDTTPTPHTLTSFSQLSESEVSKLVLSSHATTCPLDPIPSHLLQAISPAVIPTLTHIINTSLDSGLFPTTFKQARVTPLLKKPNLDHTLLENYRPVSLLPFMAKILEKVVFNQVLDFLTQNNLMDNKQSGFKKGHSTETALLSVVEDLRLAKADSKSSVLILLDLSAAFDTVNHQILLSTLESLGVAGTVIQWFRSYLSDRSFRVSWRGEVSNLQHLNTGVPQGSVLGPLLFSIYTSSLGPVIQRHGFSYHCYADDTQLYLSFHPDDPSVPARISACLLDISHWMKDHHLQLNLAKTEMLVVSSNMTLHHNFSIQMDGATITASKMVKSLGVTIDDQLNFSDHISRTARSCRFALYNIRKIRPFLSEHAAQLLVQALVLSKLDYCNSLLALLPANKIKPLQLLQNAAARVVFNEPKRAHVTPLLVRLHWLPVAARIKFKTLMFAYKVTSGLAPSYLHSLLQIYVPSRNLRSVNERRLVVPSQRGKKSLRRTLTLNLPSWWNELPNCIRTAESLAIFKKRLKTQLFSLHFTS

SEQ ID NO: 231 - protein, 1390 aa, synthetic construct
MASCPKPGPPVSAGAMSLESGLTTHSVLAIERGPNSLANSGSDFGGGGLGLPLRLLRVSVGTQTSRSDWVDLVSWSHPGPTSKSQQVDLVSLFPKHRVDLLSKNDQVDLVAQFLPSKFPPNLAENDLALLVNLEFYRSDLHVYECVHFAAHWEGLSGLPEVYEQLAPQPCVGETLHSSLPRDSELFVPEEGSSEKESEDAPKTSPPTPGKHGLEQTGEEKVMVTVPDKNPPCPCCGTRVNSVLNLIEHLKVSHGKRGVCFRCAKCGKENSNYHSVVCHFKKCRGPETEKAPAGEWICEVCNRDFTTKIGLGQHKRLAHPAVRNQERIVASQPKETSNRGAHKRCWTKEEEELLIRLEAQFEGNKNINKLIAEHITTKTAKQISDKRRLLSRKPAEEPREEPGTCHHTRRAAASLRTEPEMSHHAQAEDRDNGPGRRPLPGRAAAGGRTMDEIRRHPDKGNGQQRPTKQKSEEQLQAYYKKTLEERLSAGALNTFPRAFKQVMEGRDIKLVINQTAQDCFGCLESISQIRTATRDKKDTVTREKHPKKPFQKWMKDRAIKKGNYLRFQRLFYLDRGKLARIILDDIECLSCDIPLSEIYSVFKTRWETTGSFKSLGDFKTYGKADNTAFRELITAKEIEKNVQEMSKGSAPGPDGITLGDVVKMDPEFSRTMEIFNLWLTTGKIPDMVRGCRTVLIPKSSKPDRLKDINNWRPITIGSILLRLFSRIVTARLSKACPLNPRQRGFIRAAGCSENLKLLQTIIWSAKREHRPLGVVFVDIAKAFDTVSHQHIIHALQQREVDPHIVGLVSNMYENISTYITTKRNTHTDKIQIRVGVKQGDPMSPLLFNLAMDPLLCKLEESGKGYHRGQSSITAMAFADDLVLLSDSWENMNTNISILETFCNLTGLKTQGQKCHGFYIKPTKDSYTINDCAAWTINGTPLNMIDPGESEKYLGLQFDPWIGIARSGLSTKLDFWLQRIDQAPLKPLQKTDILKTYTIPRLIYIADHSEVKTALLETLDQKIRTAVKEWLHLPPCTCDAILYSSTRDGGLGITKLAGLIPSVQARRLHRIAQSSDDTMKCFMEKEKMEQLHKKLWIQAGGDRENIPSIWEAPPSSEPPNNVSTNSEWEAPTQKDKFPKPCNWRKNEFKKWTKLASQGRGIVNFERDKISNHWIQYYRRIPHRKLLTALQLRANVYPTREFLARGRQDQYIKACRHCDADIESCAHIIGNCPVTQDARIKRHNYICELLLEEAKKKDWVVFKEPHIRDSNKELYKPDLIFVKDARALVVDVTVRYEAAKSSLEEAAAEKVRKYKHLETEVRHLTNAKDVTFVGFPLGARGKWHQDNFKLLTELGLSKSRQVKMAETFSTVALFSSVDIVHMFASRARKSMVM

SEQ ID NO: 232 - protein, 1390 aa, synthetic construct
MASCPKPGPPVSAGAMSLESGLTTHSVLAIERGPNSLANSGSDFGGGGLGLPLRLLRVSVGTQTSRSDWVDLVSWSHPGPTSKSQQVDLVSLFPKHRVDLLSKNDQVDLVAQFLPSKFPPNLAENDLALLVNLEFYRSDLHVYECVHFAAHWEGLSGLPEVYEQLAPQPCVGETLHSSLPRDSELFVPEEGSSEKESEDAPKTSPPTPGKHGLEQTGEEKVMVTVPDKNPPCPCCGTRVNSVLNLIEHLKVSHGKRGVCFRCAKCGKENSNYHSVVCHFPKCRGPETEKAPAGEWICEVCNRDFTTKIGLGQHKRLAHPAVRNQERIVASQPKETSNRGAHKRCWTKEEEELLIRLEAQFEGNKNINKLIAEHITTKTAKQISDKRRLLSRKPAEEPREEPGTCHHTRRAAASLRTEPEMSHHAQAEDRDNGPGRRPLPGRAAAGGRTMDEIRRHPDKGNGQQRPTKQKSEEQLQAYYKKTLEERLSAGALNTFPRAFKQVMEGRDIKLVINQTAQDCFGCLESISQIRTATRDKKDTVTREKHPKKPFQKWMKKRAIKKGNYLRFQRLFYLDRGKLAKIILDDIECLSCDIPLSEIYSVFKTRWETTGSFKSLGDFKTYGKADNTAFRELITAKEIEKNVQEMSKGSAPGPDGITLGDVVKMDPEFSRTMEIFNLWLTTGKIPDMVRGCRTVLIPKSSKPDRLKDINNWRPITIGSILLRLFSRIVTARLSKACPLNPRQRGFIRAAGCSENLKLLQTIIWSAKREHRPLGVVFVDIAKAFDTVSHQHIIHALQQREVDPHIVGLVSNMYENISTYITTKRNTHTDKIQIRVGVKQGDPMSPLLFNLAMDPLLCKLEESGKGYHRGQSSITAMAFADDLVLLSDSWENMNTNISILETFCNLTGLKTQGQKCHGFYIKPTKDSYTINDCAAWTINGTPLNMIDPGESEKYLGLQFDPWIGIARSGLSTKLDFWLQRIDQAPLKPLQKTDILKTYTIPRLIYIADHSEVKTGLLETLDQKIRTAVKEWLHLPPCTCDAILYSSTRDGGLGITKLAGLIPSVQARRLHRIAQSSDDTMKCFMEKEKMEQLHKKLWIQAGGDRENIPSIWEAPPSSEPPNNVSTNSEWEAPTQKDKFPKPCNWRKNEFKKWTKLASQGRGIVNFERDKISNHWIQYYRRIPHRKLLTALQLRANVYPTREFLARGRQDQYIKACRHCDADIESCAHIIGNCPVTQDARIKRHNYICELLLEEAKKKDWVVFKEPHIRDSNKELYKPDLIFVKDARALVVDVTVRYEAAKSSLEEAAAEKVRKYKHLETEVRHLTNAKDVTFVGFPLGARGKWHQDNFKLLTELGLSKSRQVKMAETFSTVALFSSVDIVHMFASRARKSMVM

SEQ ID NO: 233 - protein, 1390 aa, synthetic construct
MASCPKPGPPVSAGAMSLESGLTTHSVLAIERGPNSLANSGSDFGGGGLGLPLRLLRVSVGTQTSRSDWVDLVSWSHPGPTSKSQQVDLVSLFPKHRVDLLSKNDQVDLVAQFLPSKFPPNLAENDLALLVNLEFYRSDLHVYEGVHFAAHWEGLSGLPEVYEQLAPQPCVGETLHSSLPRDSELFVPEEGSSEKESEDAPKTSPPTPGKHGLEQTGEEKVMVTVPDKNPPCPCCGTRVNSVLNLIEHLKVSHGKRGVCFRCAKCGKENSNYHSVVCHFPKCRGPETEKAPAGEWICEVCNRDFTTKIGLGQHKRLAHPAVRNQERIVASQPKETSNRGAHKRCWTKEEEELLIRLEAQFEGNKNINKLIAEHITTKTAKQISDKRRLLSRKPAEEPREEPGTCHHTRRAAASLRTEPEMSHHAQAEDRDNGPGRRPLPGRAAAGGRTMDEIRRHPDKGNGQQRPTKQKSEEQLQAYYKKTLEERLSAGALNTFPRAFKQVMEGRDIKLVINQTAQDCFGCLESISQIRTATRDKKDTVTREKHPKKPFQKWMKDRAIKKGNYLRFQRLFYLDRGKLAKIILDDIECLSCDIPLSEIYSVFKTRWETTGSFKSLGDFKTYGKADNTAFRELITAKEIEKNVQEMSKGSAPGPDGITLGDVVKMDPEFSRTMEIFNLWLTTGKIPDMVRGCRTVLIPKSSKPDRLKDINNWRPITIGSILLRLFSRIVTARLSKACPLNPRQRGFIRAAGCSENLKLLQTIIWSAKREHRPLGVVFVDIAKAFDTVSHQHIIHALQQREVDPHIVGLVSNMYENISTYITTKRNTHTDKIQIRVGVKQGDPMSPLLFNLAMDPLLCKLEESGKGYHRGQSSITAMAFADDLVLLSDSWENMNTNISILETFCNLTGLKTQGQKCHGFYIKPTKDSYTINDCAAWTINGTPLNMIDPGESEKYLGLQFDPWIGIARSGLSTKLDFWLQRIDQAPLKPLQKTDILKTYTIPRLIYIADHSEVKTALLETLDQKIRTAVKEWLHLPPCTCDAILYSSTRDGGLGITKLAGLIPSVQARRLHRIAQSSDDTMKCFMEKEKMEQLHKKLWIQAGGDRENIPSIWEAPPSSEPPNNVSTNSEWEAPTQKDKFPKPCNWRKNEFKKWTKLASQGRGIVNFERDKISNHWIQYYRRIPHRKLLTALQLRANVYPTREFLARGRQDQYIKACRHCDADIESCAHIIGNCPVTQDARIKRHNYICELLLEEAKKKDWVVFKEPHIRDSNKELYKPDLIFVKDARALVVDVTVRYEAAKSSLEEAAAEKVRKYKHLETEVRHLTNAKDVTFVGFPLGARGKWHQDNFKLLTELGLSKSRQVKMAETFSTVALFSSVDIVHMFASRARKSMVM

SEQ ID NO: 234 - protein, 1390 aa, synthetic construct
MASCPKPGPPVSAGAMSLESGLTTHSVLAIERGPNSLANSGSDFGGGGLGLPLRLLRVSVGTQTSRSDWVDLVSWSHPGPTSKSQQVDLVSLFPKHRVDLLSKNDQVDLVAQFLPSKFPPNLAENDLALLVNLEFYRSDLHVYECVHFAAHWEGLSGLPEVYEQLAPQPCVGETLHSSLPRDSELFVPEEGSSEKESEDAPKTSPPTPGKHGLEQTGEEKVMVTVPDKNPPCPCCGTRVNSVLNLIEHLKVSHGKRGVCFRCAKCGKENSNYHSVVCHFKKCRGPETEKAPAGEWICEVCNRDFTTKIGLGQHKRLAHPAVRNQERIVASQPKETSNRGAHKRCWTKEEEELLIRLEAQFEGNKNINKLIAEHITTKTAKQISDKRRLLSRKPAEEPREEPGTCHHTRRAAASLRTEPEMSHHAQAEDRDNGPGRRPLPGRAAAGGRTMDEIRRHPDKGNGQQRPTKQKSEEQLQAYYKKTLEERLSAGALNTFPRAFKQVMEGRDIKLVINQTAQDCFGCLESISQIRTATRDKKDTVTREKHPKKPFQKWMKKRAIKKGNYLRFQRLFYLDRGKLAKIILDDIECLSCDIPLSEIYSVFKTRWETTGSFKSLGDFKTYGKADNTAFRELITAKEIEKNVQEMSKGSAPGPDGITLGDVVKMDPEFSRTMEIFNLWLTTGKIPDMVRGCRTVLIPKSSKPDRLKDINNWRPITIGSILLRLFSRIVTARLSKACPLNPRQRGFIRAAGCSENLKLLQTIIWSAKREHRPLGVVFVDIAKAFDTVSHQHIIHALQQREVDPHIVGLVSNMYENISTYITTKRNTHTDKIQIRVGVKQGDPMSPLLFNLAMDPLLCKLEESGKGYHRGQSSITAMAFADDLVLLSDSWENMNTNISILETFCNLTGLKTQGQKCHGFYIKPTKDSYTINDCAAWTINGTPLNMIDPGESEKYLGLQFDPWIGIARSGLSTKLDFWLQRIDQAPLKPLQKTDILKTYTIPRLIYIADHSEVKSALLETLDQKIRTAVKEWLHLPPCTCDAILYSSTRDGGLGITKLAGLIPSVQARRLHRIAQSSDDTMKCFMEKEKMEQLHKKLWIQAGGDRENIPSIWEAPPSSEPPNNVSTNSEWEAPTQKDKFPKPCNWRKNEFKKWTKLASQGRGIVNFERDKISNHWIQYYRRIPHRKLLTALQLRANVYPTREFLARGRQDQYIKACRHCDADNESCAHIIGNCPVTQDARIKRHNYICELLLEEAKKKDWVVFKEPHIRDSNKELYKPDLIFVKDARALVVDVTVRYEAAKSSLEEAAAEKVRKYKHLETEVRHLTNAKDVTFVGFPLGARGKWHQDNFKLLTELGLSKSRQVKMAETFSTVALFSSVDIVHMFASRARKSMVM

SEQ ID NO: 235 - protein, 1390 aa, synthetic construct
MASCPKPGPPVSAGAMSLESGLTTHSVLAIERGPNSLANSGSDFGGGGLGLPLRLLRVSVGTQTSRSDWVDLVSWSHPGPTSKSQQVDLVSLFPKHRVDLLSKNDQVDLVAQFLPSKFPPNLAENDLALLVNLEFYRSDLHVYEGVHFAAHWEGLSGLPEVYEQLAPQPCVGETLHSSLPRDSELFVPEEGSSEKESEDAPKTSPPTPGKHGLEQTGEEKVMVTVPDKNPPCPCCGTRVNSVLNLIEHLKVSHGKRRVCFRCAKCGKENSNYHSVVCHFPKCRGPETEKAPAGEWICEVCNRDFTTKIGLGQHKRLAHPAVRNQERIVASQPKETSNRGAHKRCWTKEEEELLIRLEAQFEGNKNINKLIAEHITTKTAKQISDKRRLLSRKPAEEPREEPGTCHHTRRAAASLRTEPEMSHHAQAEDRDNGPGRRPLPGRAAAGGRTMDEIRRHPDKGNGQQRPTKQKSEEQLQAYYKKTLEERLSAGALNTFPRAFKQVMEGRDIKLVINQTAQDCFGCLESISQIRTATRDKKDTVTREKHPKKPFQKWMKDRAIKKGNYLRFQRLFYLDRGKLAKIILDDIECLSCDIPLSEIYSVFKTRWETTGSFKSLGDFKTYGKADNTAFRELITAKEIEKNVQEMSKGSAPGPDGITLGDVVKMDPEFSRTMEIFNLWLTTGKIPDMVRGCRTVLIPKSSKPDRLKDINNWRPITIGSILLRLFSRIVTARLSKACPLNPRQRGFIRAAGCSENLKLLQTIIWSAKREHRPLGVVFVDIAKAFDTVSHQHIIHALQQREVDPHIVGLVSNMYENISTYITTKRNTHTDKIQIRVGVKQGDPMSPLLFNLAMDPLLCKLEESGKGYHRGQSSITAMAFADDLVLLSDSWENMNTNISILETFCNLTGLKTQGQKCHGFYIKPTKDSYTINDCAAWTINGTPLNMIDPGESEKYLGLQFDPWIGIARSGLSTKLDFWLQRIDQAPLKPLQKTDILKTYTIPRLIYIADHSEVKTALLETLDQKIRTAVKEWLHLPPCTCDAILYSSTRDGGLGITKLAGLIPSVQARRLHRIAQSSDDTMKCFMEKEKMEQLHKKLWIQAGGDRENIPSIWEAPPSSEPPNNVSTNSEWEAPTQKDKFPKPCNWRKNEFKKWTKLASQGRGIVNFERDKISNHWIQYYRRIPHRKLLTALQLRANVYPTREFLARGRQDQYIKACRHCDADIESCAHIIGNCPVTQDARIKRHNYICELLLEEAKKKDWVVFKEPHIRDSNKELYKPDLIFVKDARALVVDVTVRYEAAKSSLEEAAAEKVRKYKHLETEVRHLTNAKDVTFVGFPLGARGKWHQDNFKLLTELGLSKSRQVKMAETFSTVALFSSVDIVHMFASRARKSMVM

SEQ ID NO: 236 - protein, 1390 aa, synthetic construct
MASCPKPGPPVSAGAMSLESGLTTHSVLAIERGPNSLANSGSDFGGGGLGLPLRLLRVSVGTQTSRSDWVDLVSWSHPGPTSKSQQVDLVSLFPKHRVDLLSKNDQVDLVAQFLPSKFPPNLAENDLALLVNLEFYRSDLHVYECVHFAAHWEGLSGLPEVYEQLAPQPCVGETLHSSLPRDSELFVPEEGSSEKESEDAPKTSPPTPGKHGLEQTGEEKVMVTVPDKNPPCPCCGTRVNSVLNLIEHLKVSHGKRGVCFRCAKCGKENSNYHSVVCHFPKCRGPETEKAPAGEWICEVCNRDFTTKIGLGQHKRLAHPAVRNQERIVASQPKETSNRGAHKRCWTKEEEELLIRLEAQFEGNKNINKLIAEHITTKTAKQISDKRRLLSRKPAEEPREEPGTCHHTRRAAASLRTEPEMSHHAQAEDRDNGPGRRPLPGRAAAGGRTMDEIRRHPDKGNGQQRPTKQKSEEQLQAYYKKTLEERLSAGALNTFPRAFKQVMEGRDIKLVINQTAQDCFGCLESISQIRTATRDKKDTVTREKHPKKPFQKWMKDRAIKKGNYLRFQRLFYLDRGKLAKIILDDIECLSCDIPLSEIYSVFKTRWETTGSFKSLGDFKTYGKADNTAFRELITAKEIEKNVQEMSKGSAPGPDGITLGDVVKMDPEGSRTMEIFNLWLTTGKIPDMVRGCRTVLIPKSSKPDRLKDINNWRPITIGSILLRLFSRIVTARLSKACPLNPRQRGFIRAAGCSENLKLLQTIIWSAKREHRPLGVVFVDIAKAFDTVSHQHIIHALQQREVDPHIVGLVSNMYENISTYITTKRNTHTDKIQIRVGVKQGDPMSPLLFNLAMDPLLCKLEESGKGYHRGQSSITAMAFADDLVLLSDSWENMNTNISILETFCNLTGLKTQGQKCHGFYIKPTKDSYTINDCAAWTINGTPLNMIDPGESEKYLGLQFDPWIGIARSGLSTKLDFWLQRIDQAPLKPLQKTDILKTYTIPRLIYIADHSEVKTALLETLDQKIRTAVKEWLHLPPCTCDAILYSSTRDGGLGITKLAGLIPSVQARRLHRIAQSSDDTMKCFMEKEKMEQLHKKLWIQAGGDRENIPSIWEAPPSSEPPNNVSTNSEWEAPTQKDKFPKPCNWRKNEFKKWTKLASQGRGIVNFERDKISNHWIQYYRRIPHRKLLTALQLRANVYPTREFLARGRQDQYIKACRHCDADIESCAHIIGNCPVTQDARIKRHNYICELLLEEAKKKDWVVFKEPHIRDSNKELYKPDLIFVKDARALVVDVTVRYEAAKSSLEEAAAEKVRKYKHLETEVRHLTNAKDVTFVGFPLGARGKWHQDNFKLLTELGLSKSRQVKMAETFSTVALFSSVDIVHMFASRARKSMVM

SEQ ID NO: 237 - protein, 1390 aa, synthetic construct
MASCPKPGPPVSAGAMSLESGLTTHSVLAIERGPNSLANSGSDFGGGGLGLPLRLLRVSVGTQTSRSDWVDLVSWSHPGPTSKSQQVDLVSLFPKHRVDLLSKNDQVDLVAQFLPSKFPPNLAENDLALLVNLEFYRSDLHVYECVHFAAHWEGLSGLPEVYEQLAPQPCVGETLHSSLPRDSELFVPEEGSSEKESEDAPKTSPPTPGKHGLEQTGEEKVMVTVPDKNPPCPCCGTRVNSVLNLIEHLKVSHGKRGVCFRCAKCGKENSNYHSVVCHFPKCRGPETEKAPAGEWICEVCNRDFTTKIGLGQHKRLAHPAVRNQERIVASQPKETSNRGAHKRCWTKEEEELLIRLEAQFEGNKNINKLIAEHITTKTAKQISDKRRLLSRKPAEEPREEPGTCHHTRRAAASLRTEPEMSHHAQAEDRDNGPGRRPLPGRAAAGGRTMDEIRRHPDKGNGQQRPTKQKSEEQLQAYYKKTLEERLSAGALNTFPRAFKQVMEGRDIKLVINQTAQDCFGCLESISQIRTATRDKKDTVTREKHPKKPFQKWMKDRAIKKGNYLRFQRLFYLDRGKLAKIILDDIECLSCDIPLSEIYSVFKTRWETTGSFKSLGDFKTYGKADNTAFRELITAKEIEKNVQEMSKGSAPGPDGITLGDVVKMDPEFSRTMEIFNLWLTTGKIPDMVRGCRTVLIPKSSDPDRLKDINNWRPITIGSILLRLFSRIVTARLSKACPLNPRQRGFIRAAGCSENLKLLQTIIWSAKREHRPLGVVFVDIAKAFDTVSHQHIIHALQQREVDPHIVGLVSNMYENISTYITTKRNTHTDKIQIRVGVKQGDPMSPLLFNLAMDPLLCKLEESGKGYHRGQSSITAMAFADDLVLLSDSWENMNTNISILETFCNLTGLKTQGQKCHGFYIKPTKDSYTINDCAAWTINGTPLNMIDPGESEKYLGLQFDPWIGIARSGLSTKLDFWLQRIDQAPLKPLQKTDILKTYTIPRLIYIADHSEVKTALLETLDQKIRTAVKEWLHLPPCTCDAILYSSTRDGGLGITKLAGLIPSVQARRLHRIAQSSDDTMKCFMEKEKMEQLHKKLWIQAGGDRENIPSIWEAPPSSEPPNNVSTNSEWEAPTQKDKFPKPCNWRKNEFKKWTKLASQGRGIVNFERDKISNHWIQYYRRIPHRKLLTALQLRANVYPTREFLARGRQDQYIKACRHCDADIESCAHIIGNCPVTQDARIKRHNYICELLLEEAKKKDWVVFKEPHIRDSNKELYKPDLIFVKDARALVVDVTVRYEAAKSSLEEAAAEKVRKYKHLETEVRHLTNAKDVTFVGFPLGARGKWHQDNFKLLTELGLSKSRQVKMAETFSTVALFSSVDIVHMFASRARKSMVM

SEQ ID NO: 238 - protein, 1390 aa, synthetic construct
MASCPKPGPPVSAGAMSLESGLTTHSVLAIERGPNSLANSGSDFGGGGLGLPLRLLRVSVGTQTSRSDWVDLVSWSHPGPTSKSQQVDLVSLFPKHRVDLLSKNDQVDLVAQFLPSKFPPNLAENDLALLVNLEFYRSDLHVYECVHKAAHWEGLSGLPEVYEQLAPQPCVGETLHSSLPRDSELFVPEEGSSEKESEDAPKTSPPTPGKHGLEQTGEEKVMVTVPDKNPPCPCCGTRVNSVLNLIEHLKVSHGKRGVCFRCAKCGKENSNYHSVVCHFPKCRGPETEKAPAGEWICEVCNRDFTTKIGLGQHKRLAHPAVRNQERIVASQPKETSNRGAHKRCWTKEEEELLIRLEAQFEGNKNINKLIAEHITTKTAKQISDKRRLLSRKPAEEPREEPGTCHHTRRAAASLRTEPEMSHHAQAEDRDNGPGRRPLPGRAAAGGRTMDEIRRHPDKGNGQQRPTKQKSEEQLQAYYKKTLEERLSAGALNTFPRAFKQVMEGRDIKLVINQTAQDCFGCLESISQIRTATRDKKDTVTREKHPKKPFQKWMKDRAIKKGNYLRFQRLFYLDRGKLAKIILDDIECLSCDIPLSEIYSVFKTRWETTGSFKSLGDFKTYGKADNTAFRELITAKEIEKNVQEMSKGSAPGPDGITLGDVVKMDPEFSRTMEIFNLWLTTGKIPDMVRGCRTVLIPKSSKPDRLKDINNWRPITIGSILLRLFSRIVTARLSKACPLNPRQRGFIRAAGCSENLKLLQTIIWSAKREHRPLGVVFVDIAKAFDTVSHQHIIHALQQREVDPHIVGLVSNMYENISTYITTKRNTHTDKIQIRVGVKQGDPMSPLLFNLAMDPLLCKLEESGKGYHRGQSSITAMAFADDLVLLSDSWENMNTNISILETFCNLTGLKTQGQKCHGFYIKPTKDSYTINDCAAWTINGTPLNMIDPGESEKYLGLQFDPWIGIARSGLSTKLDFWLQRIDQAPLKPLQKTDILKTYTIPRLIYIADHSEVKTALLETLDQKIRTAVKEWLHLPPCTCDAILYSSTRDGGLGITKLAGLIPSVQARRLHRIAQSSDDTMKCFMEKEKMEQLHKKLWIQAGGDRENIPSIWEAPPSSEPPNNVSTNSEWEAPTQKDKFPKPCNWRKNEFKKWTKLASQGRGIVNFERDKISNHWIQYYRRIPHRKLLTALQLRANVYPTREFLARGRQDQYIKACRHCDADIESCAHIIGNCPVTQDARIKRHNYICELLLEEAKKKDWVVFKEPHIRDSNKELYKPDLIFVKDARALVVDVTVRYEAAKSSLEEAAAEKVRKYKHLETEVRHLTNAKDVTFVGFPLGARGKWHQDNFKLLTELGLSKSRQVKMAETFSTVALFSSVDIVHMFASRARKSMVM

SEQ ID NO: 239-249 - skipped (11 entries)

SEQ ID NO: 250 - protein, 1345 aa, synthetic construct
MPKRKVSSAEGAAKEEPKRRSARLSAKPPAKVEAKPKKAAAKDKSSDKKVQTKGKRGAKGKQAEVANQETKEDLPAENGETKTEESPASDEAGEKEAKSDSGSETPGTSESATPESYEQLAPQPCVGETLHSSLPRDSELFVPEEGSSEKESEDAPKTSPPTPGKHGLEQTGEEKVMVTVPDKNPPCPCCGTRVNSVLNLIEHLKVSHGKRGVCFRCAKCGKENSNYHSVVCHFPKCRGPETEKAPAGEWICEVCNRDFTTKIGLGQHKRLAHPAVRNQERIVASQPKETSNRGAHKRCWTKEEEELLIRLEAQFEGNKNINKLIAEHITTKTAKQISDKRRLLSRKPAEEPREEPGTCHHTRRAAASLRTEPEMSHHAQAEDRDNGPGRRPLPGRAAAGGRTMDEIRRHPDKGNGQQRPTKQKSEEQLQAYYKKTLEERLSAGALNTFPRAFKQVMEGRDIKLVINQTAQDCFGCLESISQIRTATRDKKDTVTREKHPKKPFQKWMKDRAIKKGNYLRFQRLFYLDRGKLAKIILDDIECLSCDIPLSEIYSVFKTRWETTGSFKSLGDFKTYGKADNTAFRELITAKEIEKNVQEMSKGSAPGPDGITLGDVVKMDPEFSRTMEIFNLWLTTGKIPDMVRGCRTVLIPKSSKPDRLKDINNWRPITIGSILLRLFSRIVTARLSKACPLNPRQRGFIRAAGCSENLKLLQTIIWSAKREHRPLGVVFVDIAKAFDTVSHQHIIHALQQREVDPHIVGLVSNMYENISTYITTKRNTHTDKIQIRVGVKQGDPMSPLLFNLAMDPLLCKLEESGKGYHRGQSSITAMAFADDLVLLSDSWENMNTNISILETFCNLTGLKTQGQKCHGFYIKPTKDSYTINDCAAWTINGTPLNMIDPGESEKYLGLQFDPWIGIARSGLSTKLDFWLQRIDQAPLKPLQKTDILKTYTIPRLIYIADHSEVKTALLETLDQKIRTAVKEWLHLPPCTCDAILYSSTRDGGLGITKLAGLIPSVQARRLHRIAQSSDDTMKCFMEKEKMEQLHKKLWIQAGGDRENIPSIWEAPPSSEPPNNVSTNSEWEAPTQKDKFPKPCNWRKNEFKKWTKLASQGRGIVNFERDKISNHWIQYYRRIPHRKLLTALQLRANVYPTREFLARGRQDQYIKACRHCDADIESCAHIIGNCPVTQDARIKRHNYICELLLEEAKKKDWVVFKEPHIRDSNKELYKPDLIFVKDARALVVDVTVRYEAAKSSLEEAAAEKVRKYKHLETEVRHLTNAKDVTFVGFPLGARGKWHQDNFKLLTELGLSKSRQVKMAETFSTVALFSSVDIVHMFASRARKSMVM

SEQ ID NO: 251 - protein, 1313 aa, synthetic construct
MAPKKKRKVVTVKFKYKGEEKEVDISKIKKVWRVGKMISFTYDDNGKTGRGAVSEKDAPKELLQMLEKSGSETPGTSESATPESYEQLAPQPCVGETLHSSLPRDSELFVPEEGSSEKESEDAPKTSPPTPGKHGLEQTGEEKVMVTVPDKNPPCPCCGTRVNSVLNLIEHLKVSHGKRGVCFRCAKCGKENSNYHSVVCHFPKCRGPETEKAPAGEWICEVCNRDFTTKIGLGQHKRLAHPAVRNQERIVASQPKETSNRGAHKRCWTKEEEELLIRLEAQFEGNKNINKLIAEHITTKTAKQISDKRRLLSRKPAEEPREEPGTCHHTRRAAASLRTEPEMSHHAQAEDRDNGPGRRPLPGRAAAGGRTMDEIRRHPDKGNGQQRPTKQKSEEQLQAYYKKTLEERLSAGALNTFPRAFKQVMEGRDIKLVINQTAQDCFGCLESISQIRTATRDKKDTVTREKHPKKPFQKWMKDRAIKKGNYLRFQRLFYLDRGKLAKIILDDIECLSCDIPLSEIYSVFKTRWETTGSFKSLGDFKTYGKADNTAFRELITAKEIEKNVQEMSKGSAPGPDGITLGDVVKMDPEFSRTMEIFNLWLTTGKIPDMVRGCRTVLIPKSSKPDRLKDINNWRPITIGSILLRLFSRIVTARLSKACPLNPRQRGFIRAAGCSENLKLLQTIIWSAKREHRPLGVVFVDIAKAFDTVSHQHIIHALQQREVDPHIVGLVSNMYENISTYITTKRNTHTDKIQIRVGVKQGDPMSPLLFNLAMDPLLCKLEESGKGYHRGQSSITAMAFADDLVLLSDSWENMNTNISILETFCNLTGLKTQGQKCHGFYIKPTKDSYTINDCAAWTINGTPLNMIDPGESEKYLGLQFDPWIGIARSGLSTKLDFWLQRIDQAPLKPLQKTDILKTYTIPRLIYIADHSEVKTALLETLDQKIRTAVKEWLHLPPCTCDAILYSSTRDGGLGITKLAGLIPSVQARRLHRIAQSSDDTMKCFMEKEKMEQLHKKLWIQAGGDRENIPSIWEAPPSSEPPNNVSTNSEWEAPTQKDKFPKPCNWRKNEFKKWTKLASQGRGIVNFERDKISNHWIQYYRRIPHRKLLTALQLRANVYPTREFLARGRQDQYIKACRHCDADIESCAHIIGNCPVTQDARIKRHNYICELLLEEAKKKDWVVFKEPHIRDSNKELYKPDLIFVKDARALVVDVTVRYEAAKSSLEEAAAEKVRKYKHLETEVRHLTNAKDVTFVGFPLGARGKWHQDNFKLLTELGLSKSRQVKMAETFSTVALFSSVDIVHMFASRARKSMVM

SEQ ID NO: 252 - protein, 1327 aa, synthetic construct
MKRTADGSEFESPKKKRKVATVKFKYKGEEKEVDISKIKKVWRVGKMISFTYDEGGGKTGRGAVSEKDAPKELLQMLEKQKKSGSETPGTSESATPESYEQLAPQPCVGETLHSSLPRDSELFVPEEGSSEKESEDAPKTSPPTPGKHGLEQTGEEKVMVTVPDKNPPCPCCGTRVNSVLNLIEHLKVSHGKRGVCFRCAKCGKENSNYHSVVCHFPKCRGPETEKAPAGEWICEVCNRDFTTKIGLGQHKRLAHPAVRNQERIVASQPKETSNRGAHKRCWTKEEEELLIRLEAQFEGNKNINKLIAEHITTKTAKQISDKRRLLSRKPAEEPREEPGTCHHTRRAAASLRTEPEMSHHAQAEDRDNGPGRRPLPGRAAAGGRTMDEIRRHPDKGNGQQRPTKQKSEEQLQAYYKKTLEERLSAGALNTFPRAFKQVMEGRDIKLVINQTAQDCFGCLESISQIRTATRDKKDTVTREKHPKKPFQKWMKDRAIKKGNYLRFQRLFYLDRGKLAKIILDDIECLSCDIPLSEIYSVFKTRWETTGSFKSLGDFKTYGKADNTAFRELITAKEIEKNVQEMSKGSAPGPDGITLGDVVKMDPEFSRTMEIFNLWLTTGKIPDMVRGCRTVLIPKSSKPDRLKDINNWRPITIGSILLRLFSRIVTARLSKACPLNPRQRGFIRAAGCSENLKLLQTIIWSAKREHRPLGVVFVDIAKAFDTVSHQHIIHALQQREVDPHIVGLVSNMYENISTYITTKRNTHTDKIQIRVGVKQGDPMSPLLFNLAMDPLLCKLEESGKGYHRGQSSITAMAFADDLVLLSDSWENMNTNISILETFCNLTGLKTQGQKCHGFYIKPTKDSYTINDCAAWTINGTPLNMIDPGESEKYLGLQFDPWIGIARSGLSTKLDFWLQRIDQAPLKPLQKTDILKTYTIPRLIYIADHSEVKTALLETLDQKIRTAVKEWLHLPPCTCDAILYSSTRDGGLGITKLAGLIPSVQARRLHRIAQSSDDTMKCFMEKEKMEQLHKKLWIQAGGDRENIPSIWEAPPSSEPPNNVSTNSEWEAPTQKDKFPKPCNWRKNEFKKWTKLASQGRGIVNFERDKISNHWIQYYRRIPHRKLLTALQLRANVYPTREFLARGRQDQYIKACRHCDADIESCAHIIGNCPVTQDARIKRHNYICELLLEEAKKKDWVVFKEPHIRDSNKELYKPDLIFVKDARALVVDVTVRYEAAKSSLEEAAAEKVRKYKHLETEVRHLTNAKDVTFVGFPLGARGKWHQDNFKLLTELGLSKSRQVKMAETFSTVALFSSVDIVHMFASRARKSMVM

SEQ ID NO: 253 - protein, 1289 aa, synthetic construct
MKRTADGSEFESPKKKRKVRKRRQTSMTDFYHSKRRLIFSKRKPSGSETPGTSESATPESYEQLAPQPCVGETLHSSLPRDSELFVPEEGSSEKESEDAPKTSPPTPGKHGLEQTGEEKVMVTVPDKNPPCPCCGTRVNSVLNLIEHLKVSHGKRGVCFRCAKCGKENSNYHSVVCHFPKCRGPETEKAPAGEWICEVCNRDFTTKIGLGQHKRLAHPAVRNQERIVASQPKETSNRGAHKRCWTKEEEELLIRLEAQFEGNKNINKLIAEHITTKTAKQISDKRRLLSRKPAEEPREEPGTCHHTRRAAASLRTEPEMSHHAQAEDRDNGPGRRPLPGRAAAGGRTMDEIRRHPDKGNGQQRPTKQKSEEQLQAYYKKTLEERLSAGALNTFPRAFKQVMEGRDIKLVINQTAQDCFGCLESISQIRTATRDKKDTVTREKHPKKPFQKWMKDRAIKKGNYLRFQRLFYLDRGKLAKIILDDIECLSCDIPLSEIYSVFKTRWETTGSFKSLGDFKTYGKADNTAFRELITAKEIEKNVQEMSKGSAPGPDGITLGDVVKMDPEFSRTMEIFNLWLTTGKIPDMVRGCRTVLIPKSSKPDRLKDINNWRPITIGSILLRLFSRIVTARLSKACPLNPRQRGFIRAAGCSENLKLLQTIIWSAKREHRPLGVVFVDIAKAFDTVSHQHIIHALQQREVDPHIVGLVSNMYENISTYITTKRNTHTDKIQIRVGVKQGDPMSPLLFNLAMDPLLCKLEESGKGYHRGQSSITAMAFADDLVLLSDSWENMNTNISILETFCNLTGLKTQGQKCHGFYIKPTKDSYTINDCAAWTINGTPLNMIDPGESEKYLGLQFDPWIGIARSGLSTKLDFWLQRIDQAPLKPLQKTDILKTYTIPRLIYIADHSEVKTALLETLDQKIRTAVKEWLHLPPCTCDAILYSSTRDGGLGITKLAGLIPSVQARRLHRIAQSSDDTMKCFMEKEKMEQLHKKLWIQAGGDRENIPSIWEAPPSSEPPNNVSTNSEWEAPTQKDKFPKPCNWRKNEFKKWTKLASQGRGIVNFERDKISNHWIQYYRRIPHRKLLTALQLRANVYPTREFLARGRQDQYIKACRHCDADIESCAHIIGNCPVTQDARIKRHNYICELLLEEAKKKDWVVFKEPHIRDSNKELYKPDLIFVKDARALVVDVTVRYEAAKSSLEEAAAEKVRKYKHLETEVRHLTNAKDVTFVGFPLGARGKWHQDNFKLLTELGLSKSRQVKMAETFSTVALFSSVDIVHMFASRARKSMVM

SEQ ID NO: 254 - protein, 1280 aa, synthetic construct
MKRTADGSEFESPKKKRKVSTQGRLDDFFKVTGSLSGSETPGTSESATPESYEQLAPQPCVGETLHSSLPRDSELFVPEEGSSEKESEDAPKTSPPTPGKHGLEQTGEEKVMVTVPDKNPPCPCCGTRVNSVLNLIEHLKVSHGKRGVCFRCAKCGKENSNYHSVVCHFPKCRGPETEKAPAGEWICEVCNRDFTTKIGLGQHKRLAHPAVRNQERIVASQPKETSNRGAHKRCWTKEEEELLIRLEAQFEGNKNINKLIAEHITTKTAKQISDKRRLLSRKPAEEPREEPGTCHHTRRAAASLRTEPEMSHHAQAEDRDNGPGRRPLPGRAAAGGRTMDEIRRHPDKGNGQQRPTKQKSEEQLQAYYKKTLEERLSAGALNTFPRAFKQVMEGRDIKLVINQTAQDCFGCLESISQIRTATRDKKDTVTREKHPKKPFQKWMKDRAIKKGNYLRFQRLFYLDRGKLAKIILDDIECLSCDIPLSEIYSVFKTRWETTGSFKSLGDFKTYGKADNTAFRELITAKEIEKNVQEMSKGSAPGPDGITLGDVVKMDPEFSRTMEIFNLWLTTGKIPDMVRGCRTVLIPKSSKPDRLKDINNWRPITIGSILLRLFSRIVTARLSKACPLNPRQRGFIRAAGCSENLKLLQTIIWSAKREHRPLGVVFVDIAKAFDTVSHQHIIHALQQREVDPHIVGLVSNMYENISTYITTKRNTHTDKIQIRVGVKQGDPMSPLLFNLAMDPLLCKLEESGKGYHRGQSSITAMAFADDLVLLSDSWENMNTNISILETFCNLTGLKTQGQKCHGFYIKPTKDSYTINDCAAWTINGTPLNMIDPGESEKYLGLQFDPWIGIARSGLSTKLDFWLQRIDQAPLKPLQKTDILKTYTIPRLIYIADHSEVKTALLETLDQKIRTAVKEWLHLPPCTCDAILYSSTRDGGLGITKLAGLIPSVQARRLHRIAQSSDDTMKCFMEKEKMEQLHKKLWIQAGGDRENIPSIWEAPPSSEPPNNVSTNSEWEAPTQKDKFPKPCNWRKNEFKKWTKLASQGRGIVNFERDKISNHWIQYYRRIPHRKLLTALQLRANVYPTREFLARGRQDQYIKACRHCDADIESCAHIIGNCPVTQDARIKRHNYICELLLEEAKKKDWVVFKEPHIRDSNKELYKPDLIFVKDARALVVDVTVRYEAAKSSLEEAAAEKVRKYKHLETEVRHLTNAKDVTFVGFPLGARGKWHQDNFKLLTELGLSKSRQVKMAETFSTVALFSSVDIVHMFASRARKSMVM

SEQ ID NO: 255 - protein, 1379 aa, synthetic construct
MAPKKKRKVESTVGPACPPGRTVTKRPWALAEDTPRGPDSPPKRPRPNSLPLTTTFRPLPPPPQTTSAVDPSSHSPVNPPRDQHATDTADEKPRAASPALSDASGPPTPDIPLSPGGTHARDPDADPDSPDLDSSGSETPGTSESATPESYEQLAPQPCVGETLHSSLPRDSELFVPEEGSSEKESEDAPKTSPPTPGKHGLEQTGEEKVMVTVPDKNPPCPCCGTRVNSVLNLIEHLKVSHGKRGVCFRCAKCGKENSNYHSVVCHFPKCRGPETEKAPAGEWICEVCNRDFTTKIGLGQHKRLAHPAVRNQERIVASQPKETSNRGAHKRCWTKEEEELLIRLEAQFEGNKNINKLIAEHITTKTAKQISDKRRLLSRKPAEEPREEPGTCHHTRRAAASLRTEPEMSHHAQAEDRDNGPGRRPLPGRAAAGGRTMDEIRRHPDKGNGQQRPTKQKSEEQLQAYYKKTLEERLSAGALNTFPRAFKQVMEGRDIKLVINQTAQDCFGCLESISQIRTATRDKKDTVTREKHPKKPFQKWMKDRAIKKGNYLRFQRLFYLDRGKLAKIILDDIECLSCDIPLSEIYSVFKTRWETTGSFKSLGDFKTYGKADNTAFRELITAKEIEKNVQEMSKGSAPGPDGITLGDVVKMDPEFSRTMEIFNLWLTTGKIPDMVRGCRTVLIPKSSKPDRLKDINNWRPITIGSILLRLFSRIVTARLSKACPLNPRQRGFIRAAGCSENLKLLQTIIWSAKREHRPLGVVFVDIAKAFDTVSHQHIIHALQQREVDPHIVGLVSNMYENISTYITTKRNTHTDKIQIRVGVKQGDPMSPLLFNLAMDPLLCKLEESGKGYHRGQSSITAMAFADDLVLLSDSWENMNTNISILETFCNLTGLKTQGQKCHGFYIKPTKDSYTINDCAAWTINGTPLNMIDPGESEKYLGLQFDPWIGIARSGLSTKLDFWLQRIDQAPLKPLQKTDILKTYTIPRLIYIADHSEVKTALLETLDQKIRTAVKEWLHLPPCTCDAILYSSTRDGGLGITKLAGLIPSVQARRLHRIAQSSDDTMKCFMEKEKMEQLHKKLWIQAGGDRENIPSIWEAPPSSEPPNNVSTNSEWEAPTQKDKFPKPCNWRKNEFKKWTKLASQGRGIVNFERDKISNHWIQYYRRIPHRKLLTALQLRANVYPTREFLARGRQDQYIKACRHCDADIESCAHIIGNCPVTQDARIKRHNYICELLLEEAKKKDWVVFKEPHIRDSNKELYKPDLIFVKDARALVVDVTVRYEAAKSSLEEAAAEKVRKYKHLETEVRHLTNAKDVTFVGFPLGARGKWHQDNFKLLTELGLSKSRQVKMAETFSTVALFSSVDIVHMFASRARKSMVM

SEQ ID NO: 256 - protein, 1277 aa, synthetic construct
MAPKKKRKVPTLLGFHTASGKKVKIAKESLDKVKNLFDEKEQGGSGGGYEQLAPQPCVGETLHSSLPRDSELFVPEEGSSEKESEDAPKTSPPTPGKHGLEQTGEEKVMVTVPDKNPPCPCCGTRVNSVLNLIEHLKVSHGKRGVCFRCAKCGKENSNYHSVVCHFPKCRGPETEKAPAGEWICEVCNRDFTTKIGLGQHKRLAHPAVRNQERIVASQPKETSNRGAHKRCWTKEEEELLIRLEAQFEGNKNINKLIAEHITTKTAKQISDKRRLLSRKPAEEPREEPGTCHHTRRAAASLRTEPEMSHHAQAEDRDNGPGRRPLPGRAAAGGRTMDEIRRHPDKGNGQQRPTKQKSEEQLQAYYKKTLEERLSAGALNTFPRAFKQVMEGRDIKLVINQTAQDCFGCLESISQIRTATRDKKDTVTREKHPKKPFQKWMKDRAIKKGNYLRFQRLFYLDRGKLAKIILDDIECLSCDIPLSEIYSVFKTRWETTGSFKSLGDFKTYGKADNTAFRELITAKEIEKNVQEMSKGSAPGPDGITLGDVVKMDPEFSRTMEIFNLWLTTGKIPDMVRGCRTVLIPKSSKPDRLKDINNWRPITIGSILLRLFSRIVTARLSKACPLNPRQRGFIRAAGCSENLKLLQTIIWSAKREHRPLGVVFVDIAKAFDTVSHQHIIHALQQREVDPHIVGLVSNMYENISTYITTKRNTHTDKIQIRVGVKQGDPMSPLLFNLAMDPLLCKLEESGKGYHRGQSSITAMAFADDLVLLSDSWENMNTNISILETFCNLTGLKTQGQKCHGFYIKPTKDSYTINDCAAWTINGTPLNMIDPGESEKYLGLQFDPWIGIARSGLSTKLDFWLQRIDQAPLKPLQKTDILKTYTIPRLIYIADHSEVKTALLETLDQKIRTAVKEWLHLPPCTCDAILYSSTRDGGLGITKLAGLIPSVQARRLHRIAQSSDDTMKCFMEKEKMEQLHKKLWIQAGGDRENIPSIWEAPPSSEPPNNVSTNSEWEAPTQKDKFPKPCNWRKNEFKKWTKLASQGRGIVNFERDKISNHWIQYYRRIPHRKLLTALQLRANVYPTREFLARGRQDQYIKACRHCDADIESCAHIIGNCPVTQDARIKRHNYICELLLEEAKKKDWVVFKEPHIRDSNKELYKPDLIFVKDARALVVDVTVRYEAAKSSLEEAAAEKVRKYKHLETEVRHLTNAKDVTFVGFPLGARGKWHQDNFKLLTELGLSKSRQVKMAETFSTVALFSSVDIVHMFASRARKSMVM

SEQ ID NO: 257 - protein, 1597 aa, synthetic construct
MAPKKKRKVGIHGVPAAAMQMQLEANADTSVEEESFGPQPISRLEQCGINANDVKKLEEAGFHTVEAVAYAPKKELINIKGISEAKADKILAEAAKLVPMGFTTETEFHQRRSEIIQITTGSKELDKLLQGGIETGSITEMFGEFRTGKTQICHTLAVTCQLPIDRGGGEGKAMYIDTEGTFRPERLLAVAERYGLSGSDVLDNVAYARAFNTDHQTQLLYQASAMMVESRYALLIVDSATALYRTDYSGRGELSARQMHLARFLRMLLRLADEFGVAVVITNQVVAQVDGAAMFAADPKKPIGGNIIAHASTTRLYLRKGRGETRICKIYDSPCLPEAEAMFAINADGVGDAKDGGSGSETPGTSESYEQLAPQPCVGETLHSSLPRDSELFVPEEGSSEKESEDAPKTSPPTPGKHGLEQTGEEKVMVTVPDKNPPCPCCGTRVNSVLNLIEHLKVSHGKRGVCFRCAKCGKENSNYHSVVCHFPKCRGPETEKAPAGEWICEVCNRDFTTKIGLGQHKRLAHPAVRNQERIVASQPKETSNRGAHKRCWTKEEEELLIRLEAQFEGNKNINKLIAEHITTKTAKQISDKRRLLSRKPAEEPREEPGTCHHTRRAAASLRTEPEMSHHAQAEDRDNGPGRRPLPGRAAAGGRTMDEIRRHPDKGNGQQRPTKQKSEEQLQAYYKKTLEERLSAGALNTFPRAFKQVMEGRDIKLVINQTAQDCFGCLESISQIRTATRDKKDTVTREKHPKKPFQKWMKDRAIKKGNYLRFQRLFYLDRGKLAKIILDDIECLSCDIPLSEIYSVFKTRWETTGSFKSLGDFKTYGKADNTAFRELITAKEIEKNVQEMSKGSAPGPDGITLGDVVKMDPEFSRTMEIFNLWLTTGKIPDMVRGCRTVLIPKSSKPDRLKDINNWRPITIGSILLRLFSRIVTARLSKACPLNPRQRGFIRAAGCSENLKLLQTIIWSAKREHRPLGVVFVDIAKAFDTVSHQHIIHALQQREVDPHIVGLVSNMYENISTYITTKRNTHTDKIQIRVGVKQGDPMSPLLFNLAMDPLLCKLEESGKGYHRGQSSITAMAFADDLVLLSDSWENMNTNISILETFCNLTGLKTQGQKCHGFYIKPTKDSYTINDCAAWTINGTPLNMIDPGESEKYLGLQFDPWIGIARSGLSTKLDFWLQRIDQAPLKPLQKTDILKTYTIPRLIYIADHSEVKTALLETLDQKIRTAVKEWLHLPPCTCDAILYSSTRDGGLGITKLAGLIPSVQARRLHRIAQSSDDTMKCFMEKEKMEQLHKKLWIQAGGDRENIPSIWEAPPSSEPPNNVSTNSEWEAPTQKDKFPKPCNWRKNEFKKWTKLASQGRGIVNFERDKISNHWIQYYRRIPHRKLLTALQLRANVYPTREFLARGRQDQYIKACRHCDADIESCAHIIGNCPVTQDARIKRHNYICELLLEEAKKKDWVVFKEPHIRDSNKELYKPDLIFVKDARALVVDVTVRYEAAKSSLEEAAAEKVRKYKHLETEVRHLTNAKDVTFVGFPLGARGKWHQDNFKLLTELGLSKSRQVKMAETFSTVALFSSVDIVHMFASRARKSMVM

SEQ ID NO: 258 - protein, 1550 aa, synthetic construct
MAPKKKRKVNISGSSCGSPNSADTSSDFKDLWTKLKECHDREVQGLQVKVTKLKQERILDAQRLEEFFTKNQQLREQQKVLHETIKVLEDRLRAGLCDRCAVTEEHMRKKQQEFENIRQQNLKLITELMNERNTLQEENKKLSEQLQQKIENDQQHQAAELECEEDVIPDSPITAFSFSGVNRLRRKENPHVRYIEQTHTKLEHSVCANEMRKVSKSSTHPQHNPNENEILVADTYDQSQSPMAKAHGTSSYTPDKSSFNLATVVAETLGLGVQEESETQGPMSPLGDELYHCLEGNHKKQPFESGSETPGTSESATPEGSYEQLAPQPCVGETLHSSLPRDSELFVPEEGSSEKESEDAPKTSPPTPGKHGLEQTGEEKVMVTVPDKNPPCPCCGTRVNSVLNLIEHLKVSHGKRGVCFRCAKCGKENSNYHSVVCHFPKCRGPETEKAPAGEWICEVCNRDFTTKIGLGQHKRLAHPAVRNQERIVASQPKETSNRGAHKRCWTKEEEELLIRLEAQFEGNKNINKLIAEHITTKTAKQISDKRRLLSRKPAEEPREEPGTCHHTRRAAASLRTEPEMSHHAQAEDRDNGPGRRPLPGRAAAGGRTMDEIRRHPDKGNGQQRPTKQKSEEQLQAYYKKTLEERLSAGALNTFPRAFKQVMEGRDIKLVINQTAQDCFGCLESISQIRTATRDKKDTVTREKHPKKPFQKWMKDRAIKKGNYLRFQRLFYLDRGKLAKIILDDIECLSCDIPLSEIYSVFKTRWETTGSFKSLGDFKTYGKADNTAFRELITAKEIEKNVQEMSKGSAPGPDGITLGDVVKMDPEFSRTMEIFNLWLTTGKIPDMVRGCRTVLIPKSSKPDRLKDINNWRPITIGSILLRLFSRIVTARLSKACPLNPRQRGFIRAAGCSENLKLLQTIIWSAKREHRPLGVVFVDIAKAFDTVSHQHIIHALQQREVDPHIVGLVSNMYENISTYITTKRNTHTDKIQIRVGVKQGDPMSPLLFNLAMDPLLCKLEESGKGYHRGQSSITAMAFADDLVLLSDSWENMNTNISILETFCNLTGLKTQGQKCHGFYIKPTKDSYTINDCAAWTINGTPLNMIDPGESEKYLGLQFDPWIGIARSGLSTKLDFWLQRIDQAPLKPLQKTDILKTYTIPRLIYIADHSEVKTALLETLDQKIRTAVKEWLHLPPCTCDAILYSSTRDGGLGITKLAGLIPSVQARRLHRIAQSSDDTMKCFMEKEKMEQLHKKLWIQAGGDRENIPSIWEAPPSSEPPNNVSTNSEWEAPTQKDKFPKPCNWRKNEFKKWTKLASQGRGIVNFERDKISNHWIQYYRRIPHRKLLTALQLRANVYPTREFLARGRQDQYIKACRHCDADIESCAHIIGNCPVTQDARIKRHNYICELLLEEAKKKDWVVFKEPHIRDSNKELYKPDLIFVKDARALVVDVTVRYEAAKSSLEEAAAEKVRKYKHLETEVRHLTNAKDVTFVGFPLGARGKWHQDNFKLLTELGLSKSRQVKMAETFSTVALFSSVDIVHMFASRARKSMVM

SEQ ID NO: 259 - protein, 1322 aa, synthetic construct
MPKRKVSSAEGAAKEEPKRRSARLSAKPPAKVEAKPKKAAAKDKSSDKKVQTKGKRGAKGKQAEVANQETKEDLPAENGETKTEESPASDEAGEKEAKSDSGSETPGTSESATPESLFVPEEGSSEKESEDAPKTSPPTPGKHGLEQTGEEKVMVTVPDKNPPCPCCGTRVNSVLNLIEHLKVSHGKRGVCFRCAKCGKENSNYHSVVCHFPKCRGPETEKAPAGEWICEVCNRDFTTKIGLGQHKRLAHPAVRNQERIVASQPKETSNRGAHKRCWTKEEEELLIRLEAQFEGNKNINKLIAEHITTKTAKQISDKRRLLSRKPAEEPREEPGTCHHTRRAAASLRTEPEMSHHAQAEDRDNGPGRRPLPGRAAAGGRTMDEIRRHPDKGNGQQRPTKQKSEEQLQAYYKKTLEERLSAGALNTFPRAFKQVMEGRDIKLVINQTAQDCFGCLESISQIRTATRDKKDTVTREKHPKKPFQKWMKDRAIKKGNYLRFQRLFYLDRGKLAKIILDDIECLSCDIPLSEIYSVFKTRWETTGSFKSLGDFKTYGKADNTAFRELITAKEIEKNVQEMSKGSAPGPDGITLGDVVKMDPEFSRTMEIFNLWLTTGKIPDMVRGCRTVLIPKSSKPDRLKDINNWRPITIGSILLRLFSRIVTARLSKACPLNPRQRGFIRAAGCSENLKLLQTIIWSAKREHRPLGVVFVDIAKAFDTVSHQHIIHALQQREVDPHIVGLVSNMYENISTYITTKRNTHTDKIQIRVGVKQGDPMSPLLFNLAMDPLLCKLEESGKGYHRGQSSITAMAFADDLVLLSDSWENMNTNISILETFCNLTGLKTQGQKCHGFYIKPTKDSYTINDCAAWTINGTPLNMIDPGESEKYLGLQFDPWIGIARSGLSTKLDFWLQRIDQAPLKPLQKTDILKTYTIPRLIYIADHSEVKTALLETLDQKIRTAVKEWLHLPPCTCDAILYSSTRDGGLGITKLAGLIPSVQARRLHRIAQSSDDTMKCFMEKEKMEQLHKKLWIQAGGDRENIPSIWEAPPSSEPPNNVSTNSEWEAPTQKDKFPKPCNWRKNEFKKWTKLASQGRGIVNFERDKISNHWIQYYRRIPHRKLLTALQLRANVYPTREFLARGRQDQYIKACRHCDADIESCAHIIGNCPVTQDARIKRHNYICELLLEEAKKKDWVVFKEPHIRDSNKELYKPDLIFVKDARALVVDVTVRYEAAKSSLEEAAAEKVRKYKHLETEVRHLTNAKDVTFVGFPLGARGKWHQDNFKLLTELGLSKSRQVKMAETFSTVALFSSVDIVHMFASRARKSMVM

SEQ ID NO: 260 - protein, 1290 aa, synthetic construct
MAPKKKRKVVTVKFKYKGEEKEVDISKIKKVWRVGKMISFTYDDNGKTGRGAVSEKDAPKELLQMLEKSGSETPGTSESATPESLFVPEEGSSEKESEDAPKTSPPTPGKHGLEQTGEEKVMVTVPDKNPPCPCCGTRVNSVLNLIEHLKVSHGKRGVCFRCAKCGKENSNYHSVVCHFPKCRGPETEKAPAGEWICEVCNRDFTTKIGLGQHKRLAHPAVRNQERIVASQPKETSNRGAHKRCWTKEEEELLIRLEAQFEGNKNINKLIAEHITTKTAKQISDKRRLLSRKPAEEPREEPGTCHHTRRAAASLRTEPEMSHHAQAEDRDNGPGRRPLPGRAAAGGRTMDEIRRHPDKGNGQQRPTKQKSEEQLQAYYKKTLEERLSAGALNTFPRAFKQVMEGRDIKLVINQTAQDCFGCLESISQIRTATRDKKDTVTREKHPKKPFQKWMKDRAIKKGNYLRFQRLFYLDRGKLAKIILDDIECLSCDIPLSEIYSVFKTRWETTGSFKSLGDFKTYGKADNTAFRELITAKEIEKNVQEMSKGSAPGPDGITLGDVVKMDPEFSRTMEIFNLWLTTGKIPDMVRGCRTVLIPKSSKPDRLKDINNWRPITIGSILLRLFSRIVTARLSKACPLNPRQRGFIRAAGCSENLKLLQTIIWSAKREHRPLGVVFVDIAKAFDTVSHQHIIHALQQREVDPHIVGLVSNMYENISTYITTKRNTHTDKIQIRVGVKQGDPMSPLLFNLAMDPLLCKLEESGKGYHRGQSSITAMAFADDLVLLSDSWENMNTNISILETFCNLTGLKTQGQKCHGFYIKPTKDSYTINDCAAWTINGTPLNMIDPGESEKYLGLQFDPWIGIARSGLSTKLDFWLQRIDQAPLKPLQKTDILKTYTIPRLIYIADHSEVKTALLETLDQKIRTAVKEWLHLPPCTCDAILYSSTRDGGLGITKLAGLIPSVQARRLHRIAQSSDDTMKCFMEKEKMEQLHKKLWIQAGGDRENIPSIWEAPPSSEPPNNVSTNSEWEAPTQKDKFPKPCNWRKNEFKKWTKLASQGRGIVNFERDKISNHWIQYYRRIPHRKLLTALQLRANVYPTREFLARGRQDQYIKACRHCDADIESCAHIIGNCPVTQDARIKRHNYICELLLEEAKKKDWVVFKEPHIRDSNKELYKPDLIFVKDARALVVDVTVRYEAAKSSLEEAAAEKVRKYKHLETEVRHLTNAKDVTFVGFPLGARGKWHQDNFKLLTELGLSKSRQVKMAETFSTVALFSSVDIVHMFASRARKSMVM

SEQ ID NO: 261 - protein, 1304 aa, synthetic construct
MKRTADGSEFESPKKKRKVATVKFKYKGEEKEVDISKIKKVWRVGKMISFTYDEGGGKTGRGAVSEKDAPKELLQMLEKQKKSGSETPGTSESATPESLFVPEEGSSEKESEDAPKTSPPTPGKHGLEQTGEEKVMVTVPDKNPPCPCCGTRVNSVLNLIEHLKVSHGKRGVCFRCAKCGKENSNYHSVVCHFPKCRGPETEKAPAGEWICEVCNRDFTTKIGLGQHKRLAHPAVRNQERIVASQPKETSNRGAHKRCWTKEEEELLIRLEAQFEGNKNINKLIAEHITTKTAKQISDKRRLLSRKPAEEPREEPGTCHHTRRAAASLRTEPEMSHHAQAEDRDNGPGRRPLPGRAAAGGRTMDEIRRHPDKGNGQQRPTKQKSEEQLQAYYKKTLEERLSAGALNTFPRAFKQVMEGRDIKLVINQTAQDCFGCLESISQIRTATRDKKDTVTREKHPKKPFQKWMKDRAIKKGNYLRFQRLFYLDRGKLAKIILDDIECLSCDIPLSEIYSVFKTRWETTGSFKSLGDFKTYGKADNTAFRELITAKEIEKNVQEMSKGSAPGPDGITLGDVVKMDPEFSRTMEIFNLWLTTGKIPDMVRGCRTVLIPKSSKPDRLKDINNWRPITIGSILLRLFSRIVTARLSKACPLNPRQRGFIRAAGCSENLKLLQTIIWSAKREHRPLGVVFVDIAKAFDTVSHQHIIHALQQREVDPHIVGLVSNMYENISTYITTKRNTHTDKIQIRVGVKQGDPMSPLLFNLAMDPLLCKLEESGKGYHRGQSSITAMAFADDLVLLSDSWENMNTNISILETFCNLTGLKTQGQKCHGFYIKPTKDSYTINDCAAWTINGTPLNMIDPGESEKYLGLQFDPWIGIARSGLSTKLDFWLQRIDQAPLKPLQKTDILKTYTIPRLIYIADHSEVKTALLETLDQKIRTAVKEWLHLPPCTCDAILYSSTRDGGLGITKLAGLIPSVQARRLHRIAQSSDDTMKCFMEKEKMEQLHKKLWIQAGGDRENIPSIWEAPPSSEPPNNVSTNSEWEAPTQKDKFPKPCNWRKNEFKKWTKLASQGRGIVNFERDKISNHWIQYYRRIPHRKLLTALQLRANVYPTREFLARGRQDQYIKACRHCDADIESCAHIIGNCPVTQDARIKRHNYICELLLEEAKKKDWVVFKEPHIRDSNKELYKPDLIFVKDARALVVDVTVRYEAAKSSLEEAAAEKVRKYKHLETEVRHLTNAKDVTFVGFPLGARGKWHQDNFKLLTELGLSKSRQVKMAETFSTVALFSSVDIVHMFASRARKSMVM

SEQ ID NO: 262 - protein, 1266 aa, synthetic construct
MKRTADGSEFESPKKKRKVRKRRQTSMTDFYHSKRRLIFSKRKPSGSETPGTSESATPESLFVPEEGSSEKESEDAPKTSPPTPGKHGLEQTGEEKVMVTVPDKNPPCPCCGTRVNSVLNLIEHLKVSHGKRGVCFRCAKCGKENSNYHSVVCHFPKCRGPETEKAPAGEWICEVCNRDFTTKIGLGQHKRLAHPAVRNQERIVASQPKETSNRGAHKRCWTKEEEELLIRLEAQFEGNKNINKLIAEHITTKTAKQISDKRRLLSRKPAEEPREEPGTCHHTRRAAASLRTEPEMSHHAQAEDRDNGPGRRPLPGRAAAGGRTMDEIRRHPDKGNGQQRPTKQKSEEQLQAYYKKTLEERLSAGALNTFPRAFKQVMEGRDIKLVINQTAQDCFGCLESISQIRTATRDKKDTVTREKHPKKPFQKWMKDRAIKKGNYLRFQRLFYLDRGKLAKIILDDIECLSCDIPLSEIYSVFKTRWETTGSFKSLGDFKTYGKADNTAFRELITAKEIEKNVQEMSKGSAPGPDGITLGDVVKMDPEFSRTMEIFNLWLTTGKIPDMVRGCRTVLIPKSSKPDRLKDINNWRPITIGSILLRLFSRIVTARLSKACPLNPRQRGFIRAAGCSENLKLLQTIIWSAKREHRPLGVVFVDIAKAFDTVSHQHIIHALQQREVDPHIVGLVSNMYENISTYITTKRNTHTDKIQIRVGVKQGDPMSPLLFNLAMDPLLCKLEESGKGYHRGQSSITAMAFADDLVLLSDSWENMNTNISILETFCNLTGLKTQGQKCHGFYIKPTKDSYTINDCAAWTINGTPLNMIDPGESEKYLGLQFDPWIGIARSGLSTKLDFWLQRIDQAPLKPLQKTDILKTYTIPRLIYIADHSEVKTALLETLDQKIRTAVKEWLHLPPCTCDAILYSSTRDGGLGITKLAGLIPSVQARRLHRIAQSSDDTMKCFMEKEKMEQLHKKLWIQAGGDRENIPSIWEAPPSSEPPNNVSTNSEWEAPTQKDKFPKPCNWRKNEFKKWTKLASQGRGIVNFERDKISNHWIQYYRRIPHRKLLTALQLRANVYPTREFLARGRQDQYIKACRHCDADIESCAHIIGNCPVTQDARIKRHNYICELLLEEAKKKDWVVFKEPHIRDSNKELYKPDLIFVKDARALVVDVTVRYEAAKSSLEEAAAEKVRKYKHLETEVRHLTNAKDVTFVGFPLGARGKWHQDNFKLLTELGLSKSRQVKMAETFSTVALFSSVDIVHMFASRARKSMVM

SEQ ID NO: 263 - protein, 1257 aa, synthetic construct
MKRTADGSEFESPKKKRKVSTQGRLDDFFKVTGSLSGSETPGTSESATPESLFVPEEGSSEKESEDAPKTSPPTPGKHGLEQTGEEKVMVTVPDKNPPCPCCGTRVNSVLNLIEHLKVSHGKRGVCFRCAKCGKENSNYHSVVCHFPKCRGPETEKAPAGEWICEVCNRDFTTKIGLGQHKRLAHPAVRNQERIVASQPKETSNRGAHKRCWTKEEEELLIRLEAQFEGNKNINKLIAEHITTKTAKQISDKRRLLSRKPAEEPREEPGTCHHTRRAAASLRTEPEMSHHAQAEDRDNGPGRRPLPGRAAAGGRTMDEIRRHPDKGNGQQRPTKQKSEEQLQAYYKKTLEERLSAGALNTFPRAFKQVMEGRDIKLVINQTAQDCFGCLESISQIRTATRDKKDTVTREKHPKKPFQKWMKDRAIKKGNYLRFQRLFYLDRGKLAKIILDDIECLSCDIPLSEIYSVFKTRWETTGSFKSLGDFKTYGKADNTAFRELITAKEIEKNVQEMSKGSAPGPDGITLGDVVKMDPEFSRTMEIFNLWLTTGKIPDMVRGCRTVLIPKSSKPDRLKDINNWRPITIGSILLRLFSRIVTARLSKACPLNPRQRGFIRAAGCSENLKLLQTIIWSAKREHRPLGVVFVDIAKAFDTVSHQHIIHALQQREVDPHIVGLVSNMYENISTYITTKRNTHTDKIQIRVGVKQGDPMSPLLFNLAMDPLLCKLEESGKGYHRGQSSITAMAFADDLVLLSDSWENMNTNISILETFCNLTGLKTQGQKCHGFYIKPTKDSYTINDCAAWTINGTPLNMIDPGESEKYLGLQFDPWIGIARSGLSTKLDFWLQRIDQAPLKPLQKTDILKTYTIPRLIYIADHSEVKTALLETLDQKIRTAVKEWLHLPPCTCDAILYSSTRDGGLGITKLAGLIPSVQARRLHRIAQSSDDTMKCFMEKEKMEQLHKKLWIQAGGDRENIPSIWEAPPSSEPPNNVSTNSEWEAPTQKDKFPKPCNWRKNEFKKWTKLASQGRGIVNFERDKISNHWIQYYRRIPHRKLLTALQLRANVYPTREFLARGRQDQYIKACRHCDADIESCAHIIGNCPVTQDARIKRHNYICELLLEEAKKKDWVVFKEPHIRDSNKELYKPDLIFVKDARALVVDVTVRYEAAKSSLEEAAAEKVRKYKHLETEVRHLTNAKDVTFVGFPLGARGKWHQDNFKLLTELGLSKSRQVKMAETFSTVALFSSVDIVHMFASRARKSMVM

SEQ ID NO: 264 - protein, 1356 aa, synthetic construct
MAPKKKRKVESTVGPACPPGRTVTKRPWALAEDTPRGPDSPPKRPRPNSLPLTTTFRPLPPPPQTTSAVDPSSHSPVNPPRDQHATDTADEKPRAASPALSDASGPPTPDIPLSPGGTHARDPDADPDSPDLDSSGSETPGTSESATPESLFVPEEGSSEKESEDAPKTSPPTPGKHGLEQTGEEKVMVTVPDKNPPCPCCGTRVNSVLNLIEHLKVSHGKRGVCFRCAKCGKENSNYHSVVCHFPKCRGPETEKAPAGEWICEVCNRDFTTKIGLGQHKRLAHPAVRNQERIVASQPKETSNRGAHKRCWTKEEEELLIRLEAQFEGNKNINKLIAEHITTKTAKQISDKRRLLSRKPAEEPREEPGTCHHTRRAAASLRTEPEMSHHAQAEDRDNGPGRRPLPGRAAAGGRTMDEIRRHPDKGNGQQRPTKQKSEEQLQAYYKKTLEERLSAGALNTFPRAFKQVMEGRDIKLVINQTAQDCFGCLESISQIRTATRDKKDTVTREKHPKKPFQKWMKDRAIKKGNYLRFQRLFYLDRGKLAKIILDDIECLSCDIPLSEIYSVFKTRWETTGSFKSLGDFKTYGKADNTAFRELITAKEIEKNVQEMSKGSAPGPDGITLGDVVKMDPEFSRTMEIFNLWLTTGKIPDMVRGCRTVLIPKSSKPDRLKDINNWRPITIGSILLRLFSRIVTARLSKACPLNPRQRGFIRAAGCSENLKLLQTIIWSAKREHRPLGVVFVDIAKAFDTVSHQHIIHALQQREVDPHIVGLVSNMYENISTYITTKRNTHTDKIQIRVGVKQGDPMSPLLFNLAMDPLLCKLEESGKGYHRGQSSITAMAFADDLVLLSDSWENMNTNISILETFCNLTGLKTQGQKCHGFYIKPTKDSYTINDCAAWTINGTPLNMIDPGESEKYLGLQFDPWIGIARSGLSTKLDFWLQRIDQAPLKPLQKTDILKTYTIPRLIYIADHSEVKTALLETLDQKIRTAVKEWLHLPPCTCDAILYSSTRDGGLGITKLAGLIPSVQARRLHRIAQSSDDTMKCFMEKEKMEQLHKKLWIQAGGDRENIPSIWEAPPSSEPPNNVSTNSEWEAPTQKDKFPKPCNWRKNEFKKWTKLASQGRGIVNFERDKISNHWIQYYRRIPHRKLLTALQLRANVYPTREFLARGRQDQYIKACRHCDADIESCAHIIGNCPVTQDARIKRHNYICELLLEEAKKKDWVVFKEPHIRDSNKELYKPDLIFVKDARALVVDVTVRYEAAKSSLEEAAAEKVRKYKHLETEVRHLTNAKDVTFVGFPLGARGKWHQDNFKLLTELGLSKSRQVKMAETFSTVALFSSVDIVHMFASRARKSMVM

SEQ ID NO: 265 - protein, 1254 aa, synthetic construct
MAPKKKRKVPTLLGFHTASGKKVKIAKESLDKVKNLFDEKEQGGSGGGLFVPEEGSSEKESEDAPKTSPPTPGKHGLEQTGEEKVMVTVPDKNPPCPCCGTRVNSVLNLIEHLKVSHGKRGVCFRCAKCGKENSNYHSVVCHFPKCRGPETEKAPAGEWICEVCNRDFTTKIGLGQHKRLAHPAVRNQERIVASQPKETSNRGAHKRCWTKEEEELLIRLEAQFEGNKNINKLIAEHITTKTAKQISDKRRLLSRKPAEEPREEPGTCHHTRRAAASLRTEPEMSHHAQAEDRDNGPGRRPLPGRAAAGGRTMDEIRRHPDKGNGQQRPTKQKSEEQLQAYYKKTLEERLSAGALNTFPRAFKQVMEGRDIKLVINQTAQDCFGCLESISQIRTATRDKKDTVTREKHPKKPFQKWMKDRAIKKGNYLRFQRLFYLDRGKLAKIILDDIECLSCDIPLSEIYSVFKTRWETTGSFKSLGDFKTYGKADNTAFRELITAKEIEKNVQEMSKGSAPGPDGITLGDVVKMDPEFSRTMEIFNLWLTTGKIPDMVRGCRTVLIPKSSKPDRLKDINNWRPITIGSILLRLFSRIVTARLSKACPLNPRQRGFIRAAGCSENLKLLQTIIWSAKREHRPLGVVFVDIAKAFDTVSHQHIIHALQQREVDPHIVGLVSNMYENISTYITTKRNTHTDKIQIRVGVKQGDPMSPLLFNLAMDPLLCKLEESGKGYHRGQSSITAMAFADDLVLLSDSWENMNTNISILETFCNLTGLKTQGQKCHGFYIKPTKDSYTINDCAAWTINGTPLNMIDPGESEKYLGLQFDPWIGIARSGLSTKLDFWLQRIDQAPLKPLQKTDILKTYTIPRLIYIADHSEVKTALLETLDQKIRTAVKEWLHLPPCTCDAILYSSTRDGGLGITKLAGLIPSVQARRLHRIAQSSDDTMKCFMEKEKMEQLHKKLWIQAGGDRENIPSIWEAPPSSEPPNNVSTNSEWEAPTQKDKFPKPCNWRKNEFKKWTKLASQGRGIVNFERDKISNHWIQYYRRIPHRKLLTALQLRANVYPTREFLARGRQDQYIKACRHCDADIESCAHIIGNCPVTQDARIKRHNYICELLLEEAKKKDWVVFKEPHIRDSNKELYKPDLIFVKDARALVVDVTVRYEAAKSSLEEAAAEKVRKYKHLETEVRHLTNAKDVTFVGFPLGARGKWHQDNFKLLTELGLSKSRQVKMAETFSTVALFSSVDIVHMFASRARKSMVM

SEQ ID NO: 266 - protein, 1574 aa, synthetic construct
MAPKKKRKVGIHGVPAAAMQMQLEANADTSVEEESFGPQPISRLEQCGINANDVKKLEEAGFHTVEAVAYAPKKELINIKGISEAKADKILAEAAKLVPMGFTTETEFHQRRSEIIQITTGSKELDKLLQGGIETGSITEMFGEFRTGKTQICHTLAVTCQLPIDRGGGEGKAMYIDTEGTFRPERLLAVAERYGLSGSDVLDNVAYARAFNTDHQTQLLYQASAMMVESRYALLIVDSATALYRTDYSGRGELSARQMHLARFLRMLLRLADEFGVAVVITNQVVAQVDGAAMFAADPKKPIGGNIIAHASTTRLYLRKGRGETRICKIYDSPCLPEAEAMFAINADGVGDAKDGGSGSETPGTSESLFVPEEGSSEKESEDAPKTSPPTPGKHGLEQTGEEKVMVTVPDKNPPCPCCGTRVNSVLNLIEHLKVSHGKRGVCFRCAKCGKENSNYHSVVCHFPKCRGPETEKAPAGEWICEVCNRDFTTKIGLGQHKRLAHPAVRNQERIVASQPKETSNRGAHKRCWTKEEEELLIRLEAQFEGNKNINKLIAEHITTKTAKQISDKRRLLSRKPAEEPREEPGTCHHTRRAAASLRTEPEMSHHAQAEDRDNGPGRRPLPGRAAAGGRTMDEIRRHPDKGNGQQRPTKQKSEEQLQAYYKKTLEERLSAGALNTFPRAFKQVMEGRDIKLVINQTAQDCFGCLESISQIRTATRDKKDTVTREKHPKKPFQKWMKDRAIKKGNYLRFQRLFYLDRGKLAKIILDDIECLSCDIPLSEIYSVFKTRWETTGSFKSLGDFKTYGKADNTAFRELITAKEIEKNVQEMSKGSAPGPDGITLGDVVKMDPEFSRTMEIFNLWLTTGKIPDMVRGCRTVLIPKSSKPDRLKDINNWRPITIGSILLRLFSRIVTARLSKACPLNPRQRGFIRAAGCSENLKLLQTIIWSAKREHRPLGVVFVDIAKAFDTVSHQHIIHALQQREVDPHIVGLVSNMYENISTYITTKRNTHTDKIQIRVGVKQGDPMSPLLFNLAMDPLLCKLEESGKGYHRGQSSITAMAFADDLVLLSDSWENMNTNISILETFCNLTGLKTQGQKCHGFYIKPTKDSYTINDCAAWTINGTPLNMIDPGESEKYLGLQFDPWIGIARSGLSTKLDFWLQRIDQAPLKPLQKTDILKTYTIPRLIYIADHSEVKTALLETLDQKIRTAVKEWLHLPPCTCDAILYSSTRDGGLGITKLAGLIPSVQARRLHRIAQSSDDTMKCFMEKEKMEQLHKKLWIQAGGDRENIPSIWEAPPSSEPPNNVSTNSEWEAPTQKDKFPKPCNWRKNEFKKWTKLASQGRGIVNFERDKISNHWIQYYRRIPHRKLLTALQLRANVYPTREFLARGRQDQYIKACRHCDADIESCAHIIGNCPVTQDARIKRHNYICELLLEEAKKKDWVVFKEPHIRDSNKELYKPDLIFVKDARALVVDVTVRYEAAKSSLEEAAAEKVRKYKHLETEVRHLTNAKDVTFVGFPLGARGKWHQDNFKLLTELGLSKSRQVKMAETFSTVALFSSVDIVHMFASRARKSMVM

SEQ ID NO: 267 - protein, 1527 aa, synthetic construct
MAPKKKRKVNISGSSCGSPNSADTSSDFKDLWTKLKECHDREVQGLQVKVTKLKQERILDAQRLEEFFTKNQQLREQQKVLHETIKVLEDRLRAGLCDRCAVTEEHMRKKQQEFENIRQQNLKLITELMNERNTLQEENKKLSEQLQQKIENDQQHQAAELECEEDVIPDSPITAFSFSGVNRLRRKENPHVRYIEQTHTKLEHSVCANEMRKVSKSSTHPQHNPNENEILVADTYDQSQSPMAKAHGTSSYTPDKSSFNLATVVAETLGLGVQEESETQGPMSPLGDELYHCLEGNHKKQPFESGSETPGTSESATPEGSLFVPEEGSSEKESEDAPKTSPPTPGKHGLEQTGEEKVMVTVPDKNPPCPCCGTRVNSVLNLIEHLKVSHGKRGVCFRCAKCGKENSNYHSVVCHFPKCRGPETEKAPAGEWICEVCNRDFTTKIGLGQHKRLAHPAVRNQERIVASQPKETSNRGAHKRCWTKEEEELLIRLEAQFEGNKNINKLIAEHITTKTAKQISDKRRLLSRKPAEEPREEPGTCHHTRRAAASLRTEPEMSHHAQAEDRDNGPGRRPLPGRAAAGGRTMDEIRRHPDKGNGQQRPTKQKSEEQLQAYYKKTLEERLSAGALNTFPRAFKQVMEGRDIKLVINQTAQDCFGCLESISQIRTATRDKKDTVTREKHPKKPFQKWMKDRAIKKGNYLRFQRLFYLDRGKLAKIILDDIECLSCDIPLSEIYSVFKTRWETTGSFKSLGDFKTYGKADNTAFRELITAKEIEKNVQEMSKGSAPGPDGITLGDVVKMDPEFSRTMEIFNLWLTTGKIPDMVRGCRTVLIPKSSKPDRLKDINNWRPITIGSILLRLFSRIVTARLSKACPLNPRQRGFIRAAGCSENLKLLQTIIWSAKREHRPLGVVFVDIAKAFDTVSHQHIIHALQQREVDPHIVGLVSNMYENISTYITTKRNTHTDKIQIRVGVKQGDPMSPLLFNLAMDPLLCKLEESGKGYHRGQSSITAMAFADDLVLLSDSWENMNTNISILETFCNLTGLKTQGQKCHGFYIKPTKDSYTINDCAAWTINGTPLNMIDPGESEKYLGLQFDPWIGIARSGLSTKLDFWLQRIDQAPLKPLQKTDILKTYTIPRLIYIADHSEVKTALLETLDQKIRTAVKEWLHLPPCTCDAILYSSTRDGGLGITKLAGLIPSVQARRLHRIAQSSDDTMKCFMEKEKMEQLHKKLWIQAGGDRENIPSIWEAPPSSEPPNNVSTNSEWEAPTQKDKFPKPCNWRKNEFKKWTKLASQGRGIVNFERDKISNHWIQYYRRIPHRKLLTALQLRANVYPTREFLARGRQDQYIKACRHCDADIESCAHIIGNCPVTQDARIKRHNYICELLLEEAKKKDWVVFKEPHIRDSNKELYKPDLIFVKDARALVVDVTVRYEAAKSSLEEAAAEKVRKYKHLETEVRHLTNAKDVTFVGFPLGARGKWHQDNFKLLTELGLSKSRQVKMAETFSTVALFSSVDIVHMFASRARKSMVM

SEQ ID NO: 268-269 - skipped (2 entries)

SEQ ID NO: 270 - protein, 1399 aa, synthetic construct
MASCPKPGPPVSAGAMSLESGLTTHSVLAIERGPNSLANSGSDFGGGGLGLPLRLLRVSVGTQTSRSDWVDLVSWSHPGPTSKSQQVDLVSLFPKHRVDLLSKNDQVDLVAQFLPSKFPPNLAENDLALLVNLEFYRSDLHVYECVHFAAHWEGLSGLPEVYEQLAPQPCVGETLHSSLPRDSELFVPEEGSSEKESEDAPKTSPPTPGKHGLEQTGEEKVMVTVPDKNPPCPCCGTRVNSVLNLIEHLKVSHGKRGVCFRCAKCGKENSNYHSVVCHFPKCRGPETEKAPAGEWICEVCNRDFTTKIGLGQHKRLAHPAVRNQERIVASQPKETSNRGAHKRCWTKEEEELLIRLEAQFEGNKNINKLIAEHITTKTAKQISDKRRLLSRKPAEEPREEPGTCHHTRRAAASLRTEPEMSHHAQAEDRDNGPGRRPLPGRAAAGGRTMDEIRRHPDKGNGQQRPTKQKSEEQLQAYYKKTLEERLSAGALNTFPRAFKQVMEGRDIKLVINQTAQDCFGCLESISQIRTATRDKKDTVTREKHPKKPFQKWMKDRAIKKGNYLRFQRLFYLDRGKLAKIILDDIECLSCDIPLSEIYSVFKTRWETTGSFKSLGDFKTYGKADNTAFRELITAKEIEKNVQEMSKGSAPGPDGITLGDVVKMDPEFSRTMEIFNLWLTTGKIPDMVRGCRTVLIQCLAHKQIPRAWRKTKIIAILKPGKDASNARNYRPISLLCHLYKVYERMLLNRLGPVIEPKLIAQQAGFRPGKNCTGQILHLTEHIEEGYEKGCITGTVFVDLTAAYDTVQHRKMLHKVYHITRDFDFTKTVQTLLENRSFYVEFQGQKSRWRRQKNGLPQGSVLAPTLFNIFTNDQPQPPLTKSFIYADDLGLTTQAKDFETVEKQLTNALKDLSSYYKENHLKPNPAKTQVCAFHLRNREANRKLKVTWEGQELEHCFHPKYLGVTQFDPWIGIARSGLSTKLDFWLQRIDQAPLKPLQKTDILKTYTIPRLIYIADHSEVKTALLETLDQKIRTAVKEWLHLPPCTCDAILYSSTRDGGLGITKLAGLIPSVQARRLHRIAQSSDDTMKCFMEKEKMEQLHKKLWIQAGGDRENIPSIWEAPPSSEPPNNVSTNSEWEAPTQKDKFPKPCNWRKNEFKKWTKLASQGRGIVNFERDKISNHWIQYYRRIPHRKLLTALQLRANVYPTREFLARGRQDQYIKACRHCDADIESCAHIIGNCPVTQDARIKRHNYICELLLEEAKKKDWVVFKEPHIRDSNKELYKPDLIFVKDARALVVDVTVRYEAAKSSLEEAAAEKVRKYKHLETEVRHLTNAKDVTFVGFPLGARGKWHQDNFKLLTELGLSKSRQVKMAETFSTVALFSSVDIVHMFASRARKSMVM

SEQ ID NO: 271 - protein, 1808 aa, synthetic construct
MASCPKPGPPVSAGAMSLESGLTTHSVLAIERGPNSLANSGSDFGGGGLGLPLRLLRVSVGTQTSRSDWVDLVSWSHPGPTSKSQQVDLVSLFPKHRVDLLSKNDQVDLVAQFLPSKFPPNLAENDLALLVNLEFYRSDLHVYECVHFAAHWEGLSGLPEVYEQLAPQPCVGETLHSSLPRDSELFVPEEGSSEKESEDAPKTSPPTPGKHGLEQTGEEKVMVTVPDKNPPCPCCGTRVNSVLNLIEHLKVSHGKRGVCFRCAKCGKENSNYHSVVCHFPKCRGPETEKAPAGEWICEVCNRDFTTKIGLGQHKRLAHPAVRNQERIVASQPKETSNRGAHKRCWTKEEEELLIRLEAQFEGNKNINKLIAEHITTKTAKQISDKRRLLSRKPAEEPREEPGTCHHTRRAAASLRTEPEMSHHAQAEDRDNGPGRRPLPGRAAAGGRTMDEIRRHPDKGNGQQRPTKQKSEEQLQAYYKKTLEERLSAGALNTFPRAFKQVMEGRDIKLVINQTAQDCFGCLESISQIRTATRDKKDTVTREKHPKKPFQKWMKDRAIKKGNYLRFQRLFYLDRGKLAKIILDDIECLSCDIPLSEIYSVFKTRWETTGSFKSLGDFKTYGKADNTAFRELITAKEIEKNVQEMSKGSAPGPDGITLGDVVKMDPEFSRTMEIFNLWLTTGKIPDMVRGCRTVLITLNIEDEYRLHETSKEPDVSLGSTWLSDFPQAWAETGGMGLAVRQAPLIIPLKATSTPVSIKQYPMSQEARLGIKPHIQRLLDQGILVPCQSPWNTPLLPVKKPGTNDYRPVQDLREVNKRVEDIHPTVPNPYNLLSGLPPSHQWYTVLDLKDAFFCLRLHPTSQPLFAFEWRDPEMGISGQLTWTRLPQGFKNSPTLFNEALHRDLADFRIQHPDLILLQYVDDLLLAATSELDCQQGTRALLQTLGNLGYRASAKKAQICQKQVKYLGYLLKEGQRWLTEARKETVMGQPTPKTPRQLREFLGKAGFCRLFIPGFAEMAAPLYPLTKPGTLFNWGPDQQKAYQEIKQALLTAPALGLPDLTKPFELFVDEKQGYAKGVLTQKLGPWRRPVAYLSKKLDPVAAGWPPCLRMVAAIAVLTKDAGKLTMGQPLVILAPHAVEALVKQPPDRWLSNARMTHYQALLLDTDRVQFGPVVALNPATLLPLPEEGLQHNCLDILAEAHGTRPDLTDQPLPDADHTWYTDGSSLLQEGQRKAGAAVTTETEVIWAKALPAGTSAQRAELIALTQALKMAEGKKLNVYTDSRYAFATAHIHGEIYRRRGWLTSEGKEIKNKDEILALLKALFLPKRLSIIHCPGHQKGHSAEARGNRMADQAARKAAITETPDTSTLLIENSSPQFDPWIGIARSGLSTKLDFWLQRIDQAPLKPLQKTDILKTYTIPRLIYIADHSEVKTALLETLDQKIRTAVKEWLHLPPCTCDAILYSSTRDGGLGITKLAGLIPSVQARRLHRIAQSSDDTMKCFMEKEKMEQLHKKLWIQAGGDRENIPSIWEAPPSSEPPNNVSTNSEWEAPTQKDKFPKPCNWRKNEFKKWTKLASQGRGIVNFERDKISNHWIQYYRRIPHRKLLTALQLRANVYPTREFLARGRQDQYIKACRHCDADIESCAHIIGNCPVTQDARIKRHNYICELLLEEAKKKDWVVFKEPHIRDSNKELYKPDLIFVKDARALVVDVTVRYEAAKSSLEEAAAEKVRKYKHLETEVRHLTNAKDVTFVGFPLGARGKWHQDNFKLLTELGLSKSRQVKMAETFSTVALFSSVDIVHMFASRARKSMVM

SEQ ID NO: 272 - protein, 1381 aa, synthetic construct
MASCPKPGPPVSAGAMSLESGLTTHSVLAIERGPNSLANSGSDFGGGGLGLPLRLLRVSVGTQTSRSDWVDLVSWSHPGPTSKSQQVDLVSLFPKHRVDLLSKNDQVDLVAQFLPSKFPPNLAENDLALLVNLEFYRSDLHVYECVHFAAHWEGLSGLPEVYEQLAPQPCVGETLHSSLPRDSELFVPEEGSSEKESEDAPKTSPPTPGKHGLEQTGEEKVMVTVPDKNPPCPCCGTRVNSVLNLIEHLKVSHGKRGVCFRCAKCGKENSNYHSVVCHFPKCRGPETEKAPAGEWICEVCNRDFTTKIGLGQHKRLAHPAVRNQERIVASQPKETSNRGAHKRCWTKEEEELLIRLEAQFEGNKNINKLIAEHITTKTAKQISDKRRLLSRKPAEEPREEPGTCHHTRRAAASLRTEPEMSHHAQAEDRDNGPGRRPLPGRAAAGGRTMDEIRRHPDKGNGQQRPTKQKSEEQLQAYYKKTLEERLSAGALNTFPRAFKQVMEGRDIKLVINQTAQDCFGCLESISQIRTATRDKKDTVTREKHPKKPFQKWMKDRAIKKGNYLRFQRLFYLDRGKLAKIILDDIECLSCDIPLSEIYSVFKTRWETTGSFKSLGDFKTYGKADNTAFRELITAKEIEKNVQEMSKGSAPGPDGITLGDVVKMDPEFSRTMEIFNLWLTTGKIPDMVRGCRTVLIPKVPNPTSPDQLRPISVSSILVRCFHKVLADRWSRRLQLPSLQFAFLHRDGCLEATSLLHALLRHSSATASNLSLAFVDISKAFDSVSHDTIVRSAEAFGAPSPLVRYIAQSYENAVAVFPSSEVHCHRGVRQGDPLSPLLFIMAMDEVLGLSMPQLGYQFHDTLVDGFAFADDWVVCAESQARLKEKLEAAAVELGRAGMKINARKTKAMVICGDRKHRATAVSVEPFCFAEELITPLGPTDTVTYLGIQFDPWIGIARSGLSTKLDFWLQRIDQAPLKPLQKTDILKTYTIPRLIYIADHSEVKTALLETLDQKIRTAVKEWLHLPPCTCDAILYSSTRDGGLGITKLAGLIPSVQARRLHRIAQSSDDTMKCFMEKEKMEQLHKKLWIQAGGDRENIPSIWEAPPSSEPPNNVSTNSEWEAPTQKDKFPKPCNWRKNEFKKWTKLASQGRGIVNFERDKISNHWIQYYRRIPHRKLLTALQLRANVYPTREFLARGRQDQYIKACRHCDADIESCAHIIGNCPVTQDARIKRHNYICELLLEEAKKKDWVVFKEPHIRDSNKELYKPDLIFVKDARALVVDVTVRYEAAKSSLEEAAAEKVRKYKHLETEVRHLTNAKDVTFVGFPLGARGKWHQDNFKLLTELGLSKSRQVKMAETFSTVALFSSVDIVHMFASRARKSMVM

SEQ ID NO: 273 - protein, 1386 aa, synthetic construct
MASCPKPGPPVSAGAMSLESGLTTHSVLAIERGPNSLANSGSDFGGGGLGLPLRLLRVSVGTQTSRSDWVDLVSWSHPGPTSKSQQVDLVSLFPKHRVDLLSKNDQVDLVAQFLPSKFPPNLAENDLALLVNLEFYRSDLHVYECVHFAAHWEGLSGLPEVYEQLAPQPCVGETLHSSLPRDSELFVPEEGSSEKESEDAPKTSPPTPGKHGLEQTGEEKVMVTVPDKNPPCPCCGTRVNSVLNLIEHLKVSHGKRGVCFRCAKCGKENSNYHSVVCHFPKCRGPETEKAPAGEWICEVCNRDFTTKIGLGQHKRLAHPAVRNQERIVASQPKETSNRGAHKRCWTKEEEELLIRLEAQFEGNKNINKLIAEHITTKTAKQISDKRRLLSRKPAEEPREEPGTCHHTRRAAASLRTEPEMSHHAQAEDRDNGPGRRPLPGRAAAGGRTMDEIRRHPDKGNGQQRPTKQKSEEQLQAYYKKTLEERLSAGALNTFPRAFKQVMEGRDIKLVINQTAQDCFGCLESISQIRTATRDKKDTVTREKHPKKPFQKWMKDRAIKKGNYLRFQRLFYLDRGKLAKIILDDIECLSCDIPLSEIYSVFKTRWETTGSFKSLGDFKTYGKADNTAFRELITAKEIEKNVQEMSKGSAPGPDGITLGDVVKMDPEFSRTMEIFNLWLTTGKIPDMVRGCRTVLIPLLKKPSLDPTNWNNYRPISNLPFLGKVLERVVASQLQGFLDDTDFLDPSQSGFRPGHSTETALVALVDDLRRELDRGSVTLLVLLDISAAFDTIDHGILLGRLLGMGLGGTVLQWLQSFLEGRSQMVKLGDTCSDPWPLTCGVPQGSILSPMLFNIYMKPLGEVIRSFGVRCHLYADDTQLYYSFPPASKEAPQILNQCLAAVSDWMRANKLKLNPDKTEVLLVSRKSDRGIGWQPVLDGVALPLKAQVRSLGVQFDPWIGIARSGLSTKLDFWLQRIDQAPLKPLQKTDILKTYTIPRLIYIADHSEVKTALLETLDQKIRTAVKEWLHLPPCTCDAILYSSTRDGGLGITKLAGLIPSVQARRLHRIAQSSDDTMKCFMEKEKMEQLHKKLWIQAGGDRENIPSIWEAPPSSEPPNNVSTNSEWEAPTQKDKFPKPCNWRKNEFKKWTKLASQGRGIVNFERDKISNHWIQYYRRIPHRKLLTALQLRANVYPTREFLARGRQDQYIKACRHCDADIESCAHIIGNCPVTQDARIKRHNYICELLLEEAKKKDWVVFKEPHIRDSNKELYKPDLIFVKDARALVVDVTVRYEAAKSSLEEAAAEKVRKYKHLETEVRHLTNAKDVTFVGFPLGARGKWHQDNFKLLTELGLSKSRQVKMAETFSTVALFSSVDIVHMFASRARKSMVM

SEQ ID NO: 274 - protein, 1411 aa, synthetic construct
MASCPKPGPPVSAGAMSLESGLTTHSVLAIERGPNSLANSGSDFGGGGLGLPLRLLRVSVGTQTSRSDWVDLVSWSHPGPTSKSQQVDLVSLFPKHRVDLLSKNDQVDLVAQFLPSKFPPNLAENDLALLVNLEFYRSDLHVYECVHFAAHWEGLSGLPEVYEQLAPQPCVGETLHSSLPRDSELFVPEEGSSEKESEDAPKTSPPTPGKHGLEQTGEEKVMVTVPDKNPPCPCCGTRVNSVLNLIEHLKVSHGKRGVCFRCAKCGKENSNYHSVVCHFPKCRGPETEKAPAGEWICEVCNRDFTTKIGLGQHKRLAHPAVRNQERIVASQPKETSNRGAHKRCWTKEEEELLIRLEAQFEGNKNINKLIAEHITTKTAKQISDKRRLLSRKPAEEPREEPGTCHHTRRAAASLRTEPEMSHHAQAEDRDNGPGRRPLPGRAAAGGRTMDEIRRHPDKGNGQQRPTKQKSEEQLQAYYKKTLEERLSAGALNTFPRAFKQVMEGRDIKLVINQTAQDCFGCLESISQIRTATRDKKDTVTREKHPKKPFQKWMKDRAIKKGNYLRFQRLFYLDRGKLAKIILDDIECLSCDIPLSEIYSVFKTRWETTGSFKSLGDFKTYGKADNTAFRELITAKEIEKNVQEMSKGSAPGPDGITLGDVVKMDPEFSRTMEIFNLWLTTGKIPDMVRGCRTVLIFKKGRREDPGNYRPISLTSIPGKILEKFIKESICDKLAEGKILNDSQHGFIAGRSCLTNLISFYDQVTHHLDKREEVDIVYLDFQKAFDLVSHDVLMRKLEDCGLNCETVRWVGNWLQGRTQRVLVNGSVSSWREVASGVPQGSVLGPVLFNIFINDLDVGVKSSLAKFADDTKLWGSVVTLEDRLQIQADLDRLASWADQNQMKFNVEKCKVLHLGTNNPQHTYRLGGTKLTSTMNERDLGVIIDHSMNMSHQCDAVASRANNTLACINRCISSKTKEVQFDPWIGIARSGLSTKLDFWLQRIDQAPLKPLQKTDILKTYTIPRLIYIADHSEVKTALLETLDQKIRTAVKEWLHLPPCTCDAILYSSTRDGGLGITKLAGLIPSVQARRLHRIAQSSDDTMKCFMEKEKMEQLHKKLWIQAGGDRENIPSIWEAPPSSEPPNNVSTNSEWEAPTQKDKFPKPCNWRKNEFKKWTKLASQGRGIVNFERDKISNHWIQYYRRIPHRKLLTALQLRANVYPTREFLARGRQDQYIKACRHCDADIESCAHIIGNCPVTQDARIKRHNYICELLLEEAKKKDWVVFKEPHIRDSNKELYKPDLIFVKDARALVVDVTVRYEAAKSSLEEAAAEKVRKYKHLETEVRHLTNAKDVTFVGFPLGARGKWHQDNFKLLTELGLSKSRQVKMAETFSTVALFSSVDIVHMFASRARKSMVM

SEQ ID NO: 275 - protein, 1390 aa, synthetic construct
MASCPKPGPPVSAGAMSLESGLTTHSVLAIERGPNSLANSGSDFGGGGLGLPLRLLRVSVGTQTSRSDWVDLVSWSHPGPTSKSQQVDLVSLFPKHRVDLLSKNDQVDLVAQFLPSKFPPNLAENDLALLVNLEFYRSDLHVYECVHFAAHWEGLSGLPEVYEQLAPQPCVGETLHSSLPRDSELFVPEEGSSEKESEDAPKTSPPTPGKHGLEQTGEEKVMVTVPDKNPPCPCCGTRVNSVLNLIEHLKVSHGKRGVCFRCAKCGKENSNYHSVVCHFPKCRGPETEKAPAGEWICEVCNRDFTTKIGLGQHKRLAHPAVRNQERIVASQPKETSNRGAHKRCWTKEEEELLIRLEAQFEGNKNINKLIAEHITTKTAKQISDKRRLLSRKPAEEPREEPGTCHHTRRAAASLRTEPEMSHHAQAEDRDNGPGRRPLPGRAAAGGRTMDEIRRHPDKGNGQQRPTKQKSEEQLQAYYKKTLEERLSAGALNTFPRAFKQVMEGRDIKLVINQTAQDCFGCLESISQIRTATRDKKDTVTREKHPKKPFQKWMKDRAIKKGNYLRFQRLFYLDRGKLAKIILDDIECLSCDIPLSEIYSVFKTRWETTGSFKSLGDFKTYGKADNTAFRELITAKEIEKNVQEMSKGSAPGPDGITLGDVVKMDPEFSRTMEIFNLWLTTGKIPDMVRGCRTVLIPKSTQPDRLKDINNWRPITIGSILLRLFSRIITARMTKACPLNPRQRGFIRAAGCSENLKLLQTIIRSAKSEHRPLGVVFVDIAKAFDTVSHQHILHVLQQRGVDPHIIGLVSNMYKDISTFVTTKKDTHTDKIQIRVGVKQGDPLSPLLFNLAMDPLLCKLEESGNGFHRGGHTITAMAFADDLVLLSDSWENMEKNIEILEAFCDLTGLKTQGQKCHGFYIKPTKDSYTVNNCAAWTIYGTPLNMINPGDSEKYLGLQFDPWIGIARSGLSTKLDFWLQRIDQAPLKPLQKTDILKTYTIPRLIYIADHSEVKTALLETLDQKIRTAVKEWLHLPPCTCDAILYSSTRDGGLGITKLAGLIPSVQARRLHRIAQSSDDTMKCFMEKEKMEQLHKKLWIQAGGDRENIPSIWEAPPSSEPPNNVSTNSEWEAPTQKDKFPKPCNWRKNEFKKWTKLASQGRGIVNFERDKISNHWIQYYRRIPHRKLLTALQLRANVYPTREFLARGRQDQYIKACRHCDADIESCAHIIGNCPVTQDARIKRHNYICELLLEEAKKKDWVVFKEPHIRDSNKELYKPDLIFVKDARALVVDVTVRYEAAKSSLEEAAAEKVRKYKHLETEVRHLTNAKDVTFVGFPLGARGKWHQDNFKLLTELGLSKSRQVKMAETFSTVALFSSVDIVHMFASRARKSMVM

SEQ ID NO: 276 - protein, 1537 aa, synthetic construct
MASCPKPGPPVSAGAMSLESGLTTHSVLAIERGPNSLANSGSDFGGGGLGLPLRLLRVSVGTQTSRSDWVDLVSWSHPGPTSKSQQVDLVSLFPKHRVDLLSKNDQVDLVAQFLPSKFPPNLAENDLALLVNLEFYRSDLHVYECVHFAAHWEGLSGLPEVYEQLAPQPCVGETLHSSLPRDSELFVPEEGSSEKESEDAPKTSPPTPGKHGLEQTGEEKVMVTVPDKNPPCPCCGTRVNSVLNLIEHLKVSHGKRGVCFRCAKCGKENSNYHSVVCHFPKCRGPETEKAPAGEWICEVCNRDFTTKIGLGQHKRLAHPAVRNQERIVASQPKETSNRGAHKRCWTKEEEELLIRLEAQFEGNKNINKLIAEHITTKTAKQISDKRRLLSRKPAEEPREEPGTCHHTRRAAASLRTEPEMSHHAQAEDRDNGPGRRPLPGRAAAGGRTMDEIRRHPDKGNGQQRPTKQKSEEQLQAYYKKTLEERLSAGALNTFPRAFKQVMEGRDIKLVINQTAQDCFGCLESISQIRTATRDKKDTVTREKHPKKPFQKWMKDRAIKKGNYLRFQRLFYLDRGKLAKIILDDIECLSCDIPLSEIYSVFKTRWETTGSFKSLGDFKTYGKADNTAFRELITAKEIEKNVQEMSKGSAPGPDGITLGDVVKMDPEFSRTMEIFNLWLTTGKIPDMVRGCRTVLIDPIPSHLLQAISPAVIPTLTHIINTSLDSGLFPTTFKQARVTPLLKKPNLDHTLLENYRPVSLLPFMAKILEKVVFNQVLDFLTQNNLMDNKQSGFKKGHSTETALLSVVEDLRLAKADSKSSVLILLDLSAAFDTVNHQILLSTLESLGVAGTVIQWFRSYLSDRSFRVSWRGEVSKLQHLNTGVPQGSVLGPLLFSIYTSSLGPVIQRHGFSYHCYADDTQLYLSFHPDDPSVPARISACLLDISHWMKDHHLQLNLAKTEMLVVSANPTLHHNFSIQMDGATITASKMVKSLGVTIDDQLNFSDHISRTARSCRFALYNIRKIRPFLSEHAAQLLVQALVLSKLDYCNSLLAGLPANSIKPLQLLQNAAARVVFNEPKRAHVTPLLVRLHWLPVAARIKFKTLQFDPWIGIARSGLSTKLDFWLQRIDQAPLKPLQKTDILKTYTIPRLIYIADHSEVKTALLETLDQKIRTAVKEWLHLPPCTCDAILYSSTRDGGLGITKLAGLIPSVQARRLHRIAQSSDDTMKCFMEKEKMEQLHKKLWIQAGGDRENIPSIWEAPPSSEPPNNVSTNSEWEAPTQKDKFPKPCNWRKNEFKKWTKLASQGRGIVNFERDKISNHWIQYYRRIPHRKLLTALQLRANVYPTREFLARGRQDQYIKACRHCDADIESCAHIIGNCPVTQDARIKRHNYICELLLEEAKKKDWVVFKEPHIRDSNKELYKPDLIFVKDARALVVDVTVRYEAAKSSLEEAAAEKVRKYKHLETEVRHLTNAKDVTFVGFPLGARGKWHQDNFKLLTELGLSKSRQVKMAETFSTVALFSSVDIVHMFASRARKSMVM

SEQ ID NO: 277 - protein, 1541 aa, synthetic construct
MASCPKPGPPVSAGAMSLESGLTTHSVLAIERGPNSLANSGSDFGGGGLGLPLRLLRVSVGTQTSRSDWVDLVSWSHPGPTSKSQQVDLVSLFPKHRVDLLSKNDQVDLVAQFLPSKFPPNLAENDLALLVNLEFYRSDLHVYECVHFAAHWEGLSGLPEVYEQLAPQPCVGETLHSSLPRDSELFVPEEGSSEKESEDAPKTSPPTPGKHGLEQTGEEKVMVTVPDKNPPCPCCGTRVNSVLNLIEHLKVSHGKRGVCFRCAKCGKENSNYHSVVCHFPKCRGPETEKAPAGEWICEVCNRDFTTKIGLGQHKRLAHPAVRNQERIVASQPKETSNRGAHKRCWTKEEEELLIRLEAQFEGNKNINKLIAEHITTKTAKQISDKRRLLSRKPAEEPREEPGTCHHTRRAAASLRTEPEMSHHAQAEDRDNGPGRRPLPGRAAAGGRTMDEIRRHPDKGNGQQRPTKQKSEEQLQAYYKKTLEERLSAGALNTFPRAFKQVMEGRDIKLVINQTAQDCFGCLESISQIRTATRDKKDTVTREKHPKKPFQKWMKDRAIKKGNYLRFQRLFYLDRGKLAKIILDDIECLSCDIPLSEIYSVFKTRWETTGSFKSLGDFKTYGKADNTAFRELITAKEIEKNVQEMSKGSAPGPDGITLGDVVKMDPEFSRTMEIFNLWLTTGKIPDMVRGCRTVLIDTSNLMEQILSSDNLNRAYLQVVRNKGAEGVDGMKYTELKEHLAKNGETIKGQLRTAAYKPQPARRVEIPKPDGGVRNLGVPTVTDRFIQQAIAQVLTPIYEEQFHDHSYGFRPNRCAQQAILTALNIMNDGNDWIVDIDLEKFFDTVNHDKLMTLIGRTIADGDVISIVRKYLVSGIMIDDEYEDSIVGTPQGGNLSPLLANIMLNELDKEMEAAGLNFVRYADDCIIMVGSEMSANRVMRNISRFIEEKLGLKVNMTKSKVDRPSGLKYLGFGFYFDPRAHQFKAKPHAKSVAKFKKRMKELTCRSWGVSNSYKVEKLNQLIRGWINYFKIGSMKTLCKELDSRIRYRLRMCIWKQWKTPQNQEKNLVKLGIDRNTARRVAYTGKRIAYVCNKGAVNVAISNKRLASFQFDPWIGIARSGLSTKLDFWLQRIDQAPLKPLQKTDILKTYTIPRLIYIADHSEVKTALLETLDQKIRTAVKEWLHLPPCTCDAILYSSTRDGGLGITKLAGLIPSVQARRLHRIAQSSDDTMKCFMEKEKMEQLHKKLWIQAGGDRENIPSIWEAPPSSEPPNNVSTNSEWEAPTQKDKFPKPCNWRKNEFKKWTKLASQGRGIVNFERDKISNHWIQYYRRIPHRKLLTALQLRANVYPTREFLARGRQDQYIKACRHCDADIESCAHIIGNCPVTQDARIKRHNYICELLLEEAKKKDWVVFKEPHIRDSNKELYKPDLIFVKDARALVVDVTVRYEAAKSSLEEAAAEKVRKYKHLETEVRHLTNAKDVTFVGFPLGARGKWHQDNFKLLTELGLSKSRQVKMAETFSTVALFSSVDIVHMFASRARKSMVM

SEQ ID NO: 278 - protein, 1554 aa, synthetic construct
MASCPKPGPPVSAGAMSLESGLTTHSVLAIERGPNSLANSGSDFGGGGLGLPLRLLRVSVGTQTSRSDWVDLVSWSHPGPTSKSQQVDLVSLFPKHRVDLLSKNDQVDLVAQFLPSKFPPNLAENDLALLVNLEFYRSDLHVYECVHFAAHWEGLSGLPEVYEQLAPQPCVGETLHSSLPRDSELFVPEEGSSEKESEDAPKTSPPTPGKHGLEQTGEEKVMVTVPDKNPPCPCCGTRVNSVLNLIEHLKVSHGKRGVCFRCAKCGKENSNYHSVVCHFPKCRGPETEKAPAGEWICEVCNRDFTTKIGLGQHKRLAHPAVRNQERIVASQPKETSNRGAHKRCWTKEEEELLIRLEAQFEGNKNINKLIAEHITTKTAKQISDKRRLLSRKPAEEPREEPGTCHHTRRAAASLRTEPEMSHHAQAEDRDNGPGRRPLPGRAAAGGRTMDEIRRHPDKGNGQQRPTKQKSEEQLQAYYKKTLEERLSAGALNTFPRAFKQVMEGRDIKLVINQTAQDCFGCLESISQIRTATRDKKDTVTREKHPKKPFQKWMKDRAIKKGNYLRFQRLFYLDRGKLAKIILDDIECLSCDIPLSEIYSVFKTRWETTGSFKSLGDFKTYGKADNTAFRELITAKEIEKNVQEMSKGSAPGPDGITLGDVVKMDPEFSRTMEIFNLWLTTGKIPDMVRGCRTVLIALLERILARDNLITALKRVEANQGAPGIDGVSTDQLRDYIRAHWSTIHAQLLAGTYRPAPVRRVEIPKPGGGTRQLGIPTVVDRLIQQAILQELTPIFDPDFSSSSFGFRPGRNAHDAVRQAQGYIQEGYRYVVDMDLEKFFDRVNHDILMSRVARKVKDKRVLKLIRAYLQAGVMIEGVKVQTEEGTPQGGPLSPLLANILLDDLDKELEKRGLKFCRYADDCNIYVKSLRAGQRVKQSIQRFLEKTLKLKVNEEKSAVDRPWKRAFLGFSFTPERKARIRLAPRSIQRLKQRIRQLTNPNWSISMPERIHRVNQYVMGWIGYFRLVETPSVLQTIEGWIRRRLRLCQWLQWKRVRTRIRELRALGLKETAVMEIANTRKGAWRTTKTPQLHQALGKTYWTAQGLKSLTQRYFELRQGSEFEQFDPWIGIARSGLSTKLDFWLQRIDQAPLKPLQKTDILKTYTIPRLIYIADHSEVKTALLETLDQKIRTAVKEWLHLPPCTCDAILYSSTRDGGLGITKLAGLIPSVQARRLHRIAQSSDDTMKCFMEKEKMEQLHKKLWIQAGGDRENIPSIWEAPPSSEPPNNVSTNSEWEAPTQKDKFPKPCNWRKNEFKKWTKLASQGRGIVNFERDKISNHWIQYYRRIPHRKLLTALQLRANVYPTREFLARGRQDQYIKACRHCDADIESCAHIIGNCPVTQDARIKRHNYICELLLEEAKKKDWVVFKEPHIRDSNKELYKPDLIFVKDARALVVDVTVRYEAAKSSLEEAAAEKVRKYKHLETEVRHLTNAKDVTFVGFPLGARGKWHQDNFKLLTELGLSKSRQVKMAETFSTVALFSSVDIVHMFASRARKSMVM

SEQ ID NO: 279 - protein, 1390 aa, synthetic construct
MASCPKPGPPVSAGAMSLESGLTTHSVLAIERGPNSLANSGSDFGGGGLGLPLRLLRVSVGTQTSRSDWVDLVSWSHPGPTSKSQQVDLVSLFPKHRVDLLSKNDQVDLVAQFLPSKFPPNLAENDLALLVNLEFYRSDLHVYECVHFAAHWEGLSGLPEVYEQLAPQPCVGETLHSSLPRDSELFVPEEGSSEKESEDAPKTSPPTPGKHGLEQTGEEKVMVTVPDKNPPCPCCGTRVNSVLNLIEHLKVSHGKRGVCFRCAKCGKENSNYHSVVCHFPKCRGPETEKAPAGEWICEVCNRDFTTKIGLGQHKRLAHPAVRNQERIVASQPKETSNRGAHKRCWTKEEEELLIRLEAQFEGNKNINKLIAEHITTKTAKQISDKRRLLSRKPAEEPREEPGTCHHTRRAAASLRTEPEMSHHAQAEDRDNGPGRRPLPGRAAAGGRTMDEIRRHPDKGNGQQRPTKQKSEEQLQAYYKKTLEERLSAGALNTFPRAFKQVMEGRDIKLVINQTAQDCFGCLESISQIRTATRDKKDTVTREKHPKKPFQKWMKDRAIKKGNYLRFQRLFYLDRGKLAKIILDDIECLSCDIPLSEIYSVFKTRWETTGSFKSLGDFKTYGKADNTAFRELITAKEIEKNVQEMSKGSAPGPDGITLGDVVKMDPEFSRTMEIFNLWLTTGKIPDMVRGCRTVLIPKSSKPDRLKDINNWRPITIGSILLRLFSRIVTARLSKACPLNPRQRGFIRAAGCSENLKLLQTIIWSAKREHRPLGVVFVDIAKAFDTVSHQHIIHALQQREVDPHIVGLVSNMYENISTYITTKRNTHTDKIQIRVGVKQGDPMSPLLFNLAMDPLLCKLEESGKGYHRGQSSITAMAYADDLVLLSDSWENMNTNISILETFCNLTGLKTQGQKCHGFYIKPTKDSYTINDCAAWTINGTPLNMIDPGESEKYLGLQFDPWIGIARSGLSTKLDFWLQRIDQAPLKPLQKTDILKTYTIPRLIYIADHSEVKTALLETLDQKIRTAVKEWLHLPPCTCDAILYSSTRDGGLGITKLAGLIPSVQARRLHRIAQSSDDTMKCFMEKEKMEQLHKKLWIQAGGDRENIPSIWEAPPSSEPPNNVSTNSEWEAPTQKDKFPKPCNWRKNEFKKWTKLASQGRGIVNFERDKISNHWIQYYRRIPHRKLLTALQLRANVYPTREFLARGRQDQYIKACRHCDADIESCAHIIGNCPVTQDARIKRHNYICELLLEEAKKKDWVVFKEPHIRDSNKELYKPDLIFVKDARALVVDVTVRYEAAKSSLEEAAAEKVRKYKHLETEVRHLTNAKDVTFVGFPLGARGKWHQDNFKLLTELGLSKSRQVKMAETFSTVALFSSVDIVHMFASRARKSMVM

SEQ ID NO: 280 - protein, 1383 aa, synthetic construct
MASCPKPGPPVSAGAMSLESGLTTHSVLAIERGPNSLANSGSDFGGGGLGLPLRLLRVSVGTQTSRSDWVDLVSWSHPGPTSKSQQVDLVSLFPKHRVDLLSKNDQVDLVAQFLPSKFPPNLAENDLALLVNLEFYRSDLHVYECVHFAAHWEGLSGLPEVYEQLAPQPCVGETLHSSLPRDSELFVPEEGSSEKESEDAPKTSPPTPGKHGLEQTGEEKVMVTVPDKNPPCPCCGTRVNSVLNLIEHLKVSHGKRGVCFRCAKCGKENSNYHSVVCHFPKCRGPETEKAPAGEWICEVCNRDFTTKIGLGQHKRLAHPAVRNQERIVASQPKETSNRGAHKRCWTKEEEELLIRLEAQFEGNKNINKLIAEHITTKTAKQISDKRRLLSRKPAEEPREEPGTCHHTRRAAASLRTEPEMSHHAQAEDRDNGPGRRPLPGRAAAGGRTMDEIRRHPDKGNGQQRPTKQKSEEQLQAYYKKTLEERLSAGALNTFPRAFKQVMEGRDIKLVINQTAQDCFGCLESISQIRTATRDKKDTVTREKHPKKPFQKWMKDRAIKKGNYLRFQRLFYLDRGKLAKIILDDIECLSCDIPLSEIYSVFKTRWETTGSFKSLGDFKTYGKADNTAFRELITAKEIEKNVQEMSKGSAPGPDGITLGDVVKMDPEFSRTMEIFNLWLTTGKIPDMVRGCRTVLIPKSSKPDRLKDINNWRPITIGSILLRLFSRIVTARLSKACPLNPRQRGFIRAAGCSENLKLLQTIIWSAKREHRPLGVVFVDIAKAFDTVSHQHIIHALQQREVDPHIVGLVSNMYENISTYITTKRNTHTDKIQIRVGVKQGDPMSPLLFNLALEESGKGYHRGQSSITAMAFADDLVLLSDSWENMNTNISILETFCNLTGLKTQGQKCHGFYIKPTKDSYTINDCAAWTINGTPLNMIDPGESEKYLGLQFDPWIGIARSGLSTKLDFWLQRIDQAPLKPLQKTDILKTYTIPRLIYIADHSEVKTALLETLDQKIRTAVKEWLHLPPCTCDAILYSSTRDGGLGITKLAGLIPSVQARRLHRIAQSSDDTMKCFMEKEKMEQLHKKLWIQAGGDRENIPSIWEAPPSSEPPNNVSTNSEWEAPTQKDKFPKPCNWRKNEFKKWTKLASQGRGIVNFERDKISNHWIQYYRRIPHRKLLTALQLRANVYPTREFLARGRQDQYIKACRHCDADIESCAHIIGNCPVTQDARIKRHNYICELLLEEAKKKDWVVFKEPHIRDSNKELYKPDLIFVKDARALVVDVTVRYEAAKSSLEEAAAEKVRKYKHLETEVRHLTNAKDVTFVGFPLGARGKWHQDNFKLLTELGLSKSRQVKMAETFSTVALFSSVDIVHMFASRARKSMVM

SEQ ID NO: 281 - protein, 1398 aa, synthetic construct
MASCPKPGPPVSAGAMSLESGLTTHSVLAIERGPNSLANSGSDFGGGGLGLPLRLLRVSVGTQTSRSDWVDLVSWSHPGPTSKSQQVDLVSLFPKHRVDLLSKNDQVDLVAQFLPSKFPPNLAENDLALLVNLEFYRSDLHVYECVHFAAHWEGLSGLPEVYEQLAPQPCVGETLHSSLPRDSELFVPEEGSSEKESEDAPKTSPPTPGKHGLEQTGEEKVMVTVPDKNPPCPCCGTRVNSVLNLIEHLKVSHGKRGVCFRCAKCGKENSNYHSVVCHFPKCRGPETEKAPAGEWICEVCNRDFTTKIGLGQHKRLAHPAVRNQERIVASQPKETSNRGAHKRCWTKEEEELLIRLEAQFEGNKNINKLIAEHITTKTAKQISDKRRLLSRKPAEEPREEPGTCHHTRRAAASLRTEPEMSHHAQAEDRDNGPGRRPLPGRAAAGGRTMDEIRRHPDKGNGQQRPTKQKSEEQLQAYYKKTLEERLSAGALNTFPRAFKQVMEGRDIKLVINQTAQDCFGCLESISQIRTATRDKKDTVTREKHPKKPFQKWMKDRAIKKGNYLRFQRLFYLDRGKLAKIILDDIECLSCDIPLSEIYSVFKTRWETTGSFKSLGDFKTYGKADNTAFRELITAKEIEKNVQEMSKGSAPGPDGITLGDVVKMDPEFSRTMEIFNLWLTTGKIPDMVRGCRTVLIPKSSKPDRLKDINNWRPITIGSILLRLFSRIVTARLSKACPLNPRQRGFIRAAGCSENLKLLQTIIWSAKREHRPLGVVFVDIAKAFDTVSHQHIIHALQQREVDPHIVGLVSNMYENISTYITTKRNTHTDKIQIRVGVKQGDPMSPLLFNLAMDPLLCKLEESGKGYHRGQSSITAMAFADDLVLLSDSWENMNTNISILETFCNLTGLKTQGQKCHGFYIKPTKDSYTINDCAAWTWLTEARKEINGTPLNMIDPGESEKYLGLQFDPWIGIARSGLSTKLDFWLQRIDQAPLKPLQKTDILKTYTIPRLIYIADHSEVKTALLETLDQKIRTAVKEWLHLPPCTCDAILYSSTRDGGLGITKLAGLIPSVQARRLHRIAQSSDDTMKCFMEKEKMEQLHKKLWIQAGGDRENIPSIWEAPPSSEPPNNVSTNSEWEAPTQKDKFPKPCNWRKNEFKKWTKLASQGRGIVNFERDKISNHWIQYYRRIPHRKLLTALQLRANVYPTREFLARGRQDQYIKACRHCDADIESCAHIIGNCPVTQDARIKRHNYICELLLEEAKKKDWVVFKEPHIRDSNKELYKPDLIFVKDARALVVDVTVRYEAAKSSLEEAAAEKVRKYKHLETEVRHLTNAKDVTFVGFPLGARGKWHQDNFKLLTELGLSKSRQVKMAETFSTVALFSSVDIVHMFASRARKSMVM

SEQ ID NO: 282 - protein, 1389 aa, synthetic construct
MASCPKPGPPVSAGAMSLESGLTTHSVLAIERGPNSLANSGSDFGGGGLGLPLRLLRVSVGTQTSRSDWVDLVSWSHPGPTSKSQQVDLVSLFPKHRVDLLSKNDQVDLVAQFLPSKFPPNLAENDLALLVNLEFYRSDLHVYECVHFAAHWEGLSGLPEVYEQLAPQPCVGETLHSSLPRDSELFVPEEGSSEKESEDAPKTSPPTPGKHGLEQTGEEKVMVTVPDKNPPCPCCGTRVNSVLNLIEHLKVSHGKRGVCFRCAKCGKENSNYHSVVCHFPKCRGPETEKAPAGEWICEVCNRDFTTKIGLGQHKRLAHPAVRNQERIVASQPKETSNRGAHKRCWTKEEEELLIRLEAQFEGNKNINKLIAEHITTKTAKQISDKRRLLSRKPAEEPREEPGTCHHTRRAAASLRTEPEMSHHAQAEDRDNGPGRRPLPGRAAAGGRTMDEIRRHPDKGNGQQRPTKQKSEEQLQAYYKKTLEERLSAGALNTFPRAFKQVMEGRDIKLVINQTAQDCFGCLESISQIRTATRDKKDTVTREKHPKKPFQKWMKDRAIKKGNYLRFQRLFYLDRGKLAKIILDDIECLSCDIPLSEIYSVFKTRWETTGSFKSLGDFKTYGKADNTAFRELITAKEIEKNVQEMSKGSAPGPDGITLGDVVKMDPEFSRTMEIFNLWLTTGKIPDMVRGCRTVLIPKSSKPDRLKDINNWRPITIGSILLRLFSRIVTARLSKACPLNPRQRGFIRAAGCSENLKLLQTIIWSAKREHRPLGVVFVDIAKAFDTVSHQHIIHALQQREVDPHIVGLVSNMYENISTYITTKRNTHTDKIQIRVGVKQGFKNSPALFNEALRRDLADFRIQHPDLILLQYVDDLLLAATSELDCQQGTRALLQTLGNLGYRASAKKAQICQKQVKYLGYLLKEGQRWLTEARKETVMGQPTPKTPRQLRKFLGLQFDPWIGIARSGLSTKLDFWLQRIDQAPLKPLQKTDILKTYTIPRLIYIADHSEVKTALLETLDQKIRTAVKEWLHLPPCTCDAILYSSTRDGGLGITKLAGLIPSVQARRLHRIAQSSDDTMKCFMEKEKMEQLHKKLWIQAGGDRENIPSIWEAPPSSEPPNNVSTNSEWEAPTQKDKFPKPCNWRKNEFKKWTKLASQGRGIVNFERDKISNHWIQYYRRIPHRKLLTALQLRANVYPTREFLARGRQDQYIKACRHCDADIESCAHIIGNCPVTQDARIKRHNYICELLLEEAKKKDWVVFKEPHIRDSNKELYKPDLIFVKDARALVVDVTVRYEAAKSSLEEAAAEKVRKYKHLETEVRHLTNAKDVTFVGFPLGARGKWHQDNFKLLTELGLSKSRQVKMAETFSTVALFSSVDIVHMFASRARKSMVM

SEQ ID NO: 283 - protein, 1822 aa, synthetic construct
MASCPKPGPPVSAGAMSLESGLTTHSVLAIERGPNSLANSGSDFGGGGLGLPLRLLRVSVGTQTSRSDWVDLVSWSHPGPTSKSQQVDLVSLFPKHRVDLLSKNDQVDLVAQFLPSKFPPNLAENDLALLVNLEFYRSDLHVYECVHFAAHWEGLSGLPEVYEQLAPQPCVGETLHSSLPRDSELFVPEEGSSEKESEDAPKTSPPTPGKHGLEQTGEEKVMVTVPDKNPPCPCCGTRVNSVLNLIEHLKVSHGKRGVCFRCAKCGKENSNYHSVVCHFPKCRGPETEKAPAGEWICEVCNRDFTTKIGLGQHKRLAHPAVRNQERIVASQPKETSNRGAHKRCWTKEEEELLIRLEAQFEGNKNINKLIAEHITTKTAKQISDKRRLLSRKPAEEPREEPGTCHHTRRAAASLRTEPEMSHHAQAEDRDNGPGRRPLPGRAAAGGRTMDEIRRHPDKGNGQQRPTKQKSEEQLQAYYKKTLEERLSAGALNTFPRAFKQVMEGRDIKLVINQTAQDCFGCLESISQIRTATRDKKDTVTREKHPKKPFQKWMKDRAIKKGNYLRFQRLFYLDRGKLAKIILDDIECLSCDIPLSEIYSVFKTRWETTGSFKSLGDFKTYGKADNTAFRELITAKEIEKNVQEMSKGSAPGPDGITLGDVVKMDPEFSRTMEIFNLWLTTGKIPDMVRGCRTVLITLNIEDEYRLHETSKEPDVSLGSTWLSDFPQAWAETGGMGLAVRQAPLIILLKATSTPVSIKQYPMRQKARLGIKPHIQRLLDQGILVPCQSPWNTPLLPVKKPGTNDYRPVQDLREVNKRVEDIHPTVPNPYNLLSGLPPSHQWYTVLDLKDAFFCLRLHPTSQPLFAFEWRDPEMGISGQLTWTRLPQGFKNSPALFNEALRRDLADFRIQHPDLILLQYVDDLLLAATSELDCQQGTRALLQTLGNLGYRASAKKAQICQKQVKYLGYLLKEGQRWLTEARKETVMGQPTPKTPRQLRKFLGKAGNCRLFIPGFAEMAAPLYPLTKPGTLFNWGPDQQKAYQEIKQALLTAPALGLPDLTKPFELFVDEKQGYAKGVLTQKLGPWRRPVAYLSKKLDPVAAGWPPCLRMVAAIAVLTKDAGKLTMGQPLVIGAPHAVEALVKQPPDRWLSKARMTHYQALLLDTDRVQFGPVVALNPATLLPLPEEGLQHNCLDILAEAHGTRPDLTDQPLPDADHTWYTGGSSLLQEGQRKAGAAVTTETEVIWAKALPAGTSAQRAELIALTQALKMAEGKKLNVYTNSRYAFATAHIQGEIYRRRGWLTSEGKEIKNKDEILALLKALFLPKRLSIIHCPGHQKGHSAEARGNRMANQAARKAAITETPDTSTLPIENSSPSGGSKRTADGSEFEQFDPWIGIARSGLSTKLDFWLQRIDQAPLKPLQKTDILKTYTIPRLIYIADHSEVKTALLETLDQKIRTAVKEWLHLPPCTCDAILYSSTRDGGLGITKLAGLIPSVQARRLHRIAQSSDDTMKCFMEKEKMEQLHKKLWIQAGGDRENIPSIWEAPPSSEPPNNVSTNSEWEAPTQKDKFPKPCNWRKNEFKKWTKLASQGRGIVNFERDKISNHWIQYYRRIPHRKLLTALQLRANVYPTREFLARGRQDQYIKACRHCDADIESCAHIIGNCPVTQDARIKRHNYICELLLEEAKKKDWVVFKEPHIRDSNKELYKPDLIFVKDARALVVDVTVRYEAAKSSLEEAAAEKVRKYKHLETEVRHLTNAKDVTFVGFPLGARGKWHQDNFKLLTELGLSKSRQVKMAETFSTVALFSSVDIVHMFASRARKSMVM

SEQ ID NO: 284 - protein, 1390 aa, synthetic construct
MASCPKPGPPVSAGAMSLESGLTTHSVLAIERGPNSLANSGSDFGGGGLGLPLRLLRVSVGTQTSRSDWVDLVSWSHPGPTSKSQQVDLVSLFPKHRVDLLSKNDQVDLVAQFLPSKFPPNLAENDLALLVNLEFYRSDLHVYECVHFAAHWEGLSGLPEVYEQLAPQPCVGETLHSSLPRDSELFVPEEGSSEKESEDAPKTSPPTPGKHGLEQTGEEKVMVTVPDKNPPCPCCGTRVNSVLNLIEHLKVSHGKRGVCFRCAKCGKENSNYHSVVCHFPKCRGPETEKAPAGEWICEVCNRDFTTKIGLGQHKRLAHPAVRNQERIVASQPKETSNRGAHKRCWTKEEEELLIRLEAQFEGNKNINKLIAEHITTKTAKQISDKRRLLSRKPAEEPREEPGTCHHTRRAAASLRTEPEMSHHAQAEDRDNGPGRRPLPGRAAAGGRTMDEIRRHPDKGNGQQRPTKQKSEEQLQAYYKKTLEERLSAGALNTFPRAFKQVMEGRDIKLVINQTAQDCFGCLESISQIRTATRDKKDTVTREKHPKKPFQKWMKDRAIKKGNYLRFQRLFYLDRGKLAKIILDDIECLSCDIPLSEIYSVFKTRWETTGSFKSLGDFKTYGKADNTAFRELITAKEIEKNVQEMSKGSAPGPDGITLGDVVKMDPEFSRTMEIFNLWLTTGKIPDMVRGCRTVLIPKSSKPDRLKDINNWRPITIGSILLRLFSRIVTARLSKACPLNPRQRGFIRAAGCSENLKLLQTIIWSAKREHRPLGVVFVDIAKAFDTVSHQHIIHALQQREVDPHIVGLVSNMYENISTYITTKRNTHTDKIQIRVGVKQGDPMSPALFNLAMRPLLCKLEESGKGYHRGQSSITAMAFADDLVLLSDSWENMNTNISILETFCNLTGLKTQGQKCHGFYIKPTKDSYTINDCAAWTINGTPLNMIDPGESEKYLGLQFDPWIGIARSGLSTKLDFWLQRIDQAPLKPLQKTDILKTYTIPRLIYIADHSEVKTALLETLDQKIRTAVKEWLHLPPCTCDAILYSSTRDGGLGITKLAGLIPSVQARRLHRIAQSSDDTMKCFMEKEKMEQLHKKLWIQAGGDRENIPSIWEAPPSSEPPNNVSTNSEWEAGTQKDKFPKPCNWRKNEFKKWTKLASQGRGIVNFERDKISNHWIQYYRRINHRKLLTALQLQANVYPTREFLARGRQDQYIKACRHCDADIESCAHIIGNCPVTQDARIKRHNYICELLLEEAKKKDWVVFKEPHIRDSNKELYKPDLIFVKDARALVVDVTVRYEAAKSSLEEAAAEKVRNYKHLETEVRHLTNAKDVTFVGFPLGARGKWHQDNFKLLTELGLSKSRQVKMAETFSTVALFSSVDIVHMFASRARKSMVM

SEQ ID NO: 285 - protein, 1399 aa, synthetic construct
MASCPKPGPPVSAGAMSLESGLTTHSVLAIERGPNSLANSGSDFGGGGLGLPLRLLRVSVGTQTSRSDWVDLVSWSHPGPTSKSQQVDLVSLFPKHRVDLLSKNDQVDLVAQFLPSKFPPNLAENDLALLVNLEFYRSDLHVYECVHFAAHWEGLSGLPEVYEQLAPQPCVGETLHSSLPRDSELFVPEEGSSEKESEDAPKTSPPTPGKHGLEQTGEEKVMVTVPDKNPPCPCCGTRVNSVLNLIEHLKVSHGKRGVCFRCAKCGKENSNYHSVVCHFPKCRGPETEKAPAGEWICEVCNRDFTTKIGLGQHKRLAHPAVRNQERIVASQPKETSNRGAHKRCWTKEEEELLIRLEAQFEGNKNINKLIAEHITTKTAKQISDKRRLLSRKPAEEPREEPGTCHHTRRAAASLRTEPEMSHHAQAEDRDNGPGRRPLPGRAAAGGRTMDEIRRHPDKGNGQQRPTKQKSEEQLQAYYKKTLEERLSAGALNTFPRAFKQVMEGRDIKLVINQTAQDCFGCLESISQIRTATRDKKDTVTREKHPKKPFQKWMKDRAIKKGNYLRFQRLFYLDRGKLAKIILDDIECLSCDIPLSEIYSVFKTRWETTGSFKSLGDFKTYGKADNTAFRELITAKEIEKNVQEMSKGSAPGPDGITLGDVVKMDPEFSRTMEIFNLWLTTGKIPDMVRGCRTVLIPKSSKPDRLKDINNWRPITIGSILLRLFSRIVTARLSKACPLNPRQRGFIRAAGCSENLKLLQTIIWSAKREHRPLGVVFVDIAKAFDTVSHQHIIHALQQREVDPHIVGLVSNMYENISTYITTKRNTHTDKIQIRVGVKQGDPMSPLLFNLAMDPLLCKLEESGKGYHRGQSSITAMAFADDLVLLSDSWENMNTNISILETFCNLTGLKTQGQKCHGFYIKPTKDSYTINDCAAWTINGTPLNMIDPGESEKYLGLRKKRRQRRRQFDPWIGIARSGLSTKLDFWLQRIDQAPLKPLQKTDILKTYTIPRLIYIADHSEVKTALLETLDQKIRTAVKEWLHLPPCTCDAILYSSTRDGGLGITKLAGLIPSVQARRLHRIAQSSDDTMKCFMEKEKMEQLHKKLWIQAGGDRENIPSIWEAPPSSEPPNNVSTNSEWEAPTQKDKFPKPCNWRKNEFKKWTKLASQGRGIVNFERDKISNHWIQYYRRIPHRKLLTALQLRANVYPTREFLARGRQDQYIKACRHCDADIESCAHIIGNCPVTQDARIKRHNYICELLLEEAKKKDWVVFKEPHIRDSNKELYKPDLIFVKDARALVVDVTVRYEAAKSSLEEAAAEKVRKYKHLETEVRHLTNAKDVTFVGFPLGARGKWHQDNFKLLTELGLSKSRQVKMAETFSTVALFSSVDIVHMFASRARKSMVM

SEQ ID NO: 286 - protein, 1399 aa, synthetic construct
MASCPKPGPPVSAGAMSLESGLTTHSVLAIERGPNSLANSGSDFGGGGLGLPLRLLRVSVGTQTSRSDWVDLVSWSHPGPTSKSQQVDLVSLFPKHRVDLLSKNDQVDLVAQFLPSKFPPNLAENDLALLVNLEFYRSDLHVYECVHFAAHWEGLSGLPEVYEQLAPQPCVGETLHSSLPRDSELFVPEEGSSEKESEDAPKTSPPTPGKHGLEQTGEEKVMVTVPDKNPPCPCCGTRVNSVLNLIEHLKVSHGKRGVCFRCAKCGKENSNYHSVVCHFPKCRGPETEKAPAGEWICEVCNRDFTTKIGLGQHKRLAHPAVRNQERIVASQPKETSNRGAHKRCWTKEEEELLIRLEAQFEGNKNINKLIAEHITTKTAKQISDKRRLLSRKPAEEPREEPGTCHHTRRAAASLRTEPEMSHHAQAEDRDNGPGRRPLPGRAAAGGRTMDEIRRHPDKGNGQQRPTKQKSEEQLQAYYKKTLEERLSAGALNTFPRAFKQVMEGRDIKLVINQTAQDCFGCLESISQIRTATRDKKDTVTREKHPKKPFQKWMKDRAIKKGNYLRFQRLFYLDRGKLAKIILDDIECLSCDIPLSEIYSVFKTRWETTGSFKSLGDFKTYGKADNTAFRELITAKEIEKNVQEMSKGSAPGPDGITLGDVVKMDPEFSRTMEIFNLWLTTGKIPDMVRGCRTVLIPKSSKPDRLKDINNWRPITIGSILLRLFSRIVTARLSKACPLNPRQRGFIRAAGCSENLKLLQTIIWSAKREHRPLGVVFVDIAKAFDTVSHQHIIHALQQREVDPHIVGLVSNMYENISTYITTKRNTHTDKIQIRVGVKQGDPMSPLLFNLAMDPLLCKLEESGKGYHRGQSSITAMAFADDLVLLSDSWENMNTNISILETFCNLTGLKTQGQKCHGFYIKPTKDSYTINDCAAWTINGTPLNMIDPGESEKYLGLQFDPWIGIARSGLSTKLDFWLQRIDQAPLKPLQKTDILKTYTIPRLIYIADHSEVKTALLETLDQKIRTAVKEWLHLPPCTCDAILYSSTRDGGLGITKLAGLIPSVQARRLHRIAQSSDDTMKCFMEKEKMEQLHKKLWIQAGGDRENIPSIWEAPPSSEPPNNVSTNSEWEAPTQKDKFPKPCNWRKNEFKKWTKLASQGRGIVNFERDKISNHWIQYYRRIPHRKLLTALQLRANVYPTREFLARGRQDQYIKACRHCDADIESCAHIIGNCPVTQDARIKRHNYICELLLEEAKKKDWVVFKEPHIRDSNKELYKPDLIFVKDARALVVDVTVRYEAAKSSLEEAAAEKVRKYKHLETEVRHLTNAKDVTFVGFPLGARGKWHQDNFKLLTELGLSKSRQVKMAETFSTVALFSSVDIVHMFASRARKSMVMRKKRRQRRR

SEQ ID NO: 287-289 - skipped (3 entries)

SEQ ID NO: 290 - protein, 305 aa, synthetic construct
FRELITAKEIEKNVQEMSKGSAPGPDGITLGDVVKMDPEFSRTMEIFNLWLTTGKIPDMVRGCRTVLIQCLAHKQIPRAWRKTKIIAILKPGKDASNARNYRPISLLCHLYKVYERMLLNRLGPVIEPKLIAQQAGFRPGKNCTGQILHLTEHIEEGYEKGCITGTVFVDLTAAYDTVQHRKMLHKVYHITRDFDFTKTVQTLLENRSFYVEFQGQKSRWRRQKNGLPQGSVLAPTLFNIFTNDQPQPPLTKSFIYADDLGLTTQAKDFETVEKQLTNALKDLSSYYKENHLKPNPAKTQVCAFH

SEQ ID NO: 291 - protein, 677 aa, synthetic construct
TLNIEDEYRLHETSKEPDVSLGSTWLSDFPQAWAETGGMGLAVRQAPLIIPLKATSTPVSIKQYPMSQEARLGIKPHIQRLLDQGILVPCQSPWNTPLLPVKKPGTNDYRPVQDLREVNKRVEDIHPTVPNPYNLLSGLPPSHQWYTVLDLKDAFFCLRLHPTSQPLFAFEWRDPEMGISGQLTWTRLPQGFKNSPTLFNEALHRDLADFRIQHPDLILLQYVDDLLLAATSELDCQQGTRALLQTLGNLGYRASAKKAQICQKQVKYLGYLLKEGQRWLTEARKETVMGQPTPKTPRQLREFLGKAGFCRLFIPGFAEMAAPLYPLTKPGTLFNWGPDQQKAYQEIKQALLTAPALGLPDLTKPFELFVDEKQGYAKGVLTQKLGPWRRPVAYLSKKLDPVAAGWPPCLRMVAAIAVLTKDAGKLTMGQPLVILAPHAVEALVKQPPDRWLSNARMTHYQALLLDTDRVQFGPVVALNPATLLPLPEEGLQHNCLDILAEAHGTRPDLTDQPLPDADHTWYTDGSSLLQEGQRKAGAAVTTETEVIWAKALPAGTSAQRAELIALTQALKMAEGKKLNVYTDSRYAFATAHIHGEIYRRRGWLTSEGKEIKNKDEILALLKALFLPKRLSIIHCPGHQKGHSAEARGNRMADQAARKAAITETPDTSTLLIENSSP

SEQ ID NO: 292 - protein, 250 aa, synthetic construct
PKVPNPTSPDQLRPISVSSILVRCFHKVLADRWSRRLQLPSLQFAFLHRDGCLEATSLLHALLRHSSATASNLSLAFVDISKAFDSVSHDTIVRSAEAFGAPSPLVRYIAQSYENAVAVFPSSEVHCHRGVRQGDPLSPLLFIMAMDEVLGLSMPQLGYQFHDTLVDGFAFADDWVVCAESQARLKEKLEAAAVELGRAGMKINARKTKAMVICGDRKHRATAVSVEPFCFAEELITPLGPTDTVTYLGI

SEQ ID NO: 293 - protein, 255 aa, synthetic construct
PLLKKPSLDPTNWNNYRPISNLPFLGKVLERVVASQLQGFLDDTDFLDPSQSGFRPGHSTETALVALVDDLRRELDRGSVTLLVLLDISAAFDTIDHGILLGRLLGMGLGGTVLQWLQSFLEGRSQMVKLGDTCSDPWPLTCGVPQGSILSPMLFNIYMKPLGEVIRSFGVRCHLYADDTQLYYSFPPASKEAPQILNQCLAAVSDWMRANKLKLNPDKTEVLLVSRKSDRGIGWQPVLDGVALPLKAQVRSLGV

SEQ ID NO: 294 - protein, 280 aa, synthetic construct
FKKGRREDPGNYRPISLTSIPGKILEKFIKESICDKLAEGKILNDSQHGFIAGRSCLTNLISFYDQVTHHLDKREEVDIVYLDFQKAFDLVSHDVLMRKLEDCGLNCETVRWVGNWLQGRTQRVLVNGSVSSWREVASGVPQGSVLGPVLFNIFINDLDVGVKSSLAKFADDTKLWGSVVTLEDRLQIQADLDRLASWADQNQMKFNVEKCKVLHLGTNNPQHTYRLGGTKLTSTMNERDLGVIIDHSMNMSHQCDAVASRANNTLACINRCISSKTKEV

SEQ ID NO: 295 - protein, 259 aa, synthetic construct
PKSTQPDRLKDINNWRPITIGSILLRLFSRIITARMTKACPLNPRQRGFIRAAGCSENLKLLQTIIRSAKSEHRPLGVVFVDIAKAFDTVSHQHILHVLQQRGVDPHIIGLVSNMYKDISTFVTTKKDTHTDKIQIRVGVKQGDPLSPLLFNLAMDPLLCKLEESGNGFHRGGHTITAMAFADDLVLLSDSWENMEKNIEILEAFCDLTGLKTQGQKCHGFYIKPTKDSYTVNNCAAWTIYGTPLNMINPGDSEKYLGL

SEQ ID NO: 296 - protein, 406 aa, synthetic construct
DPIPSHLLQAISPAVIPTLTHIINTSLDSGLFPTTFKQARVTPLLKKPNLDHTLLENYRPVSLLPFMAKILEKVVFNQVLDFLTQNNLMDNKQSGFKKGHSTETALLSVVEDLRLAKADSKSSVLILLDLSAAFDTVNHQILLSTLESLGVAGTVIQWFRSYLSDRSFRVSWRGEVSKLQHLNTGVPQGSVLGPLLFSIYTSSLGPVIQRHGFSYHCYADDTQLYLSFHPDDPSVPARISACLLDISHWMKDHHLQLNLAKTEMLVVSANPTLHHNFSIQMDGATITASKMVKSLGVTIDDQLNFSDHISRTARSCRFALYNIRKIRPFLSEHAAQLLVQALVLSKLDYCNSLLAGLPANSIKPLQLLQNAAARVVFNEPKRAHVTPLLVRLHWLPVAARIKFKTL

SEQ ID NO: 297 - protein, 410 aa, synthetic construct
DTSNLMEQILSSDNLNRAYLQVVRNKGAEGVDGMKYTELKEHLAKNGETIKGQLRTAAYKPQPARRVEIPKPDGGVRNLGVPTVTDRFIQQAIAQVLTPIYEEQFHDHSYGFRPNRCAQQAILTALNIMNDGNDWIVDIDLEKFFDTVNHDKLMTLIGRTIADGDVISIVRKYLVSGIMIDDEYEDSIVGTPQGGNLSPLLANIMLNELDKEMEAAGLNFVRYADDCIIMVGSEMSANRVMRNISRFIEEKLGLKVNMTKSKVDRPSGLKYLGFGFYFDPRAHQFKAKPHAKSVAKFKKRMKELTCRSWGVSNSYKVEKLNQLIRGWINYFKIGSMKTLCKELDSRIRYRLRMCIWKQWKTPQNQEKNLVKLGIDRNTARRVAYTGKRIAYVCNKGAVNVAISNKRLASF

SEQ ID NO: 298 - protein, 423 aa, synthetic construct
ALLERILARDNLITALKRVEANQGAPGIDGVSTDQLRDYIRAHWSTIHAQLLAGTYRPAPVRRVEIPKPGGGTRQLGIPTVVDRLIQQAILQELTPIFDPDFSSSSFGFRPGRNAHDAVRQAQGYIQEGYRYVVDMDLEKFFDRVNHDILMSRVARKVKDKRVLKLIRAYLQAGVMIEGVKVQTEEGTPQGGPLSPLLANILLDDLDKELEKRGLKFCRYADDCNIYVKSLRAGQRVKQSIQRFLEKTLKLKVNEEKSAVDRPWKRAFLGFSFTPERKARIRLAPRSIQRLKQRIRQLTNPNWSISMPERIHRVNQYVMGWIGYFRLVETPSVLQTIEGWIRRRLRLCQWLQWKRVRTRIRELRALGLKETAVMEIANTRKGAWRTTKTPQLHQALGKTYWTAQGLKSLTQRYFELRQGSEFE

SEQ ID NO: 299 - protein, 8 aa, synthetic construct
WLTEARKE

SEQ ID NO: 300 - protein, 691 aa, synthetic construct
TLNIEDEYRLHETSKEPDVSLGSTWLSDFPQAWAETGGMGLAVRQAPLIILLKATSTPVSIKQYPMRQKARLGIKPHIQRLLDQGILVPCQSPWNTPLLPVKKPGTNDYRPVQDLREVNKRVEDIHPTVPNPYNLLSGLPPSHQWYTVLDLKDAFFCLRLHPTSQPLFAFEWRDPEMGISGQLTWTRLPQGFKNSPALFNEALRRDLADFRIQHPDLILLQYVDDLLLAATSELDCQQGTRALLQTLGNLGYRASAKKAQICQKQVKYLGYLLKEGQRWLTEARKETVMGQPTPKTPRQLRKFLGKAGNCRLFIPGFAEMAAPLYPLTKPGTLFNWGPDQQKAYQEIKQALLTAPALGLPDLTKPFELFVDEKQGYAKGVLTQKLGPWRRPVAYLSKKLDPVAAGWPPCLRMVAAIAVLTKDAGKLTMGQPLVIGAPHAVEALVKQPPDRWLSKARMTHYQALLLDTDRVQFGPVVALNPATLLPLPEEGLQHNCLDILAEAHGTRPDLTDQPLPDADHTWYTGGSSLLQEGQRKAGAAVTTETEVIWAKALPAGTSAQRAELIALTQALKMAEGKKLNVYTNSRYAFATAHIQGEIYRRRGWLTSEGKEIKNKDEILALLKALFLPKRLSIIHCPGHQKGHSAEARGNRMANQAARKAAITETPDTSTLPIENSSPSGGSKRTADGSEFE

SEQ ID NO: 301 - protein, 9 aa, synthetic construct
RKKRRQRRR

SEQ ID NO: 302-400 - skipped (99 entries)

SEQ ID NO: 401 - protein, 1438 aa, Agelaius tricolor
MAYCLKPGPPVSDRGMEFGNGLTTHSVLTVECGPNSMVIPDPSFGGGVWGPPVRLSRVSVGTQTSPSDWVDLLSRGLPGARSNSQRVDLVSLFPRHRVDLLSKTQRVDLLSESQRVDLLSKRQRVDLLSDSQRVDLLSKTHRVDLLSKTDRVDLVSQIDLTSKTTNLAENELDLLVNFSLEFYRSDLHVHEGVHFSVDWEVLNGLPEVYEQLAPQPCVGENLDSSPPQDSEPLVLGEGSGEKEGEGAPEALPPVPGENGEQSPDEIVKVTVPDKNPPCPCCGTRVNSVVSLLEHLKGSHGKKRVCFRCAKCGKENVNYHSVICHFPKCKGAEIEKVPAGEWICEVCGRDFTTKIGLGQHKRLAHPLIRNQERIVASQPKETSNRGAHKRCWTKEEEELLIKLEAQFEGNKNINKLIAEHITTKTAKQISDKRRLLPKKLPEVTDKEPGVCLRTRRAAASVRTEPGMSHQSQAGILDNGPGKCHLPGRPAAGEKTMEKLRRHPDKDNGRQKTSGQRREGQLQAHYQKTIKEGLSAGAINNFPGAFKQLMDGREMRTMINQTAQDCFGCLESISQIRTAMRDKNSGKKATEEHPKRPFQKWMKDRAIKKGNFLRFQRLFHLDRGKLAKIILDDIECLSCDIPPSEIYSVFKARWETPGNFAGLGDFKITGKADNNAFKDLITAKEIERNVQEMSKGSAPGPDGITLGDIVKMDPGYSRTAELFNLWLTSGKIPDMVRGCRSVLIPKSTKPERLKDINNWRPITIGSILLRLFSRIVTARLSKACPLNPRQRGFIRAAGCSENLKLLQTIIRTAKKEHKPLGVVFVDIAKAFDTVSHQHILHALQQRGVDPHIIGLVNNMYKDISTYVTTKRDTHTDKIQIRVGVKQGDPLSPLLFNLAMDPLLCKLEESGKGFHRGESSITAMAFADDLVLLSDSWENMQTNIKILETFCDLTGLKTQGEKCHGFYIKPTKDSYTINDCAAWTINGTPLNMINPGESEKYLGLQIDPWTGLAKTNLTTKLEFWLERIDQAPLKPLQKLDILKTYTIPRLTYLADHSEIKAGALEALDQKIRTAVKDWLHLPPCTCDAILYSSTKDGGLGVTKLAGLIPSVQARRLHRIAQSSDETMKEFLEKDQMEQLYRKLWVQAGGEREEIPSIWEALPTSEPSNRADTTSEWEAPSLKTKFPKPCNWRKKEFKKWTKLVSQGRGISSFENDSISNDWLQYYRRIPHRKLITALQLRANVYPTREFLARGREENSTKACRHCNVENETCAHIIGQCPVTQDARIKRHNHICDMLSEEARKKDWVVFKEPHIRDTTKELYKPDLIFVKDGHAFVVDVTVRYETTKTSLEEAAAEKVNKYKHLETEVRNLTNAKDVVFMGFPLGARGKWYTGNFELLNTLGLSKSRQVRVAKTLSTVALLSSVDIVHMFASRARRVQDSG

SEQ ID NO: 402 - protein, 1417 aa, Chamaetylas choloensis
MEPLGIASSTVSCQKFGETNSSVKSRVASLPETWPPGFKGAMSPVSGLTTHYRSTFQGGPIPMGSGSDLGGGVWFRAPARLSRVSVGSQTSPSDWVDLLSWNFNFLPGSKSNSQRVDLLSRHWVDLLSKNDQVDLVAQNLPSKLSPDSAENELALLVNLEFYRSDLHEHEGVHFSANWEGLSGLPEVYEQLAPQPCAGDSSHSSLPRDTKLFVLEQKGSVEKESEDVPKTSPPTPGKPGEQTPEETVTVTVPDKNPPCPCCGTRLNSVLGLIEHLKGSHGKKRVCFRCVKCGKEGTNYHSIVCHFPKCRGAETEAAPAGEWICEVCGRDFQTKIGLGQHKRHAHPLIRNQERIAASHPKETSNRGAHKRCWTKEEEEMLIKLEAQFEGHKNINKLIAEHITSKTAKQISDKRRLLPRKPDKDLEEEPAVSTRTRRAAAGLRKEPGVSHQSQATIEDNGPGRSHRPGKPAAGKKTMDEISHRPDKGNGRRGTIKQQMAGQLQAHYHRTLGERLSAGAINTFPRAFKQLMEGQEMQETINQSAQDCFGCLESISQIRTATRDKINKGTREKHPKRPFQKWMKDRAIRKGNYLRFQRLFHLDRGKLAKIILDDVETLSCDIPPSEIYSVFKDRWETPGNFNSLGEFQSNGKADNSAFRDLITAKEIEKNVQEMSKGSAPGPDGITLGDVKKMDPEYSRTAEIFNLWLTSGKIPDMVRGCRTVLIPKSTEPERLKDINNWRPITIGSILLRLFSRIVTARLSKACPLNPRQRGFIRAAGCSENLKLLQSVMRSAKKEHRPLGVVFVDIAKAFDTISHQHIIHALQQREVDPHIIGLVSNMYKDISTYITVKKNTHTDEIHFRVGVKQGDPMSPLLFNLAMDPLLCKLEESGKGYHRGRSSITAMAFADDLVLLSDSWENMETNIKILETFCNLTGLKTQGVKCHGYYIKPTKDSYTVNDCAAWTINGTPLNMIDPGETEKYLGLQIDPWTGIAKSNLSTKLEYWLQRIDQAPLKPLQKVDILKTYTIPRMTYLADHSDLKAGFLESLDQKIRTTVKDWLHLPSCTCDAILYSSTKDGGLGITKLAGLIPSVQARRLHRIAQSSDETMKMFLEKDQMEQMHKKLWIQAGGDREKIPSIWDAPPVSEPSNSASTISEWEAPSLKTKFPKPCNWRKNEFKNWTKLVSQGRGIINFEGDKISNHWLQYYRSIPHRKLLTALQLRANVYPTREFLARGRQDKYIKACRHCDADIESCAHIIGNCPVTQDARIKRHNYICEVLLEEAKKKDWVVFQEPHIRDTTKELYKPDLIFVKDARALVVDVTVRYEAAKTSLEDAAAEKVNKYKHLETEVRNLTNAKDVAFMGFPLGARGKWHQKNFELLEALGLSKSRQEKIARTLSTTALLSSVDIVRMFASRARKLGNQE

SEQ ID NO: 403 - protein, 1417 aa, Cichladusa arquata
MEPLGIASSTDSCQKPGETNFSVKSRVASLPETWPPGFIGAMSPVSGLTTHYRSTFHGGPIPMGSGSDLGGGVWFRAPVRLSRVSVGSQTSPSDWVDLLSWNFNFLPGSKSNAQWVDLVSRHGVDLLSKNDQVDLATQNLPSKLSPDLAENELALLANLEFYRSDLHVHEGVHFSANWEGLSGLPEVYEQLAPQPCVGDSSRASLPRDTKLFVPEQRSSEEKESEDAPKTFPPTPEKPGEQTPEETVTVTVPDKNPPCPCCGTRVNSVLGLIEHLKGSHGKKRVCFRCVKCGKEGTNYHSIVCHFPKCRGAETEAAPAGEWICEVCGRDFQTKIGLGQHKRHAHPLIRNQERIAASHPKETSNRGAHKRCWTKEEEEMLIKLEMQFEGHKNINKLIAEHITTKTAKQISDKRRLLPRKPDKDIEEEPAVSTRTRRAAAGLRKEPGVSHQSQAAVENNGPGRSQLPGKPAAGKKTMDEISHRPDKGNGRRGTIKQQMAGQLQAHYHRTLGERLSAGAINTFPRAFKQLMEGQEMQETINQSAQDCFGCLESVSQIRTATRDKINKGTREKRPKRPFQKWMKDRAIKKGNYLRFQRLFHLDRGKLAKIILDDIETLSCDIPPSEIYSVFKDRWETPGNFKSLGDFQINGKADNSAFRDLITAKEIEKNVQEMSKGSAPGPDGITLGDIKKMDPEYSRTAEIFNLWLTSGKIPDMLRGCRTVLIPKSTEPERLKDINNWRPITIGSILLRLFSRIITARLSKACPLNPRQRGFIRAAGCSENLKLLQSVMRSAKKEHRPLGVVFVDIAKAFDTISHQHIIHALQQREVDPHIIGLVSNMYKDISTYITVKKNTHTDRIHFRVGVKQGDPMSPLLFNLAMDPLLCKLEESGKGYHRGRSSITAMAFADDLVLLSDSWENMKTNIKILETFCNLTGLKTQGVKCHGYYIKPTKDSYTVNDCAAWTINGTPLNMIDPGETEKYLGLQIDPWTGIAKSNLSTKLEYWLQRIDQAPLKPLQKVDILKTYTIPRMTYLADHSELKAGFLESLDQKIRTTVKDWLHLPSCTCDAILYSSTKDGGLGITKLAGLIPSVQARRLHRIAQSSDETMKMFLEKDQMEQMHKKLWIQAGGDREKIPSIWDAPPVSEPSNSASTISEWEAPSLKTKFPKPCNWRKNEFKNWTKLVSQGRGIINFEGDKISNHWLQYYRSIPHRKLLTALQLRANVYPTREFLARGRQDKYIKACRHCDADIESCAHIIGNCPVTQDARIKRHNYICEVLLEEAKKKDWVVFQEPHIRDTTKELYKPDLIFVKDARALVVDVTVRYESAKTSLEDAAAEKVNKYKHLETEVRNLTNAKDVVFMGFPLGARGKWHQKNFELLGALGLSKSRQEKIARTLSTTALMSSVDIVHMFASRARKLCNQE

SEQ ID NO: 404 - protein, 1257 aa, Ciconia episcopus
MGRPIRIAFVSVATQTGPIDLRERVITETGKEHDKSNVPEDSWNCTGLEFINSIVEGLEWSHPSNRAERLAKLPEVYETYNSSHAAETEINEKGEPSPRKAMSPPRTPSPDHNTDLPNEGTPVVKVPDKNTSCPCCGNRIGKISQLVEHLKRAHGKKKILFQCAKCGKTEMKHHSIACHFPKCKGSITTDPKCKGSITADPTVGWTCEECGRAFTSKIGLGQHKRLAHPVLRNIERIAAARPKASTARGLHRQCWTEEEVELLRKLEKQYEGSKNINKLIAEHIPSKTAKQISDKRRGLSKSPEEEGEKDQDPEWRKQMTMEQDHLRGVGSDTEGGLISHYKKRIAEWITSEKLPILQGVFEEVLNGNEDTDCLVQEAADEYYPHLFRRSTEPETNQDEKHPGASKARPSGPSKEWMKKRARKRGQFLRFQRLFYLDRGKLAGIILDDVESLQCGIPLEEVHKVFKSRWETPGTFKGLGAFRSAGQADNSAFKAMITAKEIAKNIREMNKNAAPGPDGLSLRDLIKIDPHYTQVMELFNLWLLSGNIPDVARECRTVLISKSAVPERQKDINNWRPITIGSIALRLFSRILTARLTKACPINPRQRGFIKSPGCAENLKLLQLLIRSAKKEHRPLGVVFVDLAKAFDTVSHSHILTVLKQKGVDEHIIKLIKNLYHNINTRIDLKNKQSEPIGMQIGVKQGDPMSPILFNLSVDPLLCKLEEEGSGFQYGSRNITTMAFADDLVLLSESWEGMKKNIEILEVFCELTGLKTQGEKCHGFFIQPTKDSYTINDCPPWTVNGTPLNMIEPGSSEKYLGLRVDPWTGISKPELQQKVKGWLQRINDAPLKPFQKVDILKGYTIPRLIYLADQADVKTTYLETLDLEIRTAVKEWLHLPPCTCDAILYSSTRDGGLGITRLTGLIPSVQARRLHRIAQSSDEVIREIAKKEGIEKEYERLWIAAGGNKDKIPSIWDPRAVTVISEGQGGEKQVSEWELPAPKTIYPKPCDWRKQEFTNWTKLITQGRGISNFESDKISNSWLEFYRGIPHRKLLTALQLRANVYPTREFLARGKQETPMRACRHCQAEAETCAHIIGYCPAVQDARIKRHNQICEVLMEEAKKKEWIVFQEPHVHDERNELYKPDLVFVKENQAIVVDVTVRYESKSTSLADAAAEKVRKYQHLKDQIQDLTNALNIKFMGFPIGARGKWYPGNYELLKELGLSSSRQDKVARRLSNRALFSSVDIIHIFASKTRTVIRST

SEQ ID NO: 405 - protein, 1202 aa, Ciconia stormi
MGRPIRIAFVSVATQTGPIDLRERVITEIGKEHDKSNVPEDSWNCTGLEFINSIVEGLEWSHPSNRAERLAKLPEVYETYNSSHAAETEINKKGEPSPRKAMSPPRTPSPNHNTDLPNEGTPVVKVPDKNTSCPCCGNRIGKISQLVEHLKRAHGKKKILFQCAKCGKTEMKHHSIACHFPKCKGSITTDPKCKGSITADPAVGWTCEECGRAFTSKIGLGQHKRLAHPVLRNIERIAAARPRASTARGLHRQCWTEEEVELLRKLEKQYEGSKNINKLIAEHIPSKTAKQISDKRRGLSKSPEEEGEKDQDPEWRKQMTMEQDHLRGVGSDTEGGLMSHYKKRIAEWITSEKLPILQGVFEEVLNGDEDTDCLVQEAADEYYPHLFRRSTEPETNQDKKHPGANKVRPSGPSKEWMKKRARKRGQFLRFQRLFYLDRGKLAGIILDDVESLQCGIPLEEVHKVFKSRWETPGTFKGLGAFRSAGQADNSAFKAMITAKEIAKNIREMNKNAAPGPDGLSLRDLIKIDPHYTQIMELFNLWLLSGNIPDVARECRTVLISKSAVPERQKDINNWRPITIGSIALRLFSRILTARLTKACPINPRQRGFIKSPGCAENLKLLQLLIRSAKKEHRPLGVVFVDLAKAFDTVSHSHILTVLKQKGVDEHIIKLIKNLYHNINTRIDLKNKQSEPIGMQIGVKQGDPMSPILFNLSVDPLLCKLEEEGSGFQYGSRNITTMAFADDLVLLSESWEGMKKNIEILEVFCELTGLKTQGEKCHGFFIQPTKDSYTINDCPPWTVNGTPLNMIEPGSSEKYLGLHVDPWTGISKPELQQKMKGWLQRINDAPLKPFQKVDILKGYTIPRLIYLADQADVKTTYLETLDLEIRTAVKEWLHLPPCTCDAILYSSTRDGGLGITRLTGLIPSVQARRLHRIAQSSDEVIREIAKKEGIEKEYERLWIAAGGNKDKIPSIWDPRAVTVISEGQGGEKQVSEWELPAPKTIYPKPCDWRKQEFTNWTKLITQGRGISNFESDKISNSWLEFYRGIPHRKLLTALQLRANVYPTREFLARGKQETPMRACRHCQAEAETCAHIIGYCPAVQDARIKRHNQICEVLMEEAKKKEWIVFQEPHVHDEQNELYKPDLVFVKENQAIVVDVTVRYESKSTSMADAVAEKVRKYQHLKDQIQDLTNASNIKFMGFPIGA

SEQ ID NO: 406 - protein, 1363 aa, Erithacus rubecula
MALIWGGGVWFRAPVRLSRVSVGSQTSPGDWVDLVSWNFNFPGSKSNSQWVDLLPRHGVDLLSKFDQVDLVARNLPSKLSPDLAENELALLANLEFYRSDLYVYEGVHFFADREGLSGLPEVYEQLAPQPCAGDGSHSDLPRDTKLFVLEQKGSEEKEKVDAPKTSPPSPRKPGEQKPEETVMVTVPDKNPPCPCCGTRVNSVLALIEHLKGSHGKKRICFRCVKCGKEGTNYHSIVCHFPKCRGPVTEAAPAGEWICEVCGRDFQTKIGLGQHKRHAHPLIRNQERIVASHPKETSNRGAHKRCWTKEEEEMLIKLEAQFEGQKNINKLIAEHITTKTAKQISDKRRLLPRKPDKEVEEEPAVSTRTRRAAAGLRKEPELSHQSQAAVEDNGPGRSEPLGKPAAGKKTIGVKSRRPEEANGRRGTIKQQMAGQLQAHYHRTLGERLSAGAINTFPGAFKQLMEGREMQETVNQSAQDCFGCLESISQIRTATRDKNNKGAQEKHPRKPFQKWMKDRAIKKGNYLRFQRLFHLDRGKLAKIILDDIETLSCDIPPSEIYSVFKDRWETPGNFNGLGDFQNNGKADNSAFRDLITAKEIEKNVQEMSKGSAPGPDGITLGDIKKMDPEYSQTAEIFNLWLTSGKIPDSVRGCRTVLIPKSTEPERLKDANNWRPITIGSILLRLFSRIVTARLSKACPLNPRQRGFIRAAGCSENLKLLQSLMRSAKKEHRPLGVVFVDIAKAFDTISHQHIIQALQQREVDPHIISLVSNMYKDISTYITVKKNTRTDQIHFRVGVKQGDPMSPLLFNLAMDPLLCKLEESGKGYHRGRSSITAMAFADDLVLVSDSWENMVTNIKILETFCDLTGLKTQGAKCHGFYIKPTKDSYTVNDCAAWTIKGTPLNMIDPGETEKYLGLQIDPWTGIAKSNLSTKLEFWLQRIDEAPLKPLQKIDILKTYTIPRLTYLADHSDLKAGFLESLDQKIRTTVKDWLHLPSCTCDAILYSSTKDGGLGITKLAGLIPSVQARRLHRIAQSSDETMKMFLEKDQMEEMYKKLWIQAGGDREKIPSIWDALPPSEPSNDAGTTSEWEAPSLKTKFPKPCNWRKNEFKNWTKLVSQGRGIANFEGDKISNHWLQYYRSIPHRKLLTAVQLRANVYPTREFLARGRQDKYIKSCRHCDADIESCAHIIGNCPVTQDARIKRHNYICEVLLEEAKKKDWVVFKEPHLRDTTKELYKPDLIFVKDARALVVDVTVRYEAAKTSLEDAAAEKVNKYKHLETEVRNLTNAKDVVFMGFPLGARGKWHQKNFELLETLGLSKSRQEKIARTLSTTALMSSVDIVHMFASRLRNYVVRNSLFLFVAVLIL

SEQ ID NO: 407 - protein, 1238 aa, Gallinago paraguaiae
MGWSGRLCFVSVATQTKYLDWALSVPSILNPDLVGGGIAERKRWEFVNSEKGYVLVLSPSRSSLLATLPEVFESPKVSGRTISPSSVQTEYTGERTSSPPITPPPILEAGADPPQEGTPVVKIPDKNPACPCCGNRMGKITGLVDHLKRTHGKRKILFQCARCGRTNPKHHSIACHIPKCKGAEEPSPSMGWACEECNRTFGTKIGLSQHKRLAHPVTRNVERITATRPKEESARGAHRRCWSEEEVELLKKLEKQYEGNKNINKLIAEHLPTKTTKQISDKRRGLVRSPSKKKVKELGIREELMKEGEHLERSGSQEEGGLRSRYRKSIAEWLRTRKITTLREIYERVMKGKKDLPALVDEAAQDCYACLKKDLLEGERRQIQKIREIRRSRPQKPSKQWTKKRARKRGQFLRFQRLFHLDRGKLAGIILDDVESLQCGIPLDAIHEVFKSRWESPGTFKGLGTFCTNGLADNSAFQPMITVKEIEKNIREMNKNTAPGPDGVTLRDLMKADPQCVNLMELFNLWLLTGYIPDGIKNCRTILIPKSNVPEKLNDVNNWRPITIGSIILRLFSKILTARLSKACPINTRQRGFIKSPGCSENLKLLQLVIRYAKREHRPLGVVFVDLAKAFDTVSHAHIIAVLKQKGVDEHIINLIENSYHNIKTYIDMKNEKSDSIGIRIGVKQGDPMSPILFNLSVDPLLCKLDEIGNGFECHTKVVTSLAFADDLVLLSGSWEGMQKNIEIVETFCELTGLKMQGEKCHGFYIKPTKDSYTINDCPPWTINGTPLNMIEPGSSEKYLGLRIDPWTGISKPELLEKVDRWLAKVGKAPLKPFQKVDILKGYLIPRLIYLADQANLKPTYLENIDLAIRNGVKEWLHLPACTCDAILYSNTQDGGLGINRLAALIPNVQARRLHRIAQTTDDVLKEIVKQEGIEREYEKLWVMAGGDKEKIPSIWDPKSIMVISETGGEELSEWESPNPKLIYPKPCNWRKREFNNWTKLSTQGRGISNFEKDKISNNWIQQYRGIPQRKVITALQLRANIYPTREFLARGRSETYIKSCRHCQADIETCAHIIGYCPSVQDARIKRHNQICNILAEEAKSKDWLVYQEPLLRDESNELYKPDLIFVKENQAIVTDVTIRYESTTTTLEEAALEKAKKYAHLKSQIQDLTNTSIINFTGFPLGSRGKWYQGNYNILKDLGLSSSRQEKVARRLSNYALFSSVDIVHMFASKARTEVR

SEQ ID NO: 408 - protein, 1261 aa, Geranoaetus albicaudatus
MGRPMRISFVSVATQTSPLDLRDNVVSCSIQDHKTGGLLEGRFEIRGLEFVNSDLEGLKCQQSPTLTDLLAVLPEVYEVPNSFSLGDKNTCPTPVEDENEEEEPSPLGAVAGTSPLPSTPVSRSRDDLPTEGTPVVKIPDKNTSCPCCGNRMGKLSGLIEHLKRAHGKKKILFQCARCGRTDVKHHSIACHFPKCKGPVEASPERSWKCEECEKTFDTKIGLGQHKRLVHPVTRNLERITAARPKTGTMRGAHRRCWTEDEMELLRKLDKQYEGQKNINKLIAEHIPTKTTKQISDKRRDLRKSPVKKGKDQGQTKHLELEGEHLVEGEHLVCIGSEMEGGLRSRYRKTVSEWVTSGKLSILHGMFEQVIEGEEDPALVADKAMKDCFTCLASKSLELKTSQGRPRQVAQTARPSEPPKGWMKKRARKRGQFLRFQRLFYLDRGKLAGIILDDVESLKCAIPQDEIHNVFKSRWESPGTFKGLGAFRSKGLADNSAFEAMITAKEISKNIREMNKNSAPGPDGLSLRDIMKIDPHCVQLMELFNLWLVTGTVPDVVKECRTVLISKSSLPERQMDINNWRPITIGSIILRLFSRILTARLAKACPINSRQKGFIRSAGCAENLKLLQLLIKSAKKEHRPLGVVFIDLAKAFDTVSHHHLMAVLKQKGVDHHIITLITNMYQNIRTRITVKNEHSDPIGIQIGVKQGDPMSPLLFNLSVDPLLCKLEEEGSGYHHDSKGVTSMAFADDLVLLSGSWEGMQSNIKILEAFCELTGLRTQGEKCHGFYIQPTKDSYTINDCPPWQINGTPLNMIEPGSSEKYLGLRIDPWTGISKPELLRKIRDWLQRIGEAPLKPFQKVDILKGYTIPRLIYLADQADVKATYLEELDLTIRTTVKEWLHLPPSTCDAILYSSTRDGGLGITRLSGLIPSIQARRLHRIAQSSDDVIRSIVKQEGIEKDFEKLWLTAGGDREKIPSIWDPSAIRVTSEELGEDEFASEWEIPTPKTIFPKPCDWRKQEFINWTKLQSQGRGIANFEKDKISNNWLERYRGIPHRKLLTALQLRANVYPTREFLARGRQESHIKSCRHCQAENESSAHIIGYCPAVQDARIKRHNQLCDLLITEVKKKDWIVFQEPILKDEQNEIYKPDLVFVKGDQAMVIDVTIRYESKLSSLADAAAEKVKKYCHLKNQIQELTNAKNIKFKGFPVGARGKWYSGNYEVLKALGISNSRQDKIARCMSRKALFTSVDIVHMFVSHSRSIVRT

SEQ ID NO: 409 - protein, 1260 aa, Harpyopsis novaeguineae
MGRPMRMSFVSVATQTSPLDLRDNVVSCSTKDHGGLLEVRFEIRGLEFVNSDLVGPEGQQSSTLIDHLALLPEVYEVSNSLSLRDKNICPTPVESENEEEEESSPLGATARISPLPSTPVSQPRDDLPTEGTPVVKIPDKNTPCPCCGNRMGKLSGLIEHLKRAHGKKKILFQCARCGRTDVRHHSIACHFPKCKGLVEASPERGWKCEECEKTFDTKIGLGQHKRLVHPVTRNLERITAARPKAGTMRGAHRRCWTEDEIELLRKLDKQYEGQKNINKLIAEHIPTKTTKQISDKRRDLHKSPVKKGKDQGRKEHLELEEEHLAEGEHLVCVGSETEGGLRSRYRKTISEWVTSGKLSILHEMFEQVIEGEKDLTTVADKAMKDCFACLASKSSELKAGQGRPRQVAQTARPSEPPKGWMKKRARKRGQFLRFQRLFYLDRGKLAGIILDDVESLKCGIPQDEIHGVFKSRWESPGTFKGLGAFRSRGQADNSAFEAMITAKEISKNIKEMNKNSAPGPDGLSLRDIIKIDPHFAQLMEVFNLWLVTGVVPDVVKECRTVLISKSSLPERQMDINNWRPITIGSIILRLFSRILTARLAKACPINPRQKGFIRSAGCAENLKLLQLLIKNAKKEHRPLGVVFIDLAKAFDTVSHYHLIAVLKQKGVDHHIITLITNMYQNIKTRIAMKNEQSDPIGIQIGVKQGDPMSPLLFNLSVDPLLCKLEDEGNGYHHGSKCVTSMAFADDLVLLSGSWEGMQSNIKILEAFCELTGLRTQGEKCHGFYIQPTKDSYTINDCPPWQINGTPLNMIEPGSSEKYLGLRIDPWTGISKPELLTKIRDWLQRIGEAPLKPFQKVDILKGYTIPRLIYLADQADVKATYLEELDLTIRTTVKEWLHLPPSTCDAILYSSTRDGGLGITRLSGLIPSIQARRLHRIAQSSDDVIRSIVRQEGIEKEFEKLWLTAGGDKEKIPSIWDPSAIRVTSEELGDDELVSEWEVPAPKTIFPKPCDWRKQEFINWTKLQSQGRGIANFEKDKISNNWLDRYRGIPHRKLLTALQLRANVYPTREFLARGRQESQIKSCRHCQAENESSAHIIGYCPAVQDARIKRHNQLCDLLITEVKRKDWIVFQEPILKDEQNEIYKPDLVFVKGDQAIVIDVTIRYESKLSSLADAAAEKVKKYCHLKSQIQELTNAKNIKFKGFPVGARGKWYFGNYEVLKALGISNSRQDKIARCMSRKALFTSVDIVHMFASHSRSIVRT

SEQ ID NO: 410 - protein, 1239 aa, Limnodromus scolopaceus
MGWSGRIWFVTVATQTKYSDWAFTVHSITNPELAGDGIADLRGLEFVNSEKGYYVGHSPSRSSLLATLPEVYETPRVMGKVTSPSSVLTEHEGDRTSSPPRTPPPILETGADLPQEGTPVVKVPDDNPACPCCGNRIGRISGLIDHLKRTHGKKKILFQCAKCGRTNLKHHSIACHVPKCKGAKGTSPLRGWACEECNRTFGTKIGLSQHKRLAHPVTRNIERITASRPKEESARGAHRRCWSEEEVELLKKLEKQYEGNKNINKLIAEHLPSKTAKQISDKRRGLIKSPSKKNGKDLTLREQLTEEGEHLIESGSQEGGGLRSHYRKSIAEWIRSQKITSLRKIFERVIEGKEDLPSIVDEAAQDCYACLKRDLTEGEGRQIQKIREIRRTHPQKPSKQWTKKRARKRGQFLRFQRLFYLDRGKLAGIILDDVESLKCGIPLDVVHEVFKSRWESPGTFKGLGTFKTIGQADNSAFQAMITMKEIKKNIREMNKNAAPGPDGISLRDLMKIDPQCAKLMELFNLWLLTGYIPDGVKNCRTILIPKSTVPEKLNDVNNWRPITIGSIILRLFSKILTARLTKACPINIRQRGFIKSSGCSENLKLLQLIIRYAKREHRPLGVVFVDLAKAFDTVSHSHILSVLKQKGVDEHIIKLIENSYYNIKTYIDLKNEKSDSIGIRIGVKQGDPMSPILFNLSVDPLLCKLEEMGNGFQCHSQNVTALAFADDLVLLSGSWEGMQNNITIVETFCELTGLKMQGEKCHGFYIKPTKDSYTINDCPVWTINGTPLNMIEPGSSEKYLGLYVDPWIGISKPELLEKVDRWLVKVGKAPLKPFQKVDILKGYLIPRVIYLADQANLKPTYLESIDLAIRTGVKEWLHLPACTCDAILYSNTQDGGLGISRLAALIPSVQVRRLHRIAQTSDEVLKTIVKREGIEREFEKLWLMAGGDKERIPSIWDPKTVMIISETGGDQILSEWEIPNPKLIYPKPCNWRKREFNNWTKLLSQGRGIVNFEKDKISNNWLIHYRGIPQRKLITALQLRANIYPTREFLARGRSETYIKSCRHCQADNETCAHIIGYCPSVQDARIKRHNQICHILAEEAKRKDWLVYQEPLLRDQQNELYKPDLIFVKGNQAIVTDITIRYETTITTLEEAALEKAKKYVHLESQVQDLTNTSVINFTGFPLGSRGKWYQGNYKILNELGLSNSRQEKVARRLSNYALFSSVDIIHMFASKARTEVR

SEQ ID NO: 411 - protein, 1259 aa, Melierax canorus
MGRPTRISFVSVATQTSPLDLRDNLVSCSTKDHGGLLEVRFEIRGLEFVNSDLVGPKGQQSPTLTDYLALLPEVYEISNSLSLRDENTCPTPVEIENEEEESSPLGATARTSPLPSTPVSRSRDDLPTEGTPVVKIPDRNTSCPCCGNRMGKLSGLIEHLKRAHGKKKILFQCARCGRTDVRHHSIACHFPKCKGPVEASPERSWKCEECEKTFETKIGLGQHKRLVHPVTRNLERIAATRPKAGTMRGAHRRCWTEDEIELLRKLDKQYEGQKNINKLIAEHIPTKTTKQISDKRRDLHKSPVKKGKDHGRKKHLELEGEHLAEGEHLVCIGSELEGGLRSRYRKTIAEWVTSGKLSILHGMFEQVIEGEEDPAIVADRAMKDCFACLASKSVELKAGQGRPCQRAQTARPSEPPKGWMKKRARKRGQFLRFQRLFYLDRGKLAGIILDDVESLKCGIPQDEIHDVFKSRWESPGTFKGLGAFRSKGQADNSAFEAMITAREISKNIREMNKNSAPGPDRLSLRDIIKIDPHCVQLMEVFNLWLVTGIVPDVVKECRTVLISKSSLPERQMDINNWRPITIGSIILRLFSRILTARLAKACPINPRQKGFIRSAGCAENLKLLQLLIKNAKKEHRPLGVVFIDLAKAFDTVSHHHLIAVLKQKGVDHHIITLISNMYQNIRTRITMKNEQSDPIGIQIGVKQGDPMSPLLFNLSVDPLLCKLEEEGNGYHHGSKCVTSMAFADDLVLLSGSWEGMQSNIKILEAFCDLTGLRTQGEKCHGFYIQPTKDSYTINDCPPWQINGTPLNMIEPGSSEKYLGLRIDPWTGISKPELLMKIRDWLQRIGEAPLKPFQKVDILKGYTIPRLIYLADQADVKATYLEELDLAIRTTVKEWLHLPPSTCDAILYSSTRDGGLGITRLSGLIPSIQARRLHRIAQSSDDVIRSIVKQEGIDKEFEKLWLIAGGDKEKIPSIWDPSAIRVTSEELGGEELVSEWEIPTPKTIFPKPCDWRKQEFKNWTKLQSQGRGIANFEKDKISNNWLERYRGIPHRKLLTALQLRANVYPTREFLARGRQESHIKSCRHCQAENESSAHIIGYCPAVQDARIKRHNQLCDLLAVEVKRKDWIVFQEPILKDEQNEIYKPDLVFVKGDQAIVIDVTIRYESKLSSLADAAAEKVKKYCHLKSQIQELTNAKNITFKGFPVGARGKWYSGNYEVLKALGISNSRQDKIARCMSRKALFTSVDIIHMFVSHSRSIVRT

SEQ ID NO: 412 - protein, 1364 aa, Oenanthe melanoleuca
MPPTAQGGPIEMGENSGSDFGGGVWFRAPVRLSRVSVGSQTSPSDWVDLLSWNLNLFPGSKTQWVDLLPVHGVDLVSKNDRVNLAARNLPSKLSPDSAENELALVANLEFYRSDLQEGVHFSANREGLSGLPEVYEQLTPQPCAGDSLHANLPRDAKLFVLEQRCSEEKESEEAPKTSPPTPGKPGEQTPEETVTVTVPDKNPPCPCCGTRVNSVLALIEHLKGSHGRRRVCFRCVKCGKEGSNYHSIVCHFPKCRGAETEAAPAGEWICEVCGRDFQTKIGLGQHKRHAHPLVRNQERIVASHPKETSNRGAHKRCWTKEEEEMLIRLEAQFEGHKNINKLIAEHITTKTAKQISDKRRLLPRKPVEDLEEEPAVSTRTRRAAAGLRKEPGVSHQGQAVAENNGPGRSRLPGEPAAGEETMDEIRRRPDKGNGRRGAIKKQKEGQLQAHYHRTLGERLSAGTINTFPRAFKQLIEGQEMQATINQTAQDCFGCLEAISQIRTATRDKNNKGAQEKRPKRPFQKWMKDRAIRKGNYLRFQRLFHLDRGKLAKIILDDIETLSCDIPPSEIYSVFKNRWETPGNFTSLGEFQINGKADNSAFRDLITAKEVEKNVQEMSKGSAPGPDGITLGDIKKMDPEYSRTAEIFNLWLTSGKIPDTVRGCRTVLIPKSTEPERLKDINNWRPITIGSILLRLFSRIITARLSKACPLNPRQRGFIRAAGCSENLKLLQSLMWSAKKEHKPLGVVFVDIAKAFDTISHQHIIQALQQREVDPHIIGLVSNMYKDTSTYITVKKNTRTDEIHFRVGVKQGDPMSPLLFNLAMDPLLCKLEESGKGYHRGGSSITAMAFADDLVLLSDSWENMKTNIKILETFCNLTGLKTQGVKCHGYYIKPTKDSYTVNDCAAWTINGTPLNMIDPGETEKYLGLQIDPWTGIAKSNLSTKLEYWLQRIDQAPLKPLQKVDILKTYTIPRLTYLADHSDLKAGFLESLDQKIRTTVKDWLHLPSCTCDAILYSSTKDGGLGITKLAGLIPSVQARRLHRIAQSSDETMKMFLEKDQMEQLYRKLWVQAGGDREKIPSIWDAPPVSEPANSAETYSEWEAPSLKTKFPKPCNWRKNEFKNWTKLVSQGRGITNFEGDKISNHWLQYYRSIPHRKLLTALQLRANVYPTREFLARGRQDKYIKACRHCDADIESCAHIIGNCPVTQDARIKRHNYICDVLLEEAKKKDWVVFKEPHIRDTTKELYKPDLIFVKDARALVVDVTVRYEAAKTSLDDAAAEKVNKYKHLETEVRNLTNAKDVAFMGFPLGARGKWHQKNFELLGALGLSKSRQEKIARTLSTTALMSSVDIVHMFASRARKLGNQE

SEQ ID NO: 413 - protein, 1253 aa, Otis tarda
MGRPIRVAFVSVATQTSPLDLRDDVVIKSIIDHREVVGEEIEYRGLEFINSQIVGVMAHPPTPIETLAMLPDVYEVPDVGPRGATTSPHLVEVESEEEEVLSPPGATAHPIQIPSTPILGAGSEHPTEGTPVVKVPDNNPPCPCCGNRMGKMSGLIEHLRRAHGKRKILFQCARCGRTNVKHHSIACHFPKCKGDITSPPKGDWVCEECGKAFETKIGLGQHKRLVHPAARNIERIIASRPKEGTARGLHRQCWTEEEVELLKRLDKQYEGSKNINKLIAEHIPSKTAKQISDKRRGLHKSPIKRGGKEQGGKKLLEEEGEHLVETGSHENGGLRSHYRRTVSEWITSEKLPILQGTFESVLEGSGEPSTLVDEAVDESYARMFRTSIELKACQERKQRMARRARPSEPPKGWMKRRAKKRGQFLRFQRLFHLDRGKLAGIILDDVESLKCEIPLDEVHSVFKSRWESPGTFKGLGAFRTNGQADNSAFEAMITAKEISKNIKEMSKNAAPGPDGLTLRDLIKMDPECDQLMEVFNLWLVTGSIPDMVRECRTVLISKSALPERQRDINNWRPITIGSILLRLFSRILTARLTKACPINPRQRGFIKSAGCAENLKLLQLLIKNAKKEHRPLGIVFVDLAKAFDTVSHHHIIMALKQRGVDNHIIALIKNLYSNISTRIYLKNEQSDPIGIHIGVKQGDPMSPILFNLSIDPLLCKLEEEGNGFQHCSRTITALAFADDLVLLSGSWEGMERNIEILEAFCELTGLKTQGEKCHGFYIKPTKDSYTINDCPAWTINGTPLNMIEPGSTEKYLGLQIDPWVGISKPELRMKIEDWLQRIGRAPLKPFQKVDILKGYTIPRLIYLADQADVKVTYLESLDLIIRTTVKEWLHLPTSTCDAILYSNTRDGGLGITRLVGLIPNIQARRLHRIAQSSDELIRSVVKEEGIEREFEKLWVTAGGKKDKIPSIWDPGTVMIISEGVGGEEPASEWEIPAPKAIFPRPCDWRKQEFANWTKLLSQGRGISNFEKDKISNSWLEYYRGIPHRKLITALQLRANVYPTREFLARGRQEYQIKACRHCQAENESCAHIIGFCPAVQDARIKRHNQLCELLANEAKKKDWIIFNEPVLRDEQNELYKPDLIFVKENQAMVVDITIRYESKITSLVDAAAEKVKKYEHLKIQIQDLTNCENIKFYGFPIGARGKWYQGNYQLLTELGLSSSRQEKVARQMSKRALFTSVDIMHMFMSKSRSVVRS

SEQ ID NO: 414 - protein, 1255 aa, Tyto alba
MGLAARIAFVSVATQTSLLDLRDDVVPRTIRDHAKLVDVGINFRGLEFVNSDVEGLEGGDLSTVTESLAMLPEVYEEPSPSALEGKDISPLLRESESEGEGELSPPGAVAQLFPLPSSPILASGGEPPPEGTPVVKVPDKNTSCPCCGTRIGKVSGLVEHLRRVHGRRKILFQCARCGKTNEKHHSIACHVPKCKGAIEATPKEGWACEECGRTFETKIGLGQHKRLAHPVTRNLERIMAARPKETSARGVHRKCWTEEEVEILRKLEKQYEGNRNINKLIAEHLPTKTAKQISDKRRILHKSPVKKREKDQEWKKHLREGEHLVSIGSRKRGGGLKSHYRKTISEWITSGKLRILHATFEKVIEGGEDLPTLVGGAVEDCYARLFKRSSELEASQGRKLQTARTARPSEPPKEWMKKRARKRGQFLRFQRLFHLDRGKLAGIILDDVESLKCGLPLDEVHCVFKSRWESPGTFKGLGGFKTLGRADNSAFEAMITAKEISKNIKEMSKNSAPGPDGLSLRDLMKIDPHYTMLAELYNLWLLTGTIPDMVKECRTVLISKSALPERQKDINNWRPITIGSIVLRLFSRIITARLTKACPISPRQRGFIRSAGCAENLKLLQLLIRNAKREKHPLGVVFVDLAKAFDTVSHNHIIEVLKQKGVDNHIISLISNMYSNIHTYIDMKSEQSDPIGIRIGVKQGDPMSPILFNLSVDPLLCKLEEEGSGYQHYSTSITSMAFADDLVLLSGSWEGMRRNIEIVEAFCDLTGLKTQGEKCHGFYIQPTKDSYTINDCPAWTINGTPLNMIEPGSSEKYLGLKIDPWVGISKPELLAKIKDWLHRIDRAPLKPFQKVDILKGYTIPRMIYLADQADVKVSYLESLDLTIRTAVKEWVHLPPSTCDAILYSSTRDGGLGLTRLSGLIPSVQARRLHRIAQSSDEVIREIVKKEGIEKEYEKLWLAAGGNKEKIPSIWDPSSAMVITEVLGGEDQLSEWERPAPKTIFPKPCDWRKQEFINWTKLASQGRGITNFEKDKISNSWLERYRGIPQRKIVTALQLRANVYPTREFLARGRQETHVRSCRHCQAEIESCAHIIGYCPAVQDARIKRHNQICELLIEEAKKKEWIAFQEPLIRDEKNELFKPDLVFVREEQAIVVDVTIRYESKETSLEDAAAEKIKKYQHLEDQIQELTNATTIKFMGFPLGARGKWYQGNYTLLKELGLSSSRQDKVARRLSNRALFSSVDIIHMFASKVRTVENV

SEQ ID NO: 415 - protein, 1245 aa, Xenus cinereus
MGWLGRIWFVSVATQTNYSDWAFTVHSITNPELPGDGNAEIRGLEFCNSEKGYYVGHSPSWFSVLDTLPEVYETPMLQGNVISPRSEPAEQEGERPSSPPITPPPPILETEADLPQEGTPVVKVPDENPACPCCGNRMGRISGLIDHLKRTHGKRKILFQCARCGKTNLKHHSIACHVPKCKGVEGLSPVRAWTCEECNRSFGTKIGLSQHKRLAHPVTRNLERITASRPKEESARGAHRRCWSEEEVELLKKLEKQYEGNRNINKLIAEHLPSKTAKQISDKRRGLVKSPSKKSPSKRKGKNLALREQLMEEGEHLPESGSQDGGGLRSHYRKVIAEWIRSQKITSLKDVFERVIKGKEDLPLLVDKAAQDCYACLKMDLIEEGDRQSQKIREIRRPRPQKPSKQWTKRRARKRGQFLRFQRLFHLDRGKLAGIILDDVESLQCGIPLDVVHEVFKSRWESPGTFKGLGTFNTIGHADNSAFQTLITAKEIVKNIREMNKNAAPGPDGISLRDLMKIDPHCTKLMELFNLWLLTGYIPEGIKNCRTILIPKSSVPEKLNDVNNWRPITIGSIVLRLFSKILTARLTKACPINTRQRGFIRSPGCSENLKLLQLLIRYAKREHRPLGVVFVDLAKAFDTVSHSHIIAVLKQKGVDEHIIRLIENSYENINTYIDMKNVKSDLIGIQIGVKQGDPMSPILFNLSVDPLLCKLEEMGNGFQYYTKDVTSLAFADDLVLVSGSWEGMQRNIEIVETFCELTGLKMQGEKCHGFYIKPTKDSYTINDCPPWTINGTPLNMIEPGSSEKYLGLYIDPWTGISKPELLEKVDRWLSKVGKAPLKPFQKVDILKGYLIPRLIYLADQANLKSTYLESLDLAIRTGVKEWLHLPSCTCDAILYSNTQDGGLGISRLAALIPSVQARRLHRIAQTTDDVLRTVVKREGIEKEFEKLWVTAGGDKEKIPSIWDPKTIMVISETGGDQSLSEWETPNPKIIYPKPCNWRKREFNNWTKLLTQGRGIANFEKDKISNNWIIHYRGIPQRKLITALQLRANIYPTREFLARGRSETYIKSCRHCQADNETCAHIIGYCPSVQDARIKRHNQICHILAEEAKSKDWLVYQEPLLRDQQNELYKPDLIFVKGNQAIVTDITIRYETSLTTLEEAALEKAKKYAHLVTQIQDLTNTSVINFTGFPLGSRGKWYQGNFKILKELGLSSSRQEKVARRLSNYALFSSVDIVHMFASKARTEVR

SEQ ID NO: 416 - protein, 1392 aa, Aphelocoma californica
MEISKPFLGPPIRLYQVSVGTQTSNSDWVDLVSRDFKPGSLSKSCGVDLASLISERRVALLSKTDRVDLVYLTSKRQVDLLSKTDQADLVPQNLPSGSPNSAENELDLVNLEFYRSDLCVDNVCVHFSVNWEGLSGLPEVYEQLTPQPSAGDGDHPPKDSEVIVLSDGEESGEHERGSALETSPPEPETTSETSPPEPGTSALPAPSPPPAEDHGEQAPEDILVVTIPDKNPPCPCCGTRVNSVGGLIEHLREAHGRRRACFRCAKCGKESNNCHSIVCHFPKCRAKTETAPAGEWICEVCGRDFKTKIGLGQHKRLAHPMIRNQERIAASHPKETSNRGAHKRCWTKEEEELLIKLEAQFEGNKNINKLIAEHITTKTAKQISDKRRLLPRKPTEDVCEEPGVSHRTRRAAAGLKIEPGLSHQPGKGTEDNGPGISQRLRRPAAGRRTEPEIRHHPDKRTKQLGTIDQQREGQLQAHYLKTLGEWLSAGTINTFPRAFKQLIKGREMQPLVNETAQDCFGCLEAISQIKTAARDKDKRETREGKPKRPLQKWMKKRAVKRGKYLRFQRLFHLDRGKLAKIILDDVECLSCDIPPSEIYSVFKARWETAGKFDGLGDFQINGKADNSAFRDLITAKEIEKNVQEMSRGSAPGPDGITLGDIRKMDPEFSQTMEIFNLWLTSGKIPDMVRGCRTVLIPKSSRPERLKDINNWRPITIGSILLRLFSRILTARLTKACPLNPRQRGFIRAAGCSENLKLLQTIIRSAKREHKPLGVVFVDIAKAFDTVSHQHILQALQQRCVDPHIVSLVSNMYENISTYITTKKTHTDHIQLRVGVKQGDPMSPLLFNLAMDPLLCKLEESGKGYHRGQSSVTAMAFADDLVLLSDSWENMKQNIRIVETFCDLTGLKTQGEKCHGFFIKPTKDSYTVNDCAAWTINGTPLNMIHPGESEKYLGLQIDPWTGLAKSDLSTKLENWLEKIGKAPLKPLQKLDILKTYTIPRLTYLADHSDLKAGFLEALDQTVRTTVKEWLHLPTCTCDAILYSSTRDGGLGLTKLAGLIPSVQARRLHRLAQSSDETMKMFLDKDQVEQLHKKLWVQAGGDREKIPSIWEAKPANVPSTSCSADTTSEWEAPSFKSKFPKPCNWRKNEFKNWTKLVSQGRGIENFEGDKISNHWIQYYRGIPHRKLLTALQLRANVYPTREFLARGRKDKYTKACRHCEADNETCAHIIGNCPITQDARIKRHNYICEVLSEEAKKKDWVVFQEPHLRDTNKELYKPDLIFVKDARALVVDVTVRYEASKTSLEEAAAEKVNKYKHLEEEIRELTNAKDVVFMGFPLGARGKWYHGNFELLGALGLSKTRQERVARTLSSIALTSSVDIVHMFASRARNCKVV

SEQ ID NO: 417 - protein, 1375 aa, Phylloscopus trochilus
MSQVGGLTTHYRPTERGGGIPDLDKSGCDLGGGGVWSGPPVRLVRVSVGTQTSPGDWVDLVSWNRNFVPGSKSKSQRVDLVSRHRVDLFSKNDWVDLVAQNLPSKLPPDSAENELASLANLEFYRSDLHGDEGIHFSAVWEGLSGLPEVYEQLAPQPCAGDNSHPSPPRDNNMFVLEERFCREKDSGDAPKTSPPEPGEPGEQTPEETVTVTVPDKNPPCPCCGTRVNSVLSLIEHLKGSHGKKRICFRCVKCGKENPNYHSVVCHFPKCRGPETEAAPAGEWICEVCGRDFKTKIGLGQHKRHAHPLIRNQERIVASHPKETSNRGAHKRCWTKEEEEMLIKLEAQFEGHRNINKLIAEHITTKTNKQISDKRRLLPRKSDKEVEEEPAVCTRTRRAAAGLRKEPEMSHHDQAVTEDNGPGKSHLPGKPAAGKKTRDEISQRPDKGNGRRGAIKHQGAGQLQAHYHQTLGERLSAGTINTFPHAFKQLMEGQEMQLTINKTAQDCFGCLESISQIRTATRDNNNKGAREKRPKRPFQKWMKDRAIKKGNYLRFQRLFHLDRGKLARIILEDIEALSCDIPPSDIYSVFKDRWETPGNFKCLGEFQINGKADNSAFKDLITAKEIEKNVQEMSKGSAPGPDGITLGDIIKMDPEFSLTAEIFNLWLTSGKIPDMVRGCRTVLIPKSTDPERLKDINNWRPITIGSILLRLFSRIVTARLSKACPLNPRQRGFIRAPGCSENLKLLQSIIRTAKKEHRPLGVVFVDIAKAFDTVSHQHIIHALQQRGVDPHIIGLVSNMYKDISTHITVKKNTHTDKIHFRVGVKQGDPMSPLLFNLAMDPLLCKLEECGKGYHRGGNSITAMAFADDLVLLSDSWENMKTNIKILETFCNLTGLKTQGVKCHGFYIKPTKDSYTVNDCAAWTIYGTPLNMINPGESEKYLGLQIDPWTGIAKSNLSTKLDYWLQRINQAPLKPLQKVDILKTYTIPRLTYLADHSELKAGFLESLDQKIRTTVKDWLHLPSCTCDAILYSSTRDGGLGITKLAGLIPSVQARRLHRIAQSSDETMKMFLEKDQMEQLHEKLWVQAGGDREKIPSIWEAPPVSNPSNSAGTSSEWEAPTLKTKFPKPCNWRKNEFKNWTKLVSQGRGIINFEGDKISNNWLQHYRSIPHRKLLTALQLRANVYPTREFLARGRHDKYSKSCRHCDADTESCAHIIGNCPVTQDARIKRHNHICKVLLEEAKKKDWVVFKEPHIRDTNKELFKPDLIFVKDTRAIVVDVTVRYESAKTSLEDAAAEKVDKYKHLETEVRSLTNAKDVDFMGFPLGARGKWYPKNFELLTALGLSKSRQEKIARTLSTTALLSSVDIVHMFASRARKF

SEQ ID NO: 418 - protein, 1040 aa, Pseudolycoriella hygida
MASNLNYVVNDSDNETSSGDLAGENQFRMATNTTGPQSSEQRSVNEAASNVCLECGMNFPTKRGLGVHRQRKHPAAANAEINVERKKLRWSDEEIRVMAGYEAQATIAKTTYMNQHLLTLMPNRTLDGVKGVRKREVYKQMVKDRIEILRRNDNDVTDDILQPNNDSLEPEVDSSNRNLDLAIKQALEAATAEVGKIRSESAREIVEISRAALLNNDLDENRLMRWLSTRFTNIRRPRGPRYSKTTEYRGTAKEKRRQRYAVVQSLYKKDIGAAARVVLTNNDLIPTKIPQIQHMFEYWKNVFATDNEGQRTSSIETAQEQHIYPIWSPVTMDEIKSARAANDKGAGPDGIVPKSWNRLDDRYKCLLYNLFMNFGKVPRQIKESRTVFTPKIDGGSSDPGEFRPLTICSVILREFNKILARRVVKCHDYDTRQTAYLPVDGVCINVSLLTSIIAEAKQMRKELHIAILDLVKAFNSVYHSALIDAIKEVGCPNGFVDYVKDMYHNVETEMQFEGCSEKARIMAGVYQGDPLSGPLFTIAYEKALKSLSDDIGYELKNVRINASAYADDGMLLAMSVIGLRHNLAKFNDTLAKIGLKINPRKSKTLSLVPSGRDKKLKVVSDRKFTIGDTEIETLSITDLWKYLGVNFKVSGPEVVKVDLQDHLNKLTKAPLKPQQRIHLLKTVVLAQHQHRLILSRTTGVGLRKMDIVIRRYVRQWLHLPKDVPIAYIHAPVKQGGLGIPCLQLWIPLMRFTRLTKAKGSGGMKMEVVLNSNVYKSIIHGAKQALSVMNCGDKPTLVDYNTYWKKQLNRMVDGKDLKMAQNHTSSTAFNGARNCEVSGEDYIHYNQIRTNSLPTRKRCARGRPGRSTTCRAGCLQVETLQHVIQACMRTNAGRIQRHDRVVELLLNEFRRKGYVGEKEVHMEASEELLKPDLVLVKNGIGYVVDAQIVQCGNLENDHRAKVAKYRDHPELTELIKNKYEVQEVAYGACTISYKGIWCKSSVDSLISMKVSSYCLFQIVTSVLRGTWLNWRRFNKTTSVVH

SEQ ID NO: 419 - protein, 1141 aa, Andrena bucephala
MYNSDEDEVASDAGAHGPGSPVADLSASRQGTSDETGTVQGQANEQVVVLPLGSPIRCAGCLSDHRDCQFLSESDFAKHASKQHSQMAILWTCKKCHKAYKKVHALACHIPKCKGPVMAQEKEFKCSECADSFNSQRGLSTHERHRHPAVRNSKRKGTDGAAPVVARRGAKASVWSEEETLLLRELNQRFQGSSQMNARMREFFPDKTLKQISDKRRQIRPQPEEVLITDTDSEPECQVEVVADTPPRADEIRRTSVEDSDWREALKIAVVTEQTDAAEWLSIQDRLREVAMSETLDDAVMDEIIKDLVHILVGDKIVEPVRTKKKGNKDNEGPTGVRREKDRTRKAKYRYAKYQEAYNKCPGKLANLAMAGKDLVDGEEGTAYPETEEIRELYTSLWGTEGPQWKEVTRAKDPDTEVAMGDLWSPITASEIIKKMAKIKSNTAAGTDGVKKADLRGKGTVQILSQLFNTLLLRESFPAHFRQNRTTLIPKPGKDTRVSGNWRPITIGSLLGRLFSGAIDSRLRQSVTLSERQKGFKYENGCRHNIAILGSTLASMKSGRGGVLTIVDVSKAFDTVPHAALGPTLAKKGIPRKAREYIGKMYENCNTSIRTKEGGAMQITLKRGVKQGDPLSPMLFNIIMDPIIEAINDTSQGVDLDGTNVAVLAFADDIVLVGKDRKEASKQLALLANYLNNLGMELSIPKCAAVEVVVKGKTWYLQDPGMKLGSEEIPTIKAEETSEYLGATLDPWIGFRVSKSKIEKVVNAANAVKRMGLKPHQKIELVRTYLIPKIIYALVVNPPPIGTLKELDHEIKQVIKSILKLHPSTTDGIIYADRSHGGIGLQRIANIVKMAVLRSGIKMQASTDDAVKSALQDQVSVLDKYAQSLGIKWPATMNQVEEARKRAKRLETEKWRQLISQGQGVTDFCHDKVGNAWLYNPKLLKASRYLDALKLRTNTFGTKVALRRANKDVDATCRRCRAQIETLGHVLGNCLHTKPMRIRRHDEIKNFIKDQVALRCTVFDEPTVNVVGELKKPDLVIKDQDRLIIVDVTVRYEDKDNLRKAFLDKTSKYKDTLEFIRIRTNSLQACIMPIVVGTRGAMPTKTQEHLKALGMKKKDMITISLIALRSSLEISNAFLDYDRIR

SEQ ID NO: 420 - protein, 1038 aa, Brachypalpus laphriformis
MASPRSGSVVENSRWPCVCGKDYVTQKSLLQHQRRYCRGALSASITNNCSICNRTFATFSGLRQHQKRAHAEEYNASLMAEASNARRGWTEDEEVELAMREADLRLSDPTQIIDALARSSTRSRDAIKKRRQLQSYKRLVSQFSASSTAPENEPYSDEDLVRTNSDIISTISSFPTANMDAIDLALRNACISGIDICQATSDSYTTLRNLYVTSGRTTNSSSSRHSQLLQALSSATSNRKKKRILYALAQNGFKHRKADYANRLIDDISWEGETISPPAAEIFEHYKNIFGRPSTCSLPASSCDRFNGTTVTGPISVEEIVLTIKQLKSSACGPDGIGKKELCKIPPIKLALLFNAILLSESTPDEMKRNKTTLIPKAKEGLGNVKNWRPITISSILLRCLNKILAHRLSQVELMSCQRGFTNIDGCFANTWTVQNLIKHHRLLGSPIVILSLDLKSAFDSVPHDAITRALRRSKVDGKFTRLIEESYRRGSTTIACNGNPIGEIGINRGVKQGDPLSPVLFNIFLDELVTIMHAEFSGINIGTEKICCLAYADDLILIAKTPEDGKRMLARAHIFLNSMSMELNANKCSALVLRTVPSKKKLFVDKAEVFPIGEQVISSMGTDRKFKYLGSDFAYAGILSSSLSSLFEQLKRIKRAPLKPFQKLLIVKEFLIPRYIASLQSPNITAGRLKEADRKIRVCLRSILHLNAHCHSSIFYAPVKAGGLGIFNFTDNIPVIVKTRISKLRNASSLLNSTFELNSGGVGAIDRLIKQDAANKATIALKHAAALESSFSGNGLAQARNHPASNKHLINPPKCWSGEDYIRSVQLRYNLLPSAGIPSNPPEARNCRAGCQKKESLSHILQQCPITHWQRIQRHDHVLRRLTKIASRKGWSHVTEPQIRGSDGLLKKPDVLLRKGSTLIVCDVGVHWEGPSKLGTQYAHKVATYSTAPFLERLRSMFPETTVFVLPLILGARGIWCEQNKFLAHHLRLGNFDVHDLITTSVRGSCSIHRDFMKFVWRRRTPIPPGEHPQHFQEEII

SEQ ID NO: 421 - protein, 1043 aa, Acrocera orbiculus
MSALELNSFDCPCGRSFESNRSLANHRRFCRLRPSTSTTSTANPTTLLPEECTYCSSRFGTYAGLRQHIRRAHPVEYNDLLTREAEGRQIHGWTDDEENRLALAESTYTGRNINIYLHSIFPGRSIDAIKKRRQTPSYREKINNLRRPTEQGNSLPHISTDNILPSSSDPQQIDDGNLYSRLYLHIHGIEDASNCENFYILKNTVLNCNDDVIHEAIDRFYEYLIKTYASKKKADRSKPRTTITNKLLNKNNHRNRRVQSYKIAQASFATNRKQYANTLLDDIIIDKGLHPTSEQIHASFSAIFGTESCNDNEPVLNCNSNIITSSIPITPLEISDTIQSSKSNSPGLDGINLKDAKRIPLQFLNLLFNSILYTRYSPLACKSSRTVLIPKSGDLRETKNWRPITITGVLQRLLHKALFKRLSASVILHESQRGFAPIDGCFTNIAILHSLIKDKRKNGKPLCIISLDIAKAFDTISHHSIIRALTRLNIDQMTKEYIKNAYTDCNTTIFCDEKQTPEIQVKRGVKQGDPLSPILFNFVIDELLTALHEFQGVSLGQAKICAQAFADDLILIAESEEDAKHMLNFTINFFSRRGLECNSDKSCSLVLKTVPRKKKVYVATEPSFQINGKDLQSITIEGVFKYLGKKFMRDGIIPCNIENLQKQLKSITKAPLKPYQKMVIVREHLIPRYIANLQQPKIFASTLKNADKLLRGAIRRILHLPEHFTKSSFYAPIKSGGLGLFSFNNQIPAIILSRWGKLANGSILLKEICNSCKPWIDSITKMIKPEQINKDIFHKYMSDELQSSRSGNGINQVGNNKACSLYVKDPPRCWSGEDFIRAIHLRLNMLPSKNQPWLPRSERLCRAGCPHRIESICHILQHCNIGHSLRIKRHDFACHRIIQAVKQHYNYECILEPRIRATSGLLFKPDIFIFKEDKVIICEVGIHWEGPEPLQVQFDHKVAKYSNPDFTTKMIEKYPNKIILLLPVIIGARGGWCISNDGFFNEIFKTNERTSVIRDIIETTLRGGWYIHKEFMKVVWTKRRRTY

SEQ ID NO: 422 - protein, 1088 aa, Acrocera orbiculus
MPRPPEDFICDCGKIFYTNKSFRQHRKRVHNISEPDTNLCPICKRSFRNYSGMRRHLTLSHSSSDIVEAETSSSTLHRCVCGSAYDSLTKLKSHQRRFCKGSDINNLTCQVCNRLFTTSAGLTLHLKSAHPTVHNEALKSTSTSARAPWSCDEENSLAKEEARLDPKLPNKVIIEFLSSFSSRSIEAIRSRRRLPSYMNKVEAFRNYASQQCFQEQRLSLLQDNAEVSNINLINFIQNIKLPTQADKDFADCVVNNFKDFDPVVLTKWVDTLYNARRTANKVMNDKKKINLLKAIEQCPSKRKKRMLLYKLAQYEYASDTRKYANNLLDATIDPGSEISPDKSETNKIYEEVFSTEGILDLEYIRDDENIISVSQPITEEEILTAIKTSKSNTSGPDGITKKIIFKIGHARLSLLFNSMILLGLIPDKFRQFKTIMISKQSKGLENPNNWRPITIGSMVMRILHKILAARISDSINLHQSQRGFSKLDGCLANIITLESVIKEKRRKGQPLFLINLDISKAFDKVSHHSILRALKKFKIDDLTRRYIKNTYLDNKTIVTCRNENFGEFRIKRGVKQGDPLSPILFNMILDELLKNLNANSGTKLGDENLSALAYADDLVLLAENKHSAQNLLNITSKFLKSRGLEINSSKSGSLALCSVPSKKAIYVDNRISFKYDNETLPAFNVDNEFKYLGRMFRSTGLKKCNLFNLLEQLKTIKKQPLKPQQKFNILNTYLIPRYIAELQTPNIDACKLKQADRKIRQFVRSILHIPSHCSNTIFYAPSDKGGLGIFHFQMAIPIIMLSRLNNLEDHSDLMKYTLEMAKPIINRLKKMNPAAINTKDQLRTHLSNQLYSSNSGRGLQNSTITGFCTDFIKNPPRYWKNSDYIKAIHLTFNLLPCLGLPYNPPEFQKCRSPGCLHKETVCHILQHCPITHRARIERHNNIVSKIVTTAQKKKDLTTYIEPTIRSRDGVLKKPDIIIENKSSVIVCDVGINWEGSISLTQQWLNKQAIYSSPLFIEKIKEKFPNKDIFILPFILGARGTWCATNRFFCEKLQLTRSTKKEIIHSTLRGGWTAHREFMKQVWRGRNRR

SEQ ID NO: 423 - protein, 1040 aa, Brachypalpus laphriformis
MPSYNLRNRQASSSVMPASPEVGGNSPPRYPHICNGCGNSYRTEKGKLQHQRRYCRGPARDETNTCPTCSRQFNTFAGLRQHIRRAHATVYNAEMKAESTSSRRLWSEDEQNQLAKAEAQLDSLDPTAIIDHLATLSTRTREAIKRRRQRPSFGARVQQFRQTLAAVNAAPSGSDESEYESATEDIHEAAQSEDSALMDHIRSLDLREQEDVALQRAVVSTNVSSKDALDEWARNLVERYGQSSTTTQHGTARQHNNATSGRRRRIQEYRLAQMEYVKNPRRLAERIISGRGWTDEDLRLPAAEDIGLHFRQTLSAPSQEDNAAIIDGFRQRTCISTPVSSDEICLVLKRMKSDCPGADGITLRRLRNIPAARLCLLFNSMLLTEYTPAVLKKCRTTLVPKTERPQGAGDWRPITVSATIMRLFHKVLTGRLELVRLHRNQRGFSRIDGCFANALTLHSLIKHHRRKATPLCVISLDVRKAFDTVSHNSLVRALQRANVDNKFIKYIRQNLKDVETEIRTSTGPVTIPMNRGVKQGDPISPILFNVLLDELICSLEGFSGVEISDSRNLRCLAYADDILLFAQSKEDGERMLGAAYSFFLERGMEINASKSQMISLRTVPSKKKLYADDTPARYGDLSIQALGIEEQFRYLGDIFSPFGETPCRSDTLLTDLQRIRRAPLKPQQKLRILKQFLLPRYIPYFQRPTVTRKALKDADKKIRACVKTMLHLTQHCHNSVLYAATKHGGLGVFQFTSRIPAIISERIEKLKWADDLFEDVSRIGQPWIGRINGMVLVNQATRTQHQQFHAQALEASFSGNGTCQVASHRACYKFVDHPPAFWNGQDYIKSIHLRFNLLPTVGVPSNPPEARRCRAHCGKVESLSHVLQGCPLSHWERINRHNFVQKRLASAARHKGWDAVLEPRLRGQDGLLKKPDLLLNKANTVIVCDVGVHWEGPEGLTTQYQQKVASYSTPAFIQELQRRYPDKEIYILPLILGARGIWCHLNKFIVAHLQLAAKDIEDLILTTMRGSVLIHQRFMRTIWA

SEQ ID NO: 424 - protein, 1194 aa, Andrena bucephala
MTEVAELGASPRHYVRGSTGQHPLEVSELCSTLIATKNLKKPRNPDCPSVDDSAMSPGYSVGLYSDLDVDIDVDYLLCPSCHIDLSSRILTQRKQHVRRCNQPPPNSDGAYSCEQCPSIYKTYAGLRQHIKRSHPVEFNAGDAALTERRAPATRAKWSTAEEKQLSRLEVQLPIGLPQKEINSRLASLHSGRSAEGIKKQRQKLSYKTIYRAIVAETMPANPVASVSLFSSSTSEAMVPETISGIPFSQVSSPPLASTSMYNNLGLRSPRLCLERIDSIAPWNCLFTQPSSSMPSSGTAPPDVGTSECALIQNLEICTYLRELILSCSDSVQTLIYGLFNNNSFEEIDAAIFSIVYSLAVSRQISGPTERNRNNNKNRKNFKLNNNRNKKRKQNRAAVRSATFSSYQRLYTYNPTQLAHAILDERELNSTQFPKMEEIEKEYHSIFEDCPVYSGPAPRSSDVHIDLDYPISFRETEIALRRLKQSACGPDGIKREDLRKANMADLVGLLNIVFGLCRTPTIFKRNRTVLIPKRGDLSKVSNWRPITISSLFTRLLHKILASRLSENIKLHHAQRGFTPGDGVMTSFTIFDTIVREHRNNGKPLFVLSIDLSKAFDKIHPSAIENALISKGVDNHTVKYIMSTYSDVDTIIECHGQRSVPISMRRGVRQGDTDSPILFNIAMDDFVSSIDPADGVSLGQAMIGCLLFADDIVLLSNTTHGMGEHLHRLHAFLANTHMEVNSSKCQALQLMRVPSTKRVAVDTVSRFKISGKAIPTLKVQEQLKYLGHNYNQHGMIAPSASNLKAMLERLRRAALRPWQKLQILNRYLIPRLLHCNQSSDVTVGKLVHIDRLIRQFVKATLHLPVTTPTAFFYAKIRDGGLSIPCLRHQIGTIYRRRLQRISTQGDLDFDAAFQTPSFKRLLQKLDGICQKIPSTRSAVARHWATSLHQSALGNGLQYGSRAANSWILDPPPFWTGRDYIRAIQLRIGLLPTGGAPYVNAEAAQCRNPTCTGRRETLSHILQWCPVTHYQRIQRHDKVTQDLVSNLRKLGYSIQEAPRVHTRDNRYIPDLLVIDTNSHIGNIIETTVVWEYRSSLLEAARIKRDKYSLPEILDNVQIKYHLLERPRVLPFVVGARGGWPPSNDVIWRTYKLPSFLQRTIVCNVLRYGSSIHRYFMAHVWRSRKKRGNPLGLSVVRV

SEQ ID NO: 425 - protein, 1015 aa, Acrocera orbiculus
MIGQDTENSLGYNDGPTGSSNPVTSSAANSASGIDTFVCEYPGCNRSFTTSNGRGVHHRRAHALWYDARTLNNVNNAKRRWTEEESNILARKEAELTMNGCRFINMALEGICVNRTIESIKGHRRGTAYKNLVQFYLDTLRNAPIIVEEPESNDPVNDTILEFLKDLPRLTSTDSVSLMLNRLVENVHTFSKEDIRNQVSVLINDLFPEVPRVNNQQFPRPNCQKSLSARDRRRREYRLTQAKWDRNRTSCIKSLFNDNSPNSSFPPKEVLVPYWERVMTRNVTCFPQNLVRGNLIPNLWSPITVQEIETCFPRGRSSPGPDNVSVKQLKSISKDILLRIFNVLLLCDRLPETLLESKTILIPKVANASQPDEFRPITISSTIVRCLHKVLAGRIIQEVPPDDRQRAFRQVDGCAENIHLLDLVLHQCKKKYSSVYLASLDISKAFDSVSHDCIEEVLKAKGIPQEMVAYIMSGYKYSKTRITTKSWISHSIAPRVGVKQGDPLSPLIFNMVIDALLSTLPNQVGVQIGNAKMNAMAFADDIILMASTVEGLQMLLDTTSNFLDQCGLKVNVAKSVTISVRGLPHDKKSVPDANQTFMFDGRRLAALSRIQQWRYLGISFSPEGSLVAAPLNEYLAQLAILTKAPLKPQQRLFALRTVVLPHYYHKLSLARCHLSTLKEFDKKTRNFVRKCLNLPNDTPTAYFHASVHDGGLSIPSVRWLMPLFRSKRLRNLSLLPEGNDIFLREQLAACMRRLSDGNTVLDTKKAIMQRWANLLYSSVDGAAFEGSTRNPQQHQWVTDGTRLLSGKDYLNLCKLRINALPTRSRCARGRTTDRSCRGGCGVAETQNHIQQNCHRTHASRIKRHNAIVTYATKQLRKRGYYVVEEPRLKTNDGIRKPDIVAWNDDEALVLDAQVVGEQIDSDRAHDAKCTYYGRYKEYIAKWTNINNHVYFSSITLNWRGIWSAKSANDLIARKILSPGDLKILSTRALIGGLNSYHIFQATTSVTRFHPRAGVG

SEQ ID NO: 426 - protein, 1045 aa, Acrocera orbiculus
MNVTELSLGYLDSAESTDLVLPTSGGGQVIQFHCEFPGCGRIFKNIRGRGVHYTRAHKKWRDENIERLDTEKKQSRNDANKKSKDRWTLEEKRMLARKEANIILKNRNDNTKTFMNMALSKLIQTRTLESIKGIRRRVSHKFRVEDALGEGSSSIGGEGESESGLQSLPEAPGFERNLRDFINNLDPLAGEGFNYDALQLICMDISILTIDALKEMIAVYLMETFPPKLNKRKIVQSNNTRLEQKQNLSNKRKRRIVYAKTQNLWTKDRSRCWKAIMAGHLEADYPQIEKERMVPYWTKVMTRDTKRSPDLPEADAHEVGLWDPINFEELKDSYPPTNSATGPDGMNVRLLKSIPTEILIRIFNIFMICGGVPNYLLKSRTVFIPKSRTAKDPNEFRPITISSVLVRMFHKILAKRLNNIKLDDRQRAFRKTDGCSDNIFLLDLVLRHHRKVKKDVFIASTDIAKAFDSVTFEALEKVMKNKGLPTPMVEYIISMYKNSTTILQYNNWESDPINPTCGVKQGDPMSPIIFNMVIDTMIKNTSNDIGVNIGSMHVNLMAFADDLILVAATETGLQELLDNTMKFLHSTGLETNASKCCSIAVKSLGKEKLTYVSAKTTFKIGGKDIPNLKSAEQMKYLGVPFTPEGRITTNIRELLKNKLEILNKAALKPQQRLWILTVAVIPSLFYHLTTGAIKIGLLKTLDSDIRKYIRKWLDLPKDCPLGYFYATVKDGGLGLASLRWLIPLHRKERLIKISRSSYIIGTKTNEYLASEIEACTKRLVYNDSSGTSKSLQSLSQIKDKWAKALHSSVDGGALKDSAKVKNQNAWVKEGTRFLTGNDFIKSVKLRINAMPTLSRTKRGRCQSRACRAGCGVSETFNHISQECHRASGMRIKRHNNIVKYVAKIMSKHEYNICLEPRLDTIEGLKKPDLVAYNNKECFILDAQIVGEQVNLDYAYDLKSRKYSDKSTTDIVKQKFKLPSDMPITSMGITINCRGIWSRRSAEHLLNSRILQKDNIKVLSSRAIIGGIAIFNQFSNATTIKRTGVG

SEQ ID NO: 427 - protein, 1053 aa, Acrocera orbiculus
MFGTTEHSNRLGFVHASTSGHEPPNNTVGQSPETFLCEFPGCGRSFTTLRGRGVHYVRAHKNWRDENLEQSEIQKRLDTNKISKDRWSMEEKKILARKEADIEIKARNDGKRVFINQALCKVFGNRTIESIKGIRKRLSHKFRVNDALMEESGDSSSEGETYYDAIPEESEDQKLKDFVHTLSQDAYKCKDFNFDTLHQICSKIKEYSTETISTKLATYLLETFTSKTSKTRKMKNMNGHTSWTNISNRRRRKVIYAITQKLWSKDRTRCWKAIEAEQIGTEVPQLEKNKMVSYWTNLMTRNTNRSSQPMQINTHTTNSSNELFQNMWKPITVDELKEAYPPKNTARGPDGMSARILRSIPEQILIRLFNIFMICGEVPKHLLKSRTVLIPKTTKANDPSEFRPITISSVMVRMFHKILARRLKIIELDERQRAFRDTDGCSDNIFLLDLVLRHQHRMKREVYIASTDVAKAFDSVSFEALEVVMRNKGLPNPMINYIMKMYKNSTTQIEHDDWVSDPINPTCGVKQGDPMSPTLFNLIIDGMLQKVTKDIGVSIGTKHINVMAFADDLILVASTEKGLQTLIDSTTSYLQKTGLNVNASKCCSIAIKSLAKQKKTFVSNRTIFKIQGRNIPALSRADQMKYLGIPFSPEGRMTGNLREMLVTKLTKIDKAALKPQQRMWIMTVSVIPTLMYRLNSGAIKIGLLKTLDKDVRRYVRKWLDLPKDCPTAYFYARVADGGLGVPSLRWWAPIQRRDKLKILSESTYTGDSTSNEYINKEIEGCNRRLTYYDHITCTQKLIRNTNDLNQKYAKLLYSSVDGGALKDSSKTKGQHVWVNDGTRFLRGNDFVKSIKLRINALPTLSRTKRGIAQNRACRAGCGVSETYNHISQECHRTHGIRIKRHESVVNYVTRSLKNKEFKVTLEPKLKTTDGLKKPDIIAIKGNDCLILDAQIVGEQTKLDEAYALKSNKYATEAVRKSIIENFNLEGKTNIKSIGITLNCRGVWSAASANQLAIERVISRKDIKVISSRVIIGGTTLFRIFNKSTMMKPKTGIG

SEQ ID NO: 428 - protein, 1032 aa, Meliscaeva auricollis
MATPQSINDAGINSHWPCSYCGKVFTTNAKVKQHERRVCSIKATMPENPNNQCLVCNTSYTTYAGLRIHQSKAHAEEYNAEMEAQSSNARKLWTLDEEKELAKMESNMIGLNPTEIINELAKNSKRTRDAIKKRRQLASYQALVSSYLAIPTEPITPPPPYGTSDTSTLNLDIMSYLNSLPINTMDVDDHETYNCLVTGSGMLDSINRLHQNIITKYGKERTSRHSSYSGLINALNNATSNRKKKSLLYTLAQKEYKSNKSAYAERLLDNKPWCSQNTSPPATELINQFRSTFGLYANCGLPKCASTNYVPITIARPITTEEITDTIKALKSKASGPDGIGKAEFCKIPAIKLTILFNAFLLAEDIPEELKSNITTLIPKTSNNLENPKNWRPITISSIILRCFNKIMASRLSKINLMDCQRGFTKIDGCFANTWSIETLIKHHRAKGIPLTIISLDLTAAFDSVPHDATARALRRVNVDEKYINLVNACNAGSSTNISCNGTEVGTVPMLRGVRQGDPASPVHFNIFMDELICLLNKEFSGIKIDGEKLCCLAYADDFILTAKTPEDAQRMLTKTTSFLTSMCMSINAKKCSAIVLKTVPSMKKVYIDTSTVFSVGNEVIPLINTNNNLRYLGRYFHYRGLTPSNNGELYEQLNRVRRAPLKPAQKLSIIKEYLIPRYIDHFQQPNITKKTLTEADRKIRVTLRKILHLNPHSHSSMFYAPIKDGGLGIFCLADSIPPIIIKRIDRLCAANNLLNATFHLSQARITSIKTMIKPGSEGKIEIQAKHTRLLQESFSGNGLWQAKHSTSSSAYITNPPKCWSGEDYVRAILLRYNLLPCAGIPSNPPDARFCRAGCPRRETVSHILQKCPITHSTRIARHNYVIKRITTFVARRGWTYMLEPNIRCSDGILKKPDLILMKNNTLIISDIGVNWEGPLTLDFQWNNKVAIYSTPAFIETIQQRFPNYNIHILPLIVGARGIWCKQNNFLKHHLRLPKITTNDIITTTIRGSCICHKDFMRYAWRTRPPQQQRLI

SEQ ID NO: 429 - protein, 1032 aa, Meliscaeva auricollis
MATPHEEPVVAVNEWPCNICGKCYISKASLQQHLRRVCNVKAQQPNNPNNECITCNRRFQTYQGLRLHQSKKHPAEYNSELQAQSSNARRGWTEDEEKELAKIEAGLEGLGSRDIINHLLNHSDRTFDAIKKRRQLASYQALVSSYKALPTELIPPELPYGESDCSVLNTEIKSYLQNLPNNIWDSEDLNIVSNFDLDNNLSSLTNDLYSSIVEKYRKDRTVLRQTYTGLINKLNNATSNRKRKQILYHLAQKEYATNPSGYAERLLDNKPWANSETTPSADDLLSQYKSTFGMFAEACTPNTSSNRYTKINIARPITIDEVKQVIKSLRSKAAGPDEIGKIELCKIPACKLTLLFNLFLLQEDIPDSLKLNTTTLIPKTSDNREIAKNWRPITISSIILRCFNKILAQRLNDIDLADNQRGFTKIDGCFANTWSVEGLIRHHRQKGTPITLISLDLAAAFDSVPHDAIARALNRVKVDQKYINLIRASNTGSRTSINCSGLEVGEVRILRGVRQGDPASPSHFNIFLDELICILNDEFSGVTINNNKLCCLAYADDFIITAKTPEDARRMLNRTTSFLTSMCMSLNVKKCSAIVLKTVPAQKKVYLDISAVFTIGSEAIPVLATDDKMKYLGKYFHFRGLVPSSTGDLYQQLTRVRRAPLKPAQKLDIVRTYLIPRFIDSLQQPNITKKVLEEADRKVRATVRSILHVTAHCHNSVFHAPIRSGGLGIFSFATNIPVIISKRVLKLRRANNILDATFALSQKRIDKITSLIKPNLEDKTAIQQQHANLLEHSISGNGLQQVQFSRASSDHILKPPKFWTGEDYVKAIQLRFNLLPCVGIPSNPPEARFCRSGCGRRETNSHILQRCPIVHTNRILRHNYVVSRITSYAAKKNWTYLLEPNIRCIDGILKKPDIILLKNNMLIICDVGVHWEGPLPLASQYNNKLSIYGTPNFIDAVKLRFPNYNIHVLPIITGARGVWCHQNKYIKHHLRLPFNVEKDIITTTIRGSCLTHTNFMRFIWRSRPPNNIHQHQ

SEQ ID NO: 430 - protein, 1031 aa, Drosophila sulfurigaster
MPRIAESYSVNSPTASVGAHQGRNVDANPVVGHLCVECGRSFGTKTGLGVHMSRQHKDRLDELRTRVDVKTRWCEEELAMMARKELELIANGERFINKKLALHFPERSVDAIKKCRQRDNYKAKIEQLRGQAALIPEINEPQTITRRPSISGLESSSSMSESVPITPSIHSDDVLMRILRGFGPVGCNRSWRVEVLQSIIDGAQTSGKEATLQCLSNYLLEIFPNRNEGPVSARVFPEPRNRRQNRRQQFARVQRNWDKHKGRCIGSLLAGPDESVMPNQEIMEPYWREVMTQQSLSSCNSTVPHMGHLLEGVWSPITSRDLQLHQVPLNSSPGPDGISPRTARSIPSGVMLRIMNLILWCGKLPTLFRMARTVFIPKTVRASRPEDFRPISVPSVIVRQLNAILASRLASSVDWDPRQRGFLPTDGCADNATIVDLILRDHHRRHASCYIATLDVSKAFDSVSHAAVIDTLSAYGAPTGFVDYVRSLYLGGGTSLNGKGWRSEEFVPARGVKQGDPLSPHMFNLVIDRLLRSLPDEIGVSVGNAKTNAAAFADDLVLFASTPKGLQALLDTTVSFLASVGLTLNANKCFTVSVKGQPKQKCTVIESRSFCVGSRKCPSLKRSEEWKYLGIQFTADGRARYNPTEDIGPRLDIISRSPLKPQQKLFALRTVLIPQLYHKLTLGSVAIGVLRKCDRLVRSVVRKWLDLPMDVSVAFFHAPHTSGGLGVPSVRRTAPMLRIQRLTNIKWPHLEQSETASSFLSAEIRRARDRCKASGDAALDTRLLIDSYWADRLHSSVDGSGLREAGRYAPQHGWVVAPTRLLTGKAYLNGIKLRINALPTRSRTTRGRHELERQCRAGCDAPESLNHILQKCHRTHGRRVARHNSVANYLKRGLETRGYSVIAEPSLQGENRIYKPDLVGFRPDHTIVIDAQVVTDGLDLDQAHQSKVEIYDRQDVRTALVRDYQAHEDIKIVSATLNWRGIWSYRSVKRLRALGVLNAGDSNIISTRVVDGGVCGFKTFMFHTGYRQGVG

SEQ ID NO: 431 - protein, 1069 aa, Rhopalosiphum padi
MLGSAAPPSVTGSFTNTLNNNNFMPRIATASQTAGGSNRVGADVVGTVTSATSAYKCRFCTKSFATKIGVGVHVSSAHVQNANDQIDVARSKARWPVEEQRLFAALEAELVFNNIPPGQINGQLYEKHRGRTHESIKGRRKTLKHREMVATHLACLKGVPNVPITDTVPVESNSSDARPLPTDDDGSAAVNDRSTTVDRLSPALEAGQKAVDLLSTVSGHGADKLLLAARRLVEQSLDPCHAIAAWYIDYNCKNSRKKTKKGRRPGTIPGAGICAGRRPNKKALKTACYRRNVTEWRKNASSVAERVLTGVDQGALMPPASEMTKYWVPIIEGNFESRPQTPAVSFDTHGTPQNATVFDVITPEEVSECLPSKTTAPGPDGFPARLWRRLPCNLTAGLFNLFVAYGSLPPILVKSRTVFVAKKGDPQCPGSYRPISIASVAIRHFHRILARRLEKLSLVDERQRAFRRADGVAENLFLLQSVLTDARSSCKGLCLASLDLSKAFDTVSHDSIASAMRRVGLDQRFVDYIRGTYQHSETFLQVGGQATRGLFPRSGVRQGDPLSPLLFNLVVDGGLQEIPEAVGYTLGDTVVNAIAFADDVILLAETPDGLRRACEAFTDRLSVAGLMANPQKCATLTLVPSGRDRKVKTVDEVYTLSGIDLPTLNVTSLWRYLGVGFAGSRIDAFDSAAYVTALNRISTEPMKAQMRLCIARDYLIPKFVHGLTFSVVSVRKLRSLAHETRRAVRRWLDLPTSCPNAYIHSPTSAGGLGIPDFVLFVPRNRVNRLVRLENSSLAAVREAFRLHGRTALASARRSTEGHRLKLSHAQQLHASVDGSELKACSSESASVAWLRRPDGIPSSDFKNYARIRINALPTRKRVNRGRNGLAHCRACFAPAETLAHVVQSCPRTHDGRILRHDCVAKRIAGGLHDKGYEIEREYLYKLHNGNLKPDIVATISDETRGRISVICDVQVVSGIGTALWHANKVEKYSDRVDLLSAIRARHHSTDVRTVAATLTWRGVWEPSSFQSLRALGLSRGLLEGLVTRVLKGTLSNWQTFNTKNDMTTRVGVG

SEQ ID NO: 432 - protein, 1119 aa, Acrocera orbiculus
MNYFLFICSVLEEVLITNILIIRTRENCSVMSASHGFTCPCGKNFTDIKGLRRHKVRICKIQVSHDTTCPKCKRTFLTYPGMRRHLSMTHNVHRDDISEISSSSSEEYFTCACNKTFASRPQLRQHQKRYCKGLQNLSEEDEFQCQICKHISSTWPGMRLHVKRNHPIEFNEELKTMSQNARHLWTESEENALAAIEASLDASKTTTEITAYLKGFSGRSLQAIRARRNKTSFKEKVKMFRRQIIEETLIEEQTSNASEEQGIIDNLKEFISHIPDTHFLETDISFRNQLLESDYDSKELLINEYAKTFTNMKKSNNKGPINRNTLQANLSKSKRNTRVFNFKRAQNLYKMDTKSYAANLLDGVDNNITTTTPNIIAIKEKYQEVFEKPSTEDETQILDFKTEKTIISTPIDIETIEIFRDKLKSSTPGIDGINKNQLRRIHSTRLALLMNAILLTGKLPMQFKVSRTILIPKKTKDLDKVNNWRPITIGSIVIRLLNKILSKRINDSIELHLAQRGFTKIDGCLANCFTLQNIIKSKRLKGQPLCIVSLDLSKAFDTVSHDSLNRALNRMNMDSLIKSYIMHSYENNTTSIKCGNLDCGVFKINRGVKQGDPLSPVLFNLVLDELLVLLNKEIGITIGNNTIGALAYADDLILCANTQQEVGILLQKTIDFLKSKGLEINLEKSLSLTFKSVPGKKQVFIDQDKYFKLNDNYLRALSSVEEFKYLGRSFGPEGLTKCNLTNLYHQLKLIKNAPLKPFQKMNILRTYLIPRYIDYCQNPRITAGILSEVDRKIRTSIKKILHMTTHCTNTLFYAPLNRGGLGIFCFRRMIPLILCKRINNLMESSPILKHTFQLDYRNIKRIRKLLMANITTKEEMKERLGMEFYKSFSGIGLQGAITPSFCNDFLINPPKYWNGKEYIKATLLRFNLLPCKGIPSNPPTERRCRARGCTTNESVCHILQHCPLTHWERINRHNFVVKNVINVAKQNKWDIKEEPHIRSNEGILYKPDILLTKANEVIIAEIGINWEGNVPLTDQYESKKQKYSAPQFLDKLKEQYPTKNISILPLIIGARGTWCHPNKYLVQKLGLTKIDTRKIIQTVLRGGWTIHEDFMRSVWRQRR

SEQ ID NO: 433 - protein, 1114 aa, Nemotelus nigrinus
MKIVGFNNQNSNNHNLRRRPRTAVIQQLGDFIPEQPRQLRANPVQAPGLNSLSSQEPMRVPRTVPPSVPEPEPPPAPHVCPECSRSFGSKIGLGVHRRRAHAEEVNQEVNVERTKKQWSSEEMRMMAREEALATIQGVRFINQHLVANLDSSRTLEAIKGIRRTTTYREIVAAALADLRAAPSTSGISSPSNTSRRQRSSSSSSSSSPSSFHSANESLDPLEASLHDLSLSARWSAMYGDIHVAVQALLPALHEISGYHKSSLTEVGECLLRGRDACDLLDSWFRLAFPSADRPSAPHPRGLPLRPPIGAPRHERRLFRRKEYSRMQDMFKKDMSRAAKEVLDGLNISVPPSMPVMESYWRTILTLPSRPYAASQQTSVSHSLQHTWLPVTCEETESVRVPLSSAPGPDGATARQWKAVPAVVKAFIFNSIMVSGTFPEPLLQSRTIFIPKKNNSDSPGDFRPISIPPIAVRHFHKILATRLREANMIDVRQRCMDDGCLENICVLASILENARSKLQEVHLCQLDFAKAFDSVSHEAIAGILGSRGLPTAFVDYVVGTYRRSTTKLEMNGQHSDVISVTRGVRQGDPLSSLIFCIVVDEVLRSLPSEIGFELEGQRVNALVYADDIILVASTESGMKSILQTTEEKAGLLGLSINSQKSAALSIIPDGKNKKYKILKDTQFHFGDGTPVTQLGPTDKWVYLGVDFRPQGLTRVGGKLETLLENISKAPLKPQQRLKIAKSFLMPRFHHKLILQGTTLKHLRAMDRQIRLSVRRWLRLPKDVPNAYFHAPIREGGLGLPAFELTVPSMMLHRLTSLNQSTFPAARAAFNAPFIRKRMEWAERVAFRAGTVLRSRSAVNKWWATALHTSVDGSDLRECIKSNLSSNWVDTPGSMIPGRDYIQYHHIRINTLPTRIRTSRGMRTPSRDITCRAGCTATETAVHIIQCCTRTHGGRVKRHDAICKVLGKSLRDKGWHVQAEPRFLTDQGLRKPDLVCKKDGRICVVDAQVVSGSTSIDAAHQRKVDYYQNNGDITTSLMREHNVPRDSITFTSCTISWRGIWSKKSATDLVLLGLSTKLLSSLTTRVLQGSHTNWSRFNTMTDHAFGREGRGRAGVG

SEQ ID NO: 434 - protein, 1084 aa, Acrocera orbiculus
MNYFLFICSVLEEVLITNILIIRTRENCSVMSASHGFTCPWYAQVCMRRHLSMTHNVHRDDISEISSSSSEEYFTCACNKTFASRPQLRQHQKRYCKGLQNLSEEDEFQCQICKHISSTWPGMRLHVKRNHPIEFNEELKTMSQNARHLWTESEENALAAIEASLDASKTTTEITAYLKGFSGRSLQAIRARRNKTSFKEKVKMFRRQIIEETLIEEQTSNASEEQGIIDNLKEFISHIPDTHFLETDISFRNQLLESDYDSKELLINEYAKTFTNMKKSNNKGPINRNTLQANLSKSKRNTRVFNFKRAQNLYKMDTKSYAANLLDGVDNNITTTTPNIIAIKEKYQEVFEKPSTEDETQILDFKTEKTIISTPIDIETIEIFRDKLKSSTPGIDGINKNQLRRIHSTRLALLMNAILLTGKLPMQFKVSRTILIPKKTKDLDKVNNWRPITIGSIVIRLLNKILSKRINDSIELHLAQRGFTKIDGCLANCFTLQNIIKSKRLKGQPLCIVSLDLSKAFDTVSHDSLNRALNRMNMDSLIKSYIMHSYENNTTSIKCGNLDCGVFKINRGVKQGDPLSPVLFNLVLDELLVLLNKEIGITIGNNTIGALAYADDLILCANTQQEVGILLQKTIDFLKSKGLEINLEKSLSLTFKSVPGKKQVFIDQDKYFKLNDNYLRALSSVEEFKYLGRSFGPEGLTKCNLTNLYHQLKLIKNAPLKPFQKMNILRTYLIPRYIDYCQNPRITAGILSEVDRKIRTSIKKILHMTTHCTNTLFYAPLNRGGLGIFCFRRMIPLILCKRINNLMESSPILKHTFQLDYRNIKRIRKLLMANITTKEEMKERLGMEFYKSFSGIGLQGAITPSFCNDFLINPPKYWNGKEYIKATLLRFNLLPCKGIPSNPPTERRCRARGCTTNESVCHILQHCPLTHWERINRHNFVVKNVINVAKQNKWDIKEEPHIRSNEGILYKPDILLTKANEVIIAEIGINWEGNVPLTDQYESKKQKYSAPQFLDKLKEQYPTKNISILPLIIGARGTWCHPNKYLVQKLGLTKIDTRKIIQTVLRGGWTIHEDFMRSVWRQRR

SEQ ID NO: 435 - protein, 1020 aa, Chlorops oryzae
MGANTNTNINTGLDNPRLEVAASSHQVTMREERESGIDGYKCRFCVRSFPTKSGRGVHERRKHPDGLDEERLSAQRIVKARWSEEELRILASAEADLVRDGTRFINLELGKIFPNRSVEAIKKARQKEVYKGYVQAKLTGTPPVQDIRPEVDSPDDTFLTQMQQISLSPSSTNDALLELIEHAERLGKDETLARLASLLARLFQSGTRRPRARVVAGDDLNPGQPTRRRAPNRRQRRRMEYARVQRNFQKHQGRCIKNILEGIHDVVEPPRNIMEPYWRAIMEQTSFESPSNEQMQNPGTANAIWYPIRCSEVHKLDVSTSPGPDGIKASDLNNIARETLGTILTILMWCGKLPPAHRGSRTIFIPKKGDSSEPGNFRPITIPSVLARMLNSILAKRILESFVFDSRQRGFIRSDGCADNTTLLDMLLRDHHQTYATCHIACLDISKAFDSVSHNSIEVVLKDYGFPCEFIAYVGEILSNSPTVLCGKGWVSDALIPGRGVKQGDPLSPLLFNIVVNRLLETLPKDVGSNIGDYRLNAMAFADDLILVGKTPKGLEMLLDFTHDYLKSCGMAINSSKSLTISIEANAKRKITMINSTRVFKIGQSVIPSLKRTDEWRYLGVTFTPEGKTLFRPKDELIPKLTGLQRAPLKPQQRLHALKTIVIPQLYHKITLGNIKIGCLNKADKFIRNTVRMWLRLPSDSPIAYFHAPVSHGGLGIPALRWVGPMLRVKRLTNLKMPCLDTCVRANTLVASEIQRAERRLLINGSALRSRQDIDKMWANRLWSTVDGHGLSDCHYFPQANRWIREPTRLLSGRDYINSIKLRINALPTRSRTSRGRPSIDRQCRAGCNGPETLNHILQQCHRTHNSRIARHDAIVKYMKRSLDTKGYSTEIEPRLQLPNGTILKPDIVASKDRNVWIIDAQVRTECNLDEADLNKARKYDREDLKVLLRSRCDAVDINSYAVTLNWRGVWSKRSAQKLLNAKMISKQDLAIISTRVIVGGIAIWNIFNRTTSFVPAGIG

SEQ ID NO: 436 - protein, 1146 aa, Andrena bucephala
MFSSNEDEVASDAGIPGPGISVADLSAADRRAIVDDLDHENGHDFSQTVGLPLDGPIRCAGCQKEGRNKQFLSEKDFNTHAAESHRKMVVQWECQECGKKYLRIHQLKCHLPKCKGAVEDTVGEFRCSMCDTAFGTQRGLSTHERHRHPTLRNEKRKGAGGAGPAAAKKGRKATVWSEEETALLRELDRLHGGSTRVNVRIREHLPGKTLKQISDKRRQLKPREDEVGCAASEESGTEEAVHSLEEEVPARPDSGDSSQVPALSRAWREIMKEAISAPGPENVEWASIARSIEMLAIDEEASNEQLEGVVGEVFSVLLGNVPATRPRENRGRTGPQNAGSEGARFSRRTRRRRFRYNRYQELYKKCPRKLADLAIMGSNTDQVDLEVRYPQTEEIERLYTALWGKEGPSDVNLHSGGGVAGTVPTGEVWVPVGANEIIRRIAKMKPGTAAGPDGIKKTHIKRVGAVQVLAKLFNLLLLKGYYPKQWKANRTTLIPKPGKDTKDARNWRPITIGSLIGRLLSNMIDSRIRDNVSLSQRQKGFMKDNGCKHNVAIMKSVLDRMKKTKGGVLTVVDISKAFDTVPHASLVASLAAKGMPDEVTSYIREMYNGCHTTIKGSQGGSINITLLRGVKQGDPLSPLLFNTVIDPIVSQIENTTKGVDLNDNNVAVLAFADDLVLIGQDRKEAVRQTKMLAKYLEDLGMELSIAKCATIEVVSKNKTWFLKDPEITVGTDRIPTLGPEETTRYLGITLNPWSGLKVDRERLKEVTRAASAIAHMGLKPHQKVDVIRTYLLPRVIYELVTSPPPIKVLKELDHEIKQVVKNILKLHPSTTDGIIYSMKSHGGVGLQRIEDIVKLAVIRNGLKMLDSTDDVVQEALKEERGIIEKYAKSLNLSWPTTMVKIEEARRESKKRDTEKWRQLISQGQGVADFSHDRIGNAWLYNPTLLKPSRYLDALKLRTNTFGTKVALSRASKSMDVACRRCKVQAETLGHVIGNCTHTKPMRMRRHDEIKDFIGNRMATKHAVFVEPTVNVLGELRKPDLVIKDQERLLILDVTVRYEMNDNLRKAYREKVSKYKETLEYIRIKTNSREGRVLPIVVGARGAMPTQTQENLMSLGFRKEDMVTISMIALRSSLEMANAFIDYDHIR

SEQ ID NO: 437 - protein, 1266 aa, Acridotheres tristis
MVQLLALRYVSIATQTDPLDLWVQKAIIPSVPPAIHKDEGFDLMSLEFMNSSYLDKGGLHLDIGQAGLADFPEPYETLPIGLTQELNSECRVSEIGEPNTPVALHRTNKGGPLLQTPVLSIKDKDLACPSCDIRFTTMSGIVEHLLISHGQKKIIFQCPKCGKQDLNCHSVQCHFPRCKGKVNVVPTGDWTCEVCQKSFNSKIGLGQHKRLMHPSVRNKERIEASHPKETSQRGAHNKVWSESEVALLRQLVTEYAGCKNMNQKIAERIPTKTAKQISDKKRYLVQTTSKHTQKVEDNKEVHEVNARTEVHKVNSGTKVQEEVPQKVELLGENKLKLHYHDAIREKLAARELPNCRKAFKKVLKGKDPQKAVNKIYKEVLDNPVSNCHDKKSSRKAKSRKGRNHNTSESTKWMHRRAVKRGKYLRFQKMFHLQRGRLARIILDDVEALQCQIPSNTVHAAFKSRWETTVGFRSLDSFPPHGKADNTAFQALITRKEIERNIKEMSKRSAPGPDKITLGHLLKRDPKFSLLMEIFNLWLVSGTIPDTLRGCRTVLIPKSSDAAKLGDINNWRPITISSTVLRLFSRIITARLAKACPINPRQKGFIRASGCSENLKLLQLVLKHAKREHCNLGVVFVDIAKAFDTVSHQHIITGLEQRGVDPHIIHLIKDMYKNTTTYITMKNEQTERINILSGVKQGDPMSPLLFNLALDPLLCKLEKEGKGFQRGKLKVTAMAFADDLVLLSDSWDGMCENIKILETFCDLTGLQTQGKKCHGFYIRPTKDSYTINDCPTWLIKGSPLNMIDPGSSEKYLGVQVDPWTGFADPGLSQKLEGWLRRIGEAPLKPLQKIDILRSYTIPRLMYLADHTESKAGPLESLDSNIRNAVKDWLHLPPCTCDAILYSSCRDGGLGIIKLAALIPSVQARRLHRLAQTSDRALREFLKGENLQALYEKLWIRAGGVKEAMPSIWERSTLMTIVTGNPDLSEWEVPAPKMHYPKPSNWRKTEFKKWKKLASQGHGIEVFEEDTISNNWLKNYRGVPHRKLITGLQLRANVYPTREFLARGREGSCARSCRHCNAEYESAAHIIGTCPITQDARIKRHNSICDTLSAEAKKCGWTVFQEPHIRDDNNELFKPDLIFVKDSKAFVLDVTVRYEHDKRSLKRAAEEKVTKYQHLLPQVQDLTNAADVEFVGFPIGARGKWYPNNSDVLQALGLSKSRLGKTERALALRALSSSVDIVHMFASKARSVVPVLSNKVVGPSPPVGCAGQ

SEQ ID NO: 438 - protein, 1342 aa, Acrocephalus scirpaceus
MPPNSDNTIPLTMEKLLPLSGPPVRLCRRSISTQTSISDFYKTDIVPPDIPPKPPDPAENKIDCLVNLEFYRSDFSATNCVYFSVNWEGLSGFPEVYEQLAPQTTAGEKICPTRDGEVPVLEEGERNTEGEEERKTEGEKEKAETPPSDPVTTASPAPPASPITSNKQTPEDITMVTVPDKNPPCPHCGIRMNCVSGLIEHLWGVHGRKRVCFRCAKCGKENNNCHSVICHFSKCRGKVEESAPAGEWICEVCGRDFTTKIGLGQHKRLAHPAVRNQERVAASHPKPTSNRGAHKKCWTEEEEKLLIELEAQFEGHKNINKLIAEHIPTKTAKQISDKRRLLPKKDVVDLSDTEKGPYQRTRRAAARGKTMEEISSHPDKANGQQETPSKGRGPRTRRTAAGGRTKDKISPHPDKDNGEQMPGNQREVQLQAHYQETIGAWLSAGKIKTFSGAFKQLLGKQEIQVTVNQSTQDCFRNLEPKSKLKTINQEKTDKGPTRPPQKWMKKRAVKRGNYLRFQRLFHLHRGKLAKIILDDVECLTCDIPPSEIYSVFKARWETPGKFESLGNFKITGKADNSAFRDLITAKEIEKNIQEMSKGSAPGPDGITLGDIRKMDPKYSRITEIFNLWLTSGKIPDMVRGCRTVLIPKSTKPERLKDINNWRPITIGSSLLRLFSRILTARMTKACPLNPRQKGFIQAAGCSENLKLLQTIIWSAKREHRPLGVVFVDIAKAFDTVSHQHILHGLQQRGVDPHIVNLVRNMYENIYTHITTKRTQTDRIQIRVGVKQGDPMSPFLFNLAMDPLLCELEERGKGHHRGSSCITAMAFADDLVLLSDSWEDMKKNIKILEDFCELTGLKTQGEKCHGFYIKPTKDSYTVNDCAAWIINGTPLKMIQPGESEKYLGLQIDPWTGIAKSNISTNLDSWLERIDRAPLKPLQKIDLLKTYTIPRLTYLADHSDLKAGFLETLDQKIRTTVKEWLHLPSCTCDAILYSSTKDGGLGITKLAKLIPSVQARRLHRIAQSSDETMKMFLDRDQMELMHKKLWIQAGGDKEKIPEIWETKPTIEPPTSHDTDTTSEWEAPTLKSKFPKPCNWRKVEFSKWTSLVSQGRGIVNFKGDQISNHWIKYYRSIPHRKLLTALQLRANVYPTREFLARGRQDKCTKTCRHCEADNESCAHIIGNCPITQDARIKRHNYICGVLSEEARKLDWLVFQEPHIRDTNKDLYKPDLIFVKDTRALVVDVTVRYESDKTSLEHAAAEKVDKYKHLTKEVQRLTNAKDITFIGFPIGARGKWYHKNFELLETLGLSKHDQIQTARSLSCTALMSSVDIVHIFASKARTCTIL

SEQ ID NO: 439 - protein, 1438 aa, Agelaius tricolor
MAYCLKPGPPVSDRGMEFGNGLTTHSVLTVECGPNSMVIPDPSFGGGVWGPPVRLSRVSVGTQTSPSDWVDLLSRGLPGARSNSQRVDLVSLFPRHRVDLLSKTQRVDLLSESQRVDLLSKRQRVDLLSDSQRVDLLSKTHRVDLLSKTDRVDLVSQIDLTSKTTNLAENELDLLVNFSLELYRSDLHVHEGVHFSVDWEVLNRLPEVYEELAPQPCVGENLDSSPPQDSEPLVLGEGSGGKAGEGTPEALPPVPGENGGQSPDNIVKVTVPDKNPPCPCCGTRVNSVVSLLEHLKGSHGKKRVRFRCAKCGKENVNYHSVICHFPKCKGAEIEKVPAGEWICEVCGRDFTTKIGLGQHKRLAHPLIRNQERIVASQPKETSNRGAHKRCWTKEEEELLIKLEAQFEGNKNINKLIAEHITTKTAKQISDKRRLLPKKLPEVTDKEPGVCLRTRRAAGSVGTEPGTSQQSQAGILDNGPGKCHLPGRPAAGEKTMEKLRRHPDKDNGRQKTSGQRREGLLQAHYQKTIKEGLSAGAINNFPGAFKQLMDGREMRTMINQTAQDCFGCLESISQIRTAMRGKNSGKKATMEQPARKFQKWMKDRAIKKGNFLRFQRLFHLDRGKLAKIILDDIECLSCDISPSEIYSVFKARWETPGNFAGLGDFKITGKADNNAFKDLITAKEIERNVQEMSKGSAPGPDGITLGDIVKMDPGYSRTAELFNLWLTSGEIPDMVRGCRSVLIPKSTKPERLKDINNWRPITIGSILLRLFSRIVTARLSKACPLNPRQRGFIRAAGCSENLKLLQTIIRTAKSEHKPLGVVFVDIAKAFDTVSHQHILHALQQRGVDPHIIGLVNNMYKDISTYVTTKRDTHTDKIQIRVGVKQGDPLSPLLFNLAMDPLLCKLEESGKGFHRGESSITAMAFADDLVLLSDSWENMQTNIKILETFCDLTGLKTQGEKCHGFYIKPTKDSYTINNCAAWTINGTPLNMINPGESEKYLGLQFDPWTGLAKTNLTTKLEFWLERIDQAPLKPLQKLDILKTYTIPRLTYLADHSEIKAGALEALDQKIRTAVKDWLHLPPCTCDAILYSSTKDGGLGVTKLAGLIPSVQARRLHRIAQSSDETMKEFLEKDQMEQLYRKLWVQAGGEREEIPSIWEALPTSEQSNRGDTTSEWEAPILKPKFPKPCDWRKKEFEKWTKLVSQGRGISSFKNDSISNDWLQYYRRIPHRKLITALQLRANVYPTREFLSRGREENSTKACRHCNVENETCAHIIGQCPVTKDARIKRHNHICDMLSEEARKKDWVVFKEPYIRDTTKELYKPDLIFVKDGHAFVVDVTVRYETTTTSLEEAAAEKVNKYKHLETEVRNLTNAKDVVFMGFPLGARGKWYTGNFELLNTLGLSKSRQVRVAKTLSTVALLSSVDIVHMFASRARRVQDSG

SEQ ID NO: 440 - protein, 1337 aa, Ammodramus caudacutus
MAPRSDGGTGSGSGLTTHPAPESESGHDSTVPNPGPVLAAGDGARPVLLVSVGTQTCKEDFITSRPTKLIGNESELGLLVNFSLEVYRSDLKGDVQFEGVHFPDNWGVLDGFPEVYEQLAPQTGEGDGLKPSLQGDSEGDVLEKGSSEKGREKEKEKEEEKEKEVTPEALPPKRKAHSEQSQDNIVKVTVPDKNPPCPCCGVRLNSVLALIEHLKGHGKRRVCFRCAKCGRENFNHHSTVCHFAKCKGPQTERPPVGEWICEVCGRDFTTKIGLGQHKRHMHAMERNQERIDASQPKETSNRGAHKRCWTKEEEELLMKLEVQFESHKNINKLIAEHLTTKTAKQISDKRRMLLKKGRVTAGNLDSEPGMNHQPQAEVKDNELGGCHLPGGPAVDKGTIGKLGQHLESGNGHQETAGQKKERGLQARYRRRIMKRLAAGTINIFPKVFKELLNCQEARPLINQTTEECFGLLDSACQIRTALRDKGRAQEERPRKQYQKWMKERAIKRGNYLRFQRLFHLDRGKLARIILDNTESLSCEIPPSEIYSVFKARWETPGQFNGLGDFEIKGKANNKAFRDLITAKEIEKNVREMSKGSAPGPDGIALGDIRKMDPGYSRTAELFNLWLTSGDIPDMVRGCRTVLIPKSTTPERLKDINNWRPITIGSILLRLFSRIITARMTKACPLNPRQRGFISAPGCSENLKLLQSIIRTAKSEHRPLGVIFVDIAKAFDTVSHQHIIHVLQQRRVDPHIVGLVNNMYNDISTRITTKKDAHTDKIQIRVGVKQGDPLSPLLFNLAMDPLLCKLEESGKGFHRGQSSITAMAFADDLVLLSDSWENMKENIRILETFCDLTGLKTQGQKCHGFYIKPTKDSYTVNNCPAWTINGTPLNMINPGESEKYLGLQIDPWTGIAKYDLSTKLKAWLESIDRAPLKPLQKLDILKTYTIPRLTYLADHSEMKAGALEALDQQIRTAVKDWLHLPSCTCDAILYVSTRDGGLGVTKLAGLIPSIQARRLHRIAQSPDQTMKDFLEKAQMEKMYEKLWIQAGGKKKGMPSIWEAPPATVPPVNAGTLSEWEAPNPKSRYPKPCDWRRKELKKWTKLESQGRGVKNFRNDSISNDWIQCYRRIPHRKLLTAIQLRANVYPTREFLGRGRGDDCVKFCRHCEMDLESCGHIIGFCPVTKDARIKRHNRICDRLCDEAIKRDWVVFKEPHLKDATRELFKPDLIFVKEGRALVVDVTVRYEAAKTTLEAAAAEKVDKYKHLEPEVKSLTNATDVVFMGFPLGARGKFYKGNFDLLETLGLPKTRQISVAKTLSTYALTSSVDIVHMFVSKARKSNV

SEQ ID NO: 441 - protein, 1337 aa, Ammospiza nelsoni
MAPRSDGGTGSGSGLTTHPAPESESGHDSTVPNPGPVLAAGDGARPVLLVSVGTQTCKEDFITSRPTKLIGNESELGLLVNFSLEVYRSDLKGDVQFEGVHFPDNWGVLDGFPEVYEQLAPQTGEGDGLKPSLQGDSEGDVLEKGSSEKGKEKEKEKEGEKEKEVTPEALPPKRKAHSEQSQDNIVKVTVPDKNPPCPCCGVRLNSVLALIEHLKGHGKRRVCFRCAKCGRENFNHHSTVCHFAKCKGPQTERPPVGEWICEVCGRDFTTKIGLGQHKRHMHAMERNQERIDASQPKETSNRGAHKRCWTKEEEELLMKLEVQFESHKNINKLIAEHLTTKTAKQISDKRRMLLKKGRVTAGNLDSEPGMNHQPQAEVKDNELGGCHLPGGPAVDKGTIGKLGQHLESGNGHQETAGQKKERGLQARYRRRIMKRLAAGTINIFPKVFKELLNCQEARPLINQTTEECFGLLDSACQIRTALRDKGRAQEERPRKQYQKWMKERAIKRGNYLRFQRLFHLDRGKLARIILDNTESLSCEIPPSEIYSVFKARWETPGQFNGLGDFEIKGKANNKAFRDLITAKEIEKNVREMSKGSAPGPDGIALGDIRKMDPGYSRTAELFNLWLTSGDIPDMVRGCRTVLIPKSTTPERLKDINNWRPITIGSILLRLFSRIITARMTKACPLNPRQRGFISAPGCSENLKLLQSIIRTAKSEHRPLGVIFVDIAKAFDTVSHQHIIHVLQQRRVDPHIVGLVNNMYNDISTRITTKKDTHTDKIQIRVGVKQGDPLSPLLFNLAMDPLLCKLEESGKGFHRGQSSITAMAFADDLVLLSDSWENMKENIRILETFCDLTGLKTQGQKCHGFYIKPTKDSYTVNNCPAWTINGTPLNMINPGESEKYLGLQIDPWTGIAKYDLSTKLKAWLESIDRAPLKPLQKLDILKTYTIPRLTYLADHSEMKAGALEALDQQIRTAVKDWLHLPSCTCDAILYVSTRDGGLGVTKLAGLIPSVQARRLHRIAQSPDQTMKDFLEKAQMEKMYEKLWIQAGGKKKGMPSIWEAPPATVPPVNAGTLSEWEAPNPKSRYPKPCDWRRKELKKWTKLESQGRGVKNFRNDTISNDWIQCYRRIPHRKLLTAIQLRANVYPTREFLGRGRGDDCVKFCRHCEMDLESCGHIIGFCPVTKDARIKRHNRICDRLCDEAIKRDWVVFKEPHLKDATRELFKPDLIFVKEGRALVVDVTVRYEAAKTTLEAAAAEKVDKYKHLEPEVKSLTNATDVVFMGFPLGARGKFYKGNFDLLETLGLPKTRQISVAKTLSTYALTSSVDIVHMFVSKARKSNV

SEQ ID NO: 442 - protein, 1197 aa, Aquila africana
MLKSHDSCLDPSGMQDDSNNDIHTGGRHEIPAVPFVCTCGMQFGTQRSLSMHRFHRHQDELNAERVAALPTRKLVWSREEDLALIRQAETLWQEVMLKKDLYQRLLPLFPGRSVEALKKRLQILKWRPVDNRGSGQTTAAVPPTSVDVPNLPPGAPIVGMPDAIPSFRTVTAPARLWSMEEDDILRKNADAFHGSAKTKKELGQRLMLYLPGRSADAILKRLRTIKWAPPKLTSKVPTPLTTLTASETSTSSVMHTSLSVASLATGAPILDGKMMTVPVTSEVALGISRSPARAAADFASQATPYDPVVLPIDSSPRRNGVMKSASSEATEIDLSLQLLWRDRLLRLVINTLREQRLGSDELRIIAQDLLSGETSLQQAGILLQGHAQRWFPHKWRPSVVRTPPLIKSWSKNKIRRSNYAIIQRLYATRPKDAASTVFSGNWRDAYRGSAHLPSEMDSYWSSIFETPSSTDDRISFPLSELQWSLMEPIAPSEVTAALRGMGSTAPGLDRISAVDLLSWHQPSVAAYFNLLLATESPPQHLACSRVTFLPKTSNPTLPGDYRPISVASVLLRAFHKIMALRLQDSVNISPLQHAFQQRDGCLEATTLLHSIFRLIHTKQVPCAMVFLDVSKAFDTVSHQTLFRVAADAGLPPPLISYLRNLYGSATVKMTNRFVHCGRGVRQGDPLSPILFLLVIDEILKSCLPQVGFDFDGHLIGSLAYADDLVLLARTPARLQEKLDCLNDALRRAGMSLNVKKSFGMTIAKAGKQKHMVLLPKPYIVSSDSIYPLGPTETVNYLGLQFNWKGRVSVKHTGKLERLLCELTQAPLKPYQRLDLLKRFLVPKLTYELVLGTAHRNTLLKLDRLIRSSIRCWLRLPPDTPTAYFYAPIKSGGMGVPCFGTSIPLLQRARLAKLAENSGQLYKTLLIQSFFRSLQQRVEKPCRLNSVVVSSKIEVKGEWTTLLHQSVDGRELGAAGIDPASHGWLLQPSGVFPRLYLRGLQLRGGLLSTKSRNARGVCRQVTDKSCKGSCRMVETINHILQVCEITHDARCARHNRVVQLLEKSLRLHCVRTWVEPIIPSVSSFLKPDLILETNDNFWVLDVSVVSGHRLQTTWDLKTAKYGSPDRVADIAVWTDKPFPIHQLPVIISNRGLILKASSAGLRTLGLSRRDIMDLCLLAIRGSLKCYDMYMRGTWTGCK

SEQ ID NO: 443 - protein, 1024 aa, Buteo platypterus
MHIFFSPGPPGLSDSSDRDGNANSTGTQSEANNPSFPCFCGAQFKTKRGLGKHQSYRHPAQVNAERVKALPTKRLTWSHEDDEALRRLANNIWKDGMMKKVLITNLTPYFPGRSHEAIKKRLQVITWSPERAEHPTVRETPDTNPVERDTPGTTDPVTHGPDPSASWRDALLRAAAEHLTESNMGAEELTQIARDLQNGVSRKRIRTRLNQHAEKYFPHKWKPSVIRPKKTIASSKKAIRRANYATVQKLYKLRQRDAASTVLSGRWRSAYKGPAPIPQGMEEYWRSVFETPSAADNSVPVVPSTVLWSLMEPIAPSEVTAALHGMKASAPGLDRISAEELLTWDQPSLAAYYNVLLAVGGPPKHISCSRVVFLPKTEDPSAPGDYRPISIASTILRAMHKILAWRLRDTLQLSPLQHAFLQRDGCLEASTLLHTIFRGVHTDRVPCAMLFLDVAKAFDTVSHMSLFRVAREAGLPRPMVSYLRHLYQESTIQLAEATTQCGRGVRQGDPLSPLLFIMVMDDIIKSSLPDIGFDLNGQKIGSLAYADDLVLLAGNPSRLQEKLNLLSEGLQRAGMALNAKKSHGITIARDGKRKCMALVPEAYKCKGDNIQPLGTDDSVKYLGLQFNWKGRITPKHTGKLATMLNELTKAPLKPHQRLKLLKIHLVPKLTHELVLGHAHRNTLKKLDCLTRAAVRRWLRLPPDTPVGYFHANVKDGGLGMPCFSTSIPLLQQKRLEKIALSPASLFQEVQRQDSFRTLGRRIERPCRLNGLEVATKAEVREGWRIALSSSVDGRELSIPKVDKASHEWLRNPARVFPRLYIRGIQLRCGLLPTKARSARGNNRQVTDRTCRGACRAPETLNHVLQVCEVTHDARCARHNRVLRSLEKLLSRAGIQTRVEPIIPSGASFIKPDLIAEMENQLWVLDVSVVAGYRLEESWEIKSAKYGRPDRVADIRRWAAVPDTTPVFQLPVIISNRGLFYEPSGKKLRALGLSCRDIMDLCVLAIGGSLKCYDWYTRGTKDWKC

SEQ ID NO: 444 - protein, 1417 aa, Chamaetylas choloensis
MEPLGIASSTVSCQKFGETNSSVKSRVASLPETWPPGFKGAMSPVSGLTTHYRSTFQGGPIPMGSGSDLGGGVWFRAPARLSRVSVGSQTSPSDWVDLLSWNFNFLPGSKSNSQRVDLLSRHWVDLLSKNDQVDLVAQNLPSKLSPDSAENELALLVNLEFYRSDLHEHEGVHFSANWEGLSGLPEVYEQLAPQPCAGDSSHSSLPRDTKLFVLEQKGSVEKESEDVPKTSPPTPGKPGERTPEETVTVTVPDKNPPCPCCGTRLNSVLGLIEHLKGSHGKKRVCFRCVKCGKEGTNYHSIVCHFPKCRGAETEAAPAGEWICEVCGRDFQTKIGLGQHKRHAHPLIRNQERIAASHPKETSNRGAHKRCWTKEEEEMLIKLEAQFEGHKNINKLIAEHITSKTAKQISDKRRLLPRKPDKDLEEEPAVSTRTRRAAAGLRKEPGVSHQSQATIEDNGPGRSHRPGKPAAGKKTMDEISHRPDKGNGRRGTIKQQMAGQLQAHYHRTLGERLSAGAINTFPRAFKQLMEGQEMQETINQSAQDCFGCLESISQIRTATRDKINKGTREKQPKRPFQKWMKDRAIRKGDYLRFQRLFHLDRGKLAKIILDDVETLSCDIPPSEIYSVFKDRWETPGNFNSLGEFQSNGKADNSAFRDLITAKEIEKNVQEMSKGSAPGPDGITLGDVKKMDPEYSRTAEIFNLWLTSGKIPDMVRGCRTVLIPKSTEPERLKDPNNWRPITIGSILLRLFSRIVTARLSKACPLNPRQRGFIRAAGCSENLKLLQSVMRSAKKEHRPLGVVFVDIAKAFDTISHQHIIHALQQREVDPHIIGLVSNMYKDTSTYITVKKNTHTDEIHFRVGVKQGDPMSPLLFNLAMDPLLCKLEESGKGYHRGRSSITAMAFADDLVLLSDSWENMETNIKILETFCNLTGLKTQGVKCHGYYIKPTKDSYTVNDCAAWTINGTPLNMIDPGETEKYLGLQIDPWTGIAKSNLSTKLEYWLQRIDQAPLKPLQKVDILKTYTIPRMTYLADHSDLKAGFLESLDQKIRTTVKDWLHLPSCTCDAILYSSTKDGGLGITKLAGLIPSVQARRLHRIAQSSDETMKMFLEKDQMEQMHKKLWIQAGGDREKIPSIWDAPPVSEPSNSASTISEWEAPSLKTKFPKPCNWRKNEFKNWTKLVSQGRGIINFEGDKISNHWLQYYRSIPHRKLLTALQLRANVYPTREFLARGRQDKYIKACRHCDADIESCAHIIGNCPVTQDARIKRHNYICEVLLEEAKKKGWVVFQEPHIRDTTKELYKPDLIFVKDARALVVDVTVRYEAAKTSLEDAAAEKVNKYKHLETEVRNLTNAKDVAFMGFPLGARGKWHQKNFELLEALGLSKSRQEKIARTLSTTALLSSVDIVRMFASRARKLGNQE

SEQ ID NO: 445 - protein, 1230 aa, Chamaetylas fuelleborni
MIQPLSLRYISTATQTDPLDLRVPEAEIPSIPPTSSTEGFELVCLEFVNSSYSEEIGFHLETIWEGLASLPEPYETLPLRLVQRDESECVETVVEELKTPEALPGPSGDRTPVGTPVVSVPDKNPACPRCATRFTRMLGLIDHLKRNHGQKKIWFKCSKCGKQNLKYHSIACHFPRCKGEVCVVPTGDWVCEVCQRSFTTKIGLGQHKRLMHPLVRNLERIEASHPKVSSLRGAHKKVWTEEEEALLSQLVVAYAGRKNINQLIMEHIPSKTAKQISDKRRLLMKAPSKRDRSEEEGAGKEELPQGADLPQEGQLKLQYSDAIKRKLAACEFTSCQEAFAKIRDGQDPQTVVNEVYEKFFGSPRGLSQNVKSSRGRKSQKGQKASGKTTNWMRKRAKKKGKYLRYQRLFHLHRGRLARIILDNIEAIQCQIPSNIVHAAFKARWETSVGFKGLESFPPHGKADNTAFQALITEKEVEKNLKEMAKTSAPGPDGITLGQLLIKDPKFSLLTEIFNLWLVTGTIPDLLRDCRTVLIPKSTDLEKVGDINNWRPITIASTVLRLFSRIVTARLTRACPINPRQRGFIRASGCSENLKLLQLVVRHAKREHCDLGVVFVDIAKAFDTISHEHIIMGLMQRGVDPHVIQLVIDLYKNISTYIDLKSGKTDPIKILRGVKQGDPMSPILFNLALDPLLCKLEKDGYGFQRGRLKLTAMAFADDLVLLSDSWDGMCSNIKILETFCELTGLQTKGEKCHGFYIKPTKDAYTINDCPAWIVNGSPLNMIDPGNSEKYLGVQIDPWTGFADSGLSKKLEEWLQRIGDAPLKPLQKVDILRTYTIPRLIYLADHTEVKSGPLESLDLIVRNEVKVWLHLPPSTCDAILYSRCKDGGLGVIKLSALVPSIQARRLHRLAQSSDETLVEFLKGEHLELLYEKLWVRAGGEKESIPTIWEPIPVDESVGSGGEGLSDWEAPVPKVRYPRPCNWRKVEFNRWKRLAAQGHGIENFENDNISNGWLIQYRGIPHRKLITALQLRANVYPTREFLARGRGDVYARSCRHCGADYETTAHIIGSCPITKEARIKRHNSICETLSNEAKREGWSVFQEPHIRDEKQELFKPDLIFIKGNKALVVDVTVRYEHNNSSLKEAAAEKAKKYQCLVHQIKDLTNAAEIEFVGFPIGARGKWYEKNSELLTALGLSKTRLGKTARALASRALLTSVDIVHIFASKARTVVSNK

SEQ ID NO: 446 - protein, 1417 aa, Cichladusa arquata
MEPLGIASSTDSCQKPGETNFSVKSRVASLPETWPPGFIGAMSPVSGLTTHYRSTFHGGPIPMGSGSDLGGGVWFRAPVRLSRVSVGSQTSPSDWVDLLSWNFNFLPGSKSNAQWVDLVSRHGVDLLSKNDQVDLATQNLPSKLSPDLAENELALLANLEFYRSDLHVHEGVHFSANWEGLSGLPEVYEQLAPQPCVGDSSRASLPRDTKLFVPEQRSSEEKESEDAPKTFPPTPEKPGERTPEETVTVTVPDKNPPCPCCGTRVNSVLGLIEHLKGSHGKKRVCFRCVKCGKEGTNYHSIVCHFPKCRGAETEAAPAGEWICEVCGRDFQTKIGLGQHKRHAHPSIRNQERIAASHPKETSNRGAHKRCWTKEEEEMLIKLEMQFEGHKNINKLIAEHITTKTAKQISDKRRLLPRKPDKDIEEEPAVSTRTRRAAAGLRKEPGVSHQSQAAVENNGPGRSQLPGKPAAGKKTMDEISHRPDKGNGRRGTIKQQMAGQLQAHYHRTLGERLSAGAINTFPRAFKQLMEGQEMQETINQSAQDCFGCLESVSQIRTATRDKINKGTREKQPKRPFQKWMKDRAIKKGDYLRFQRLFHLDRGKLAKIILDNIETLSCDIPPSEIYSVFKDRWETPGNFKSLGDFQINGKADNSAFRDLITAKEIEKNVQEMSKGSAPGPDGITLGDIKKMDPEYSRTAEIFNLWLTSGKIPDMLRGCRTVLIPKSTEPERLKDPNNWRPITIGSILLRLFSRIITARLSKACPLNPRQRGFIRAAGCSENLKLLQSVMRSAKKEHRPLGVVFVDIAKAFDTISHQHIIHALQQREVDPHIIGLVSNMYKDTSTYITVKKNTHTDRIHFRVGVKQGDPMSPLLFNLAMDPLLFKLEESGKGYHQGRSSITAMAFADDLVLLSDSWENMKTNIKILETFCNLTGLKTQGVKCHGYYIKPTKDSYTVNDCAAWTINGTPLNMIDPGETEKYLGLQIDPWTGIAKSNLSTKLEYWLQRIDQAPLKPLQKVDILKTYTIPRMTYLADHSELKAGFLESLDQKIRTTVKDWLHLPSCTCDAILYSSTKDGGLGITKLAGLIPSVQARRLHRIAQSSDETMKMFLEKDQMEQMHKKLWIQAGGDREKIPSIWDAPPVSEPSNSASTISEWEAPSLKTKFPKPCNWRKNEFKNWTKLVSQGRGIINFEGDKISNHWLQYYRSIPHRKLLTALQLRANVYPTREFLARGRQDKYIKACRHCDADIESCAHIIGNCPVTQDARIKRHNYICKVLLEEAKKKGWVVFQEPHIRDTTKELYKPDLIFVKDARALVVDVTVRYESAKTSLEDAAAEKVNKYKHLETEVRNLTNAKDVVFMGFPLGARGKWHQKNFELLGALGLSKSRQEKIARTLSTTALMSSVDIVHMFASRARKLCNQE

SEQ ID NO: 447 - protein, 1257 aa, Ciconia episcopus
MGRPIRIAFVSVATQTGPIDLRERVITETGKEHDKSNVPEDSWNCTGLEFINSIVEGLEWSHPSNRAERLAKFPEVYETYNSSHAAETEINEKGEPSPRKAMSPPRTPSPDHNTDLPNEGTPVVKVPDKNTSCPCCGNRIGKISQLVEHLKRAHGNKKILFQCAKCGKTEMKHHSIACHFPKCKGSITTDPKCKGSITADPTVGLTCEECGRAFTSKIGLGQHKRLAHPVLRNIERIAAAQPKASTKRGLHRQCWTEEEVELLRILEKQYEGSKNINKLIAEHIPSKTAKQISDKRRGLSKSPEEEGEKDQDPEWRKQMTMEQDHPRGVGSDTEGGLISHYKKRIAEWITSEKLPILQGVFEEVLNGNENTDCLVQEATDEYYPHLFRRSTEPETNQDEKHPGHSKANPPGPSKEWMKKRARKRGQFLRFQRLFYRDRGKLAGIILDDVESLQCGIPLEEVHKVFKSRWETPGTFKGLGAFRSAGQADNSAFKAMITAKEIAKNIREMNKKAAPGPDGLSLRDLIKIDPHYTQVMELFNLWLLSGNIPDVARECRTVLISKSAVPERQKDINNWRPITIGSTALRLFSRILTARLTKACPINPRQRGFIKSPGCAENLKLLQLLIRSAKKEHRPLGVVFVDLAKAFDTVSHSHILTVLKQKGVDEHIIKLIKNLYHNINTRIDLKNKQSEPIGMQIGVKQGDPMSPILFNLSVDPLLCKLEEEGSGVQYGSRNITTMAFADDLVLLSESWEGMKKNIEILEVFCELTGLKTQGEKCHGFFIQPTKDSYTINDCPPWTVNGTPLNMIEPGSSEKYLGLRVDPWTGISKPELQQKVKGWLQRINDAALKPFQKVDILKGYTIPRLIYLADQADVKTTYLETLDLEIRTAVKEWLHLPPCTCDAILYSSTRDGGLGITRLTGLIPSVQARRLHRIAQSSDETTREIAKKEGIEKEYARLWIAAGGNKDKIPPIWDPRAVTVISEGQGGEKQVSEWELPAPKTIYPKPCDWRNQEFTNWTKLITQGRGISNFESDKISNSWLEFYRGIPHRKLLTALQLRANVYPTREFLTRGKQGTPMRACRHCQAEAETCAHIIGYCPAVQDARIKRHNQICEVLMEEAKKKEWTVFQEPHVHDERNELYKPDLVFVKENQAIVVDVTVRYESKSTSLADAAAEKVRKYQHLKDHIKDLTKALNIKFMGFPIGARGKWHPGNYELLKELGLSSSRQDKVARRLSNRALFSSVDIIHIFASKTRTVIRST

SEQ ID NO: 448 - protein, 1202 aa, Ciconia stormi
MGRPIRIAFVSVATQTGPIDLRERVITEIGKEHDKSNVPEDSWNCTGLEFINSIVEGLEWSHPSNRAERLAKFPEVYETYNSSHAAETEINKKGEPSPRKAMSPPRTPSPNHNTDLPNEGTPVVKVPDKNTSCPCCGNRIGKISQLVEHLKRAHGNKKILFQCAKCGKTEMKHHSIACHFPKCKGSITTDPKCKGSITADPAVGLTCEECGRAFTSKIGLGQHKRLAHPVLRNIERIAAAQPRASTKRGLHRQCWTEEEVELLRILEKQYEGSKNINKLIAEHIPSKTAKQISDKRRGLSKSPEEEGEKDQDPEWRKQMTMEQDHPRGVGSDTEGGLMSHYKKRIAEWITSEKLPILQGVFEEVLNGDENTDCLVQEATDEYYPHLFRRSTEPETNQDKKHPGHNKVNPPGPSKEWMKKRARKRGQFLRFQRLFYRDRGKLAGIILDDVESLQCGIPLEEVHKVFKSRWETPGTFKGLGAFRSAGQADNSAFKAMITAKEIAKNIREMNKKAAPGPDGLSLRDLIKIDPHYTQIMELFNLWLLSGNIPDVARECRTVLISKSAVPERQKDINNWRPITIGSTALRLFSRILTARLTKACPINPRQRGFIKSPGCAENLKLLQLLIRSAKKEHRPLGVVFVDLAKAFDTVSHSHILTVLKQKGVDEHIIKLIKNLYHNINTRSDLKNKQSEPIGMQIGVKQGDPMSPILFNLSVDPLLCKLEEEGSGVQYGSRNITTMAFADDLVLLSESWEGMKKNIEILEVFCELTGLKTQGEKCHGFFIQPTKDSYTINDCPPWTVNGTPLNMIEPGSSEKYLGLHVDPWTGISKPELQQKMKGWLQRINDAALKPFQKVDILKGYTIPRLIYLADQADVKTTYLETLDLEIRTAVKEWLHLPPCTCDAILYSSTRDGGLGITRLTGLIPSVQARRLHRIAQSSDETTREIAKKEGIEKEYARLWIAAGGNKDKIPPIWDPRAVTVISEGQGGEKQVSEWELPAPKTIYPKPCDWRNQEFTNWTKLITQGRGISNFESDKISNSWLEFYRGIPHRKLLTALQLRANVYPTREFLTRGKQGTPMRACRHCQAEAETCAHIIGYCPAVQDARIKRHNQICEVLMEEAKKKEWTVFQEPHVHDEQNELYKPDLVFVKENQAIVVDVTVRYESKSTSMADAVAEKVRKYQHLKDHIKDLTKASNIKFMGFPIGA

SEQ ID NO: 449 - protein, 1245 aa, Colaptes auratus
MGRQLRSLFATIGTQTTPKDWLDVATTDNTRPPDEEIRVCWTGIEFVNSMIAKNNIAYNPIWNEKLMILPEAYEGPTSPAREKGIRDQSLERSRNEDVDCPETPSSMSQLSILTASPELENTADTCPGTPLVRMPDDNPACPCCTTRAGNLTRLIDHLKRAHGKRKITFQCSRCERTNENHHSISCHIPKCKGVQEPTQIEGFRCEECNNCFKTKIGLGQHKRLAHPALRNRERIEASRPKETSKRGAHKQVWSQEETEMLQTLSQEFEGRKNINKLIAEKLTTKTAKQISDKRRLLKETLVPEKEKTPERKSRLKKGRTEIPSSGEGELIAHYRKTIKEKISSGKLPILQNTFKQIIEGKKDSLKILNEVAQDKYLHLFEKAIEQKAPKQSQRKPQQRKSKKEWMKKRSKKRGEFLRFQRLFQLDRGKLANIILDEKDSAQCTIPLEEVSNTFRSRWESQNTFQGLGTFESVGRANNSAFKDLITEKEILKNIKELNKKSAPGPDGITLKSLLKMDPDCKEIRELYNLWLLSGKIPDVVRGCRTILIPKSSAPERQSDINNWRPITIGSIILRLYSRILTARLAKACPINPRQRGFIQSSGCAENLKLLQLIIRNAKKQKKPLGVVFVDLAKAFDSVSHTHIIEVLKQKGLDDHIIDLIKDFYHNIHTVIKTKEGETESIGIKTGVKQGDPMSPLLFNLCIDPLLCKLEECGEGFQHGKGKITALAFADDLVLLSSSQSGMEKNIEILEAFCDLTGLKTQGEKCHGFFVRPTKDSYTINDCPPWLVSGTPLNMIHPGQSEKYLGLKIDPWVGLVKPELQNNLEVWLNRIERAPLKPFQKLDILKVYTVPRLIYLADQANVKSTYLEKMDLTIRNRVKNWLHLPTCTCDGILYSSTKDGGLGLTRLAGSIPSIQARRLHRLANSSDDTVKTVVKENDIDKDYEKLWVSAGGDKDKIPSIYNPQTIMVAEYGGSEELSEWEKPAPKKIFPKPCNWRKNEFKKWTTLMSQGIGTAVFENDSTSNHWLVNYKNIPHRKLLTALQLRANVYPTREFLARGRKEDQNTKCRHCQADNESVAHIIGYCPAVQDARIRRHNYICKMISEEAKKKEWLVYEEPQIRDKDLNLYKPDLVFVKENVAYVVDVTVRYESNITKLKHAAEEKVRKYKHLREEIVELTNANEVKFAGFPLGARGKWYEGNYKILSDLGLSKSRQSRVARRLASRALLTSVDIVHMFAGKSRKVTTNPV

SEQ ID NO: 450 - protein, 1246 aa, Cossypha archeri
MGPLMRLMYVSTATQTDINDLKLVVTKLKETIIPVTIPSDDIELQRLEFSNSKEIEDWQTIEFANQWEKLALYPEVYESLPSDSPQESNVTPSDNNIDADGDGEDSFALATEFVLDPHKDDLPGEIPLVMLPDKAPSCPCCKVKIMGIEKLVDHLLRSHGKRKIIFQCITCGLQSENYRSIVCHYPSCKGASEVIPSGDCVCEECGRSFPTQRGLGQHKRHAHPDVRNQERIDAARPKAKIPRESARKCWTKEEEELLKKLIEQYEGERYINKLIAEHIPTKTVKQISDKRRCMNPVRKERKDQERCVQVEKRKKQPVTTEPSNPDQLRAHYMETIRKGIKLRTINIYSRAFRKIVEGVKDQLTLINDTTEDWYGHLKARCLAERNPKVQSKRGKTQETRSKRKATNWMKKRAIKKGRYLRYQKLFYKDRGKLANIILDEVESVKCEIPLPEVFSVFKSRWETTGKFKGLGHFQSKGMADNSAFKVMITEKEIVKNIKETNKNAAPGPDGITIKDLIKMDPKFVEITELFNLWLTSGEIPDSLRGCKTILIPKSTKPDRLHDINNWRPITIGSVILRLFSRILTARLTKACPINSRQRGFIKSPGCSENLKLLELIIKNAKKQHRELGVVFVDIAKAFDTVSHQHIIMGLRQKGVDSHIINLITNMYKNIYTEIGIKGERSEPIQIKVGVKQGDPMSPLLFNLAMDPLLCELEQNGRGYHYDANSITAMAFADDLVLLSDSWEGMRENIEILEAFCDLTGLKTQGEKCHGFFIKPTRDSYTINDCPPWTVGGTPLNMVCPGSSEKYLGLQIDPWVQIAKPDLSSKIDTWLDRISESPLKPLQKVDILKIYMIPRIIYLADHTDIKAGFLEALDLKLRARIKKWLHLPTDTCDAILYSSTKDGGLGIIKLQALIPSVQARRLHRLAQCSDETLRNILQQENIMQKYEKLWITAGGDKEQVPDIWAPKPTVPTSHLGEEDTSEWEITTPKNIYPRPCNWKKMEFRKWTKLQSQGIGIINFEGDTISNNWIKNYRGIPHRKLLTALQLRANVYPTREYLARGRNDGRITSCRHCKAENESCAHIIGQCPAVKDARIKRHNYICEMLSGEARRKDWVVYQEPIIRDSKGELFKPDLVFVKEKQALVVDVTVRYEGEINTLEKAAKEKVKKYQHLETEIQELTNTEKVTFIGFPLGSRGKWYNKNFDLLQTLGLSSSRQERIARAMASRALFSSVDIIHIFTSKVRTAIDK

SEQ ID NO: 451 - protein, 1230 aa, Cossypha dichroa
MIQPISLRYISTATQTDPLDLWVIEADVPSVPPTSSDDGFELVCLEFVNSSYREENGFHLEIVWEGLANLPEPYETLPLGLVQGDESECVQTVVEEPKTPEALPRPSGDGAPTGTPVVSVPDKNPACPRCATRFTRMLGLIDHLKRNHGQKKIWFKCSKCGKQNLKYHSIACHFPRCKGEVCVVPTGDWVCEVCQRSFTTKIGLGQHKRLMHPLVRNLERIEASRPKVSSLRGAHKRVWTEEEEVLLSQLVVAYAGRKNINQLIMEHIPSKTAKQISDKRRLLMKVPSKKDRVEEEGAGKEELPQSADLPQEGQLKLQYSDAIKRMLAACEFTSCQEAFAKILDGQDPQTVVNEVYEKFFGSPGGLSQDVKSSRGRKSREDQKASRATTNWMRKRAKRKGKYLRYQRLFHLHRGRLARIILDNIEAVQCQIPSDIVHAAFKARWETSVGFKGLESFPPHGEADNTVFQALITEKEVEKNLKEMAKTSAPGPDGITLGQLLKKDPKFSLLTEIFNLWLVTGTIPDLLRACRTVLIPKSTDLERVGDINNWRPITIASTVLRLFSRIVTARLTRACPINPRQRGFIRASGCSENLKLLQLLVRHAKREHCDLGVVFVDIAKAFDTISHEHIIMSLTQRGVDPHVIQLVIELYKNISTYIGMKSGRTDPIKILRGVKQGDPMSPILFNLALDPLLCKLENDGYGFQRGCLRLTAMAFADDLVLLSDSWDGMCGNIKILETFCELTGLQTKGEKCHGFYIKPTKDAYTINDCPAWTINGSPLNMIDPGNSEKYLGIQIDPWTGFADSGLSRKLEEWLQRIGDAPLKPLQKVDILRTYTIPRLIYLADHTEVKSGPLESLDLIVRNEVKVWLHLPPSTCDAILYSRCKDGGLGIIKLSALVPSIQARRLHRLAQSSDETLVQFLKGEHLELLYEKLWVRAGGEKESIPTIWEPIPVDDSVGSGGEGLSEWEAPVPKVRYPRPCNWRKVEFNRWKRLVAQGHGIENFENDNISNGWLIHYRGIPHRKLITALQLRANVYPTREFLARGRGDVYVRSCRHCDADYETTAHIIGSCPITKEARIKRHNSICETLSNEAKREGWSVFQEPHIRDEKQELFKPDLIFIKGNKALVVDVTVRYEHNNSSLKEAAAEKAKKYQCLVQQIKDLTNAAEIEFIGFPIGARGKWYEKNSELLTALGLSKTRLGKTARALASRALLTSVDIVHIFASKARTVVSNK

SEQ ID NO: 452 - protein, 1213 aa, Falco fasciinucha
MTHTDPIIRQLGADKPVTRGNGTGSPGPVRLSPRRNTGPDFRSRKSTGPTGNDHVKRPSIMVRRDRPDRFVLDYGSHAVVLRGKQLPKELACGPPETSLVTHVPVGGDFSLDIPCAEALLRCPICPRQFSSPSSWGEHLWCRHNTKPIYRCTECGRESGHLHSLRCHCGKCSGRTTGDVPAPTDGDFICSECGQAFGTATGRSQHERHRHPALANKRRIDSYNLELAKKKALRAAATLPGRQTGKGCWSAEEVAILISNGEKLTRAGCRRVNQALAPLLPDKTLKQISSKRCDLKRRNERSETESGERADRNVGTESEERADRNVGSEVTDHRVPQLSETEGEITGTAPSPEWRRSFKDAALPGRSGWAATFAECLQELNAEVANDSWDRFTRNVDEWITQLRQRSTRGERVGAERVTTTRRPCRNLGKRARRATFARYQNLFDRNRKKLLAEVLCENKQGECLVPMNVIEETFKERFSKKGPEVDLSAYPASAMVNNSPLLTPFTMEEVVDARRSMKSASAPGPDGITPRQVKSIDPAELVNIFNYMLLAGKVPDVLKLGRSVLLPKKEDSPNDLSDWRPLTICSAIYRLYTKLLATRMLQVTPLNPAQRGFINADGCSENLFLLRQLMLRSMGRPVGPRIKRLDVAFLDLAKAFDTVSHSLVFAGMRRLGFHDHMIEVVKGLYEGCFTKFSVRAESSEPIEILRGVRQGDALSPLLFNIATDPLMDALSKDCGISVDGANIGCLAYADDNALVADSAVGLQRSVDRCVRFYREVGLSVNVAKCATFSITARGRSFHANRGAPPEIDGVPLPQVGPAEKASYLGVRLGPWSDEAYISVERVTLQIDLLCRAPLKPRQKFHLLQQFYLPRLFYGLSQVLPSRSTLMAIDTAIRQGTRRMLHLHESTANSFLYSSRCDGGLGLVCLTESIPSSVIRRNLRLLCSEYEAVRTLARTAGLAARNSEVTQRYGLPPIRADETEYAPMFRQDHSLDWESLPVQGQCAKSFRGDHCGNAWMSRPGGITEESYLTCLKLRTNTFPTRECLTRGGRGLKACRRCGAPSETVSHISGQCPKLKRERLARHNRICQLVADESARHGWVVGIEPSFRVNGTRLIPDLVLRRADRTVVIDVTVRYEQGDALRDAASEKVRKYRPLIALLGATGGQVEIHGLPIGACGAWSAAADRALLALRIGDEGFRRRLCQHAMLSTLGMLRD

SEQ ID NO: 453 - protein, 1238 aa, Gallinago paraguaiae
MGWSGRLCFVSVATQTKYLDWALSVPSILNPDLVGGGIAERKRWEFVNSEKGYVLVLSPSRSSLLDTLPEPFESPKVSGRTISPSSVQTEYTGERTSSPPITPPPILEAGADPPQEGTPVVKIPDKNPACPCCGNRMGKITGLVDHLKRTHGKRKILFQCARCGRTNPKHHSIACHIPKCKGAEEPSISMGWACEECNRTFGTKIGLSQHKRLAHPVTRNVERITATRPKEESARGAHRRCWSEEEVELLKKLEKQYEGNKNINKLIAEHLPLKTTKQISDKRRGLVRSPSKKKVKELGIREELMKEGEYLERSGSQEEGGLRSRYRKSIAEWLRTRKITTLREIYERVMKGKKDLPALVDEAAQGHYACLKKDLLEGERRQIQKIREIRRSRPQKPSKQWTIKRARKRGQFLRFQRLFHLDRRKLAGIILDDVESLQCGIPLDAIHEVFKSRWESPGTFKGLGTFCTNGLADNSAFQPMITVKEIEKNIREMNKNTAPGPDGVTLRDLMKADPQCVNLMELFNLWLLTGYIPDGIKNCRTILIPKSNVPEKLNDVNNWRPITIGSIILRLFSKILTARLSKACPINTRQRGFIKSPGCSENLKLLQLVIQYAKREHRPLGVVFVDLAKAFDTVSHAHIIAVLKQKGVDEHIINLIENSYHNIKTYIDMKKEKSDSIGIRIGVKQGDPMSPILFNLSVDPLLCKLDEIGNGFECHTKVVTSLAFADDLVLLSGSWEGMQKNIEIVETFCELTGLKMQGEKCHGFYIKPTKDSYTINDCPPWTINGTPLNMIEPGSSEKYLGLRIDPWTGISKPELLEKVDRWLAKVGKAPLKPFQKVDILKGHLIPRLIYLADQANLKPTHLENIDLAIRNGVKEWLHLPACTCDAILYSNTQDGGLGINRLAALIPNVQTRRLHRIAQTTDDVLKEIVKQEGIEREYEKLWVMAGGDKEKIPSIWDPKSIMVISETGGEELSEWESPNPKLIYPKPCNWRKREFNNWVKLSTQGRGISNFEKDKISNNWIQQYRGIPQRKVITALQLRANIYPTREFLARGQSETYIKSCRHCQADIETCAHIIGYCPSVQDARIKRHNQICNILAEEAKSKDWLVYQEPLLRDESNELYKPDLIFVKENQAIVTDVTIRYEITTKTLEEAALAKAKKYAHLKSQIQDLTNTSIINFTGFPLGSRGKWYQGNYNILKDLGLSSSRQEKVARRLSNYALFSSVDIVHMFASKARTEVR

SEQ ID NO: 454 - protein, 1392 aa, Garrulus glandarius
MEISKPLLGPPIRLYQVSVGTQTSNSDWVDLVSRDFKPGSSSKSCGVDLVSLTSKHRVALLSKTDRVDLVYFTSKHQVDPLSKTNQVDLVAQNFPSGSPNSAENELDLVNLEFYRSDLYVGNVDGHFSVNREGLSGLPEVYEQLTPQPSAGGGDHLPKDSEGIVLSDGEESGEHERESASETSPPELQNTSETSPPEPETCVVPATSPPPPDAHGKEAPGDSLVVTIPDKNPPCPCCGTRVGGVGGLIEHLREAHGRRGVCFRCAKCGKESNNCHSIVCHFPKCRAKTETAPAGEWICEECGRDFKTKIGLGQHKRLAHPMIRNQERIAASHPKETSNRGAHKRCWTKEEEELLIRLETQFEGNKNINKLIAEHIPTKTAKQISDKRRLLPRKPTEDVCEEPGVSHRTRRAAAGLKIEPGPSNQPGKGVEDNEPEISHRLRRPAAGRGAEPEIRRRPDKRTKALGNIDQQREGQLQAHYQKKLGEWLSAGKIKTFPRAFKQLIKGQEMQPVVNETAQDCFGCLQAISHTKTASRDKEKREAQEKKPTRPYQKWMKKRAVKRGKYLRFQRLFHLDRGKLAKIILDDVECLSCDISPSKIYSDFKARWETPGKFDSLGDFQINGKADNSAFRDLITAKEIEKNVQEMSRNAAPGPDGFTLRDIKKMDPEYSRTTEIFNLWLTSGKIPDTVRGCRTVLIPKSPRPERLKDINNWRPITIGSILLRLFSRTLTARLTKACPLNPRQRGFIRAAGCSENLKLLQTIIRSAKRDHKPLGVIFVDIAKAFDTVSHQHILQGLQERCVDPHIVSLVSNMYENIRTYITTGKTQTDHIQIRVGVKQGDPMSPFLFNLAMDPLLCELETRGKGYHRGPSSVTAMAFADDLVLLSDSWENMKQNIRIVETFCDLTGLKTQGEKCHGFFIKPTKDSYTVNDCAAWTINGTPLNMIHPGESEKYLGLQIDPWTGLAKSDLSTKLESWLEKIGKSPLKPLQKLDILKTYTIPRLTYLADHSDLKAGFLEALDQTVRTTVKEWLHLPACTCDAVFYSSTRDGGLGLTKLAGLIPSVQARRLHRLAQSSDETMKLFLDKVQMEQLHKKLWIQAGGDREKIPSIWEAKPANVPSTSCSADITSEWEAPSLKTKFPKPCNWRKNEFKNWTKLVSQGRGIENFEGDKISNHWIQYYRGIPHRKLLTALQLRANVYPTREFLARGRKDKYTKACRHCKADNETSAHIIGNCPITQDARIKRHNYICKVLSEEAKKKDWVVFQEPHLRDTNKELYKPDLIFVKDARAFVVDVTVRYEASKTSLEEAAAEKVNKYKHLTEEIRELTNAKDVVFMGFPLGALGKWYHGNLELLGVLGLSKTRQEKAARTLSSIALTSSVDIVHMFASRSRSCNVV

SEQ ID NO: 455 - protein, 1261 aa, Geranoaetus albicaudatus
MGRPMRISFVSVATQTSPLDLRDNVVSCSIQDHKTGGLLEGRFEIRGLEFVNSDLEGLKCQQSPTLTDLLAVLPEVYEVPNSFSLGDKNTCPTPVEDENEEEEPSPLGAVAGTSPLPSTPVSRSRDDLPAESTPVVKIPDKNTSCPCCGNVTGKLSGLIEHLKRAHGKKKILFQCARCGRTDVKHHSIACHFPKCKGPVEASPERSWKCEVCEKTFDTKIGLGQHKRLVHPVTRNLERITAARPKTGTMRGAHRRCWTEDEMELLRKLDKQYEGQKNINKLIAEHIPTKTTKQISDKRRDLRKSPVKKGKDQGQTKHLELEGEHLVEGEHLVCIGSEMEGGLRSRYRKTVSEWVTAGKLSILHGMFEQVIEGEEDPALVADKAMKDCFTCLASKSLELKTSQGRPRQVAQTARPSEPPKGWMKKRAVKRGQFLRFQRLFYLDRGKLAGIILDDVESLKCAIPQDEIHNVFKSRWESPGTFKGLGAFRSKGLADNSAFEAMITAKEISKNIQEMNKNSAPGPDRLSLRDIMKIDPHCVQLMELFNLWLVTGTVPDVVKECRTVLISKSSLPERQMDINNWRPITIGSIILRLFSRILTARLAKACPINSRQKGFIRSAGCAENLKLLQLLIKSAKKEHRPLGVVFIDLAKAFDTVSHHHLMAVLKQKGVDHHIITLITNMYQNNRTRITVKNEHSDPIGIQIGVKQGDPMSPLLFNLSVDPLLCKLEEEGSGYHHDSKGVTSMAFADDLVLLSGSWEGMQSNIKILEAFCELTGLRTQGEKCHGFYIQPTKDSYTINDCPPWQINGTPLNMIEPGSSEKYLGLRIDPWTGISKPELLRKIRDWLQRIGEAPLKPFQKVDILKGYTIPRLIYLADQADVKATYLEELDLTIRTTVKEWLHLPPSTCDAILYSSTRDGGLGIARLSGLIPSIQARRLHRIAQSSDDVIRSIVKQEGIEKDFEKLWLTAGGDRNKIPSIWDPSAIRVTSEELGEDEFASEWEIPTPKTIFPKPCDWRKQEFINWTKLQSQGRGIANFEKDKISNNWLERYRGIPHRKLLTALQLRANVYPTREFLARGRQESHIKSCRHCQAENESSAHIIGYCPAVQDARIKRHNQLCDLLITEVKKKDWIVFQEPILKDEQNEIYKPDLVFVKGDQAMVIDVTIRYESKLSSLADAAAEKVKKYCHLKNQIQELTNAKNIKFKGFPVGARGKWYSGNYEVLKALGISNSRQDKIARCMSRKALFTSVDIVHMFVSHSRSIVRT

SEQ ID NO: 456 - protein, 1260 aa, Harpyopsis novaeguineae
MGRPMRMSFVSVATQTSPLDLRDNVVSCSTKDHGGLLEVRFEIRGLEFVNSDLVGPEGQQSSTLIDHLALLPEVYEVSNSLSLRDKNICPTPVESENEEEEESSPLGATARISPLPSTPVSQPRDDLPTEGTPVVKIPDKNTPCPCCGNVTGKLSGLIEHLKRAHGKKKILFQCARCGRTDVRHHSIACHFPKCKGLVEASPERGWKCEVCEKTFDTKIGLGQHKRLVHPVTRNLERITAARPKAGTMRGAHRRCWTEDEIELLRKLDKQYEGQKNINKLIAEHIPTKTTKQISDKRRDLHKGPVKKGKDQGRKEHLELEEEHFAEGEHLVCVGSETEGGLRSRYRKTISEWVTSGKLSILHEMFEQVIEGEKDLTTVADKAMKDCFACLASKSSELKAGQGRPRQVAQTARPSEPPKGWMKKRAVKRGQFLRFQRLFYLDRGKLAGIILDDVESLKCGIPQDEIHGVFKSRWESPGTFKGLGAFRSRGQADNSAFEAMITAKEISKNIKEMNKNSAPGPDRLSLRDIIKIDPHFAQLMEVFNLWLVTGVVPDVVKECRTVLISKSSLPERQMDINNWRPITIGSIILRLFSRILTARLAKACPINPRQKGFIRSAGCAENLKLLQLLIKNAKKEHRPLGVVFIDLAKAFDTVSHYHLIAVLKQKGVDHHIITLITNMYQNIKTRIAMKNEQSDPIGIQIGVKQGDPMSPLLFNLSVDPLLCKLEDEGNGYHHGSKCVTSMAFADDLVLLSGSWEGMQSNIKILEAFCHLTGLRTQGEKCHGFYIQPTKDSYTINDCPPWQINGTPLNMIEPGSSEKYLGLRIDPWTGISKPELLTKIRDWLQRIGEAPLKPFQKVDILKGYTIPRLIYLADQADVKATYLEELDLTIRTTVKEWLHLPPSTCDAILYSSTRDGGLGITRLSGLIPSIQARRLHRIAQSSDDVIRSIVRQEGIEKEFEKLWLTAGGDKNKIPSIWDPSAIRVTSEELGDDELVSEWEVPAPKTIFPKPCDWRKQEFINWTKLQSQGRGIANFEKDKISNNWLDRYRGIPHRKLLTALQLRANVYPTREFLARGRQESQIKSCRHCQAENESSAHIIGYCPAVQDARIKRHNQLCDLLITEVKRKDWIVFQEPILKDEQNEIYKPDLVFVKGDQAIVIDVTIRYESKLSSLADAAAEKVKKYCHLKSQIQELTNAKNIKFKGFPVGARGKWYFGNYEVLKALGISNSRQDKIARCMSRKALFTSVDIVHMFASHSRSIVRT

SEQ ID NO: 457 - protein, 1239 aa, Limnodromus scolopaceus
MGWSGRIWFVTVATQTKYSDWAFTVHSITNPELAGDGIADLRGCEFGNVEKGYYVGHSPPRSSLLATLPEVYETPRVMGKVTSPSSVLTEHEGDRTSSPPRTPPPILETGADLPQEGTPVVKVPDDNPACPCCGNRIGRISGLIDHLKRTHGKKKILFQCAKCGRTNLKHQSIACHVPKCKGAKGTSPLRGWACEECNRTFGTKIGLSQHKRLAHPVTRNIERITASRPKEESARGAHRRCWSEEEVKLLKKLEKQYEGNKNINKLIAEHLPSKTAKQISDKRRGLIKSPSKKNGKDLTLREQLTEEGEHLIESGSQEGGELRSQYRKSIAEGIRSQKITSLRKIFERVIEGKEDLPSIVDEAAQDHYACLKRDLTEGEGRQIQKIREIRRTHSQKPSKQWTIKRARKRGQFLRFQRLFYLDRGKLAGIILDDVESLKCGIPLDVVHEVFKSRWESPGTFKGLGTFKTIGQADNSAFQAMITMNEIKKNIREMNKNAAPGPDGISLRDLMKTDPQCAKLMELFNLWLLTGYIPDGVKNCRTILIPKSTVPEKLNDVNNWRPITIGSIILRLFSKILTARLTKACPINIRQRGFIKSSGCSENLKLLQTIIQYAKREHQPLGVVFVDLAKAFDTVSHSHILSVLKQKGVDEHIIKLIENSYYNIKTYIDLKNEKSDSIGIRIGVKQGDPMSPILFNLSVDPLLCKLEEMGNGFQCHGQNVTALAFADDLVLLSGSWEDMQNNITIVETFCELTGLKMQGEKCHGFYIKPTKDSYTINDCPVWTINDTPLNMIEPGSSEKYLGLYVDPWIGISKPELLEKVDRWLVKVGKAPLKPFQKVDILKGYLIPRVIYLADQANLKPTYLESIDLAIRTGVKEWLHLPACTCDSILYSNTQDGGLGISRLAALIPSVQVRRLHRIAQTSDEVLKTIVKREGIEREFEKLWLMAGGDKERIPSIWDPKTVMIISETGGDQILSEWEIPNPKLIYPKPCNWRKREFNNWTKLLMQGRGIVNFEKDKISNNWLIHYRGIPQRKLITALQLRANIYPTREFLARGRSETYIKSCRHCQADNETCAHIIGYCPSVQDARIKRHNQICHILAEEAKRKDWLVYQEPLLRDQQNELYKPDLIFVKGNRAIVTDITIRYETTIKTLEEAALEKAKKYVHLESQVQDLTNTSVINFTGFPLGSRGKWYQGNNKILNELGLSNSRQEKVARRLSNYALFSSVDIIHMFASKARTEVR

SEQ ID NO: 458 - protein, 1259 aa, Melierax canorus
MGRPTRISFVSVATQTSPLDLRDNLVSCSTKDHGGLLEVRFEIRGLEFVNSDLVGPKGQQSPTLTDYLALLPEVYEISNSLSLRDENTCPTPVEIENEEEESSPLGATARTSPLPSTPVSRSRDDLPTESTPVVKIPDRNTSCPCCGNVTGKLSGLIEHLKRAHGKKKILFQCARCGRTDVRHHSIACHFPKCKGPVEASPERSWKCEVCEKTFETKIGLGQHKRLVHPVTRNLERIATTRPKAGTMRGAHRRCWTEDEIELLRKLDKQYEGQKNINKLIAEHIPTKTTKQISDKRRDLHKSPVKKGKDHGRKKHLELEGEHLAEGEHLVCIGSELEEGLRSRYRKTIAEWVTSGKLSILHGMFEQVIEGEEDPAIVADRAMKDCFACLASKSVELKAGQGRPCQRAQTARPSEPPKGWMKKRAVKRGRFLRFQRLFYLDRGKLAGIILDDVESLKCGIPQDEIHDVFKSRWESPGTFKGLGAFRSKGQADNSAFEAMITAREISKNITEMNKNSAPGPDRLSLRDIIKIDPHCVQLMEVFNLWLVTGIVPDVVKECRTVLISKSSLPERQMDINNWRPITIGSIILRLFSRILTARLAKACPINPRQKGFIRSAGCAENLKLLQLLIKNAKKEHRPLGVVFIDLAKAFDTVSHHHLIAVLKQKGVDHHIITLISNMYQNTRTRITMKNEQSDPIGIQIGVKQGDPMSPLLFNLSVDPLLCKLEEEGNGYHHGSKCVTSMAFADDLVLLSGSWEGMQSNIKILEAFCDLTGLRTQGEKCHGFYIQPTKDSYTINDCPPWQINDTPLNMIEPGSSEKYLGLRIDPWTGISKPELLMKIRDWLQRIGEAPLKPFQKVDILKGYTIPRLIYLADQADVKAMYLEELDLAIRTTVKEWLHLPPSTCDAILYSSTRDGGLGITRLSGLIPSIQARRLHRIAQSPDDVIRSIVKQEGIDKEFEKLWLIAGGDKSKIPSIWDPSAIRVTSEELGEEELVSEWEIPTPKTIFPKPCDWRKQEFKNWTKLQSQGRGIANFEKDKISNNWLERYRGIPHRKLLTALQLRANVYPTREFLARGRQESHIKSCRHCQAENESSAHIIGYCPAVQDARIKRHNQLCDLLTVEVKRKDWIVFHEPILKDEQNEIYKPDLVFVKGDQAIVIDVTIRYESKLSSLADAAAEKVKKYCHLKSQIQELTNAKNITFKGFPVGARGKWYSGNYEVLKALGISNSRQDKIARCMSRKALFTSVDIIHMFVSHSRSIVRT

SEQ ID NO: 459 - protein, 1243 aa, Myiozetetes cayanensis
MVRSMKLLHISAATQTSPYDWVETPAKKLAYLAGEDLELQDLEFFNSSMFNELGGYHPPIRWEGLEKYPEVYEVPFSDPDSGEITREPPEEPQQDIREESHPSLTPASPIQREIPDQSPEKTPVVKVPDTNPPCPVCNDRIAGVPGLVDHLKRVHGKRKVKFQCAKCGKENVKCHSIACHFPHCTGPAETAAAGGWTCEVCGRSFRSKIGLGQHKRLAHPAERNKERIAASHPKTASQRGAHRRCWTKEEELLIRLMDQYKGKKNINKLIAEHIPSKTTKQISDKRRLLEPGKKLGGKELDLNSQGEDNGEQLAGDDSSGPGLLRAHYLGTVRDWLSGQKLHTFQGAFRNMIDGLQEPLSIVNDSTRDCFECLGVSYQINKPSNSKLQQQKKQNSRPGKPAKNWMKKRAIKRGLFLRFQRLFHLDRGKLARIILDDLDSMRCEIPLQDIHSVFRTRWETPGKFNGLGGFISKGQADNSAFQAMITDREISKNITEMSKNSAPGPDGITLRDLRNMDPKFSQTAEIFNLWLTSGMIPDMMRGCRTVLIPKSSKPERLKDINNWCPITIVSIILRLFSRILTARLSKACPINPRQRGFIRAAGCSENLKLLQLLIRNAKREHREIGVVFVDIAKAFDTVSHQHILMGLRQKGVDPHIVGLIQNMYEDIYTQIDTKDGKTDQIKMLVGVKQGDPMSPLLFNLAIDPLLCKLEEYGNGFQQGKNTVTAMAFADDLVLLSGSWEGMNTNIKILETFCEHTGLRTQGEKCHGFYIKPGAKNSYTINDCPAWTVNGTPLNVIDPGSSEKYLGLQVDPWTGIAKPELSAMVEHWLQRLERAPLKPLQKVDILKTYAIPKIIYLADHTGTKTTFLESLDLQIRTTVKEWLHLPPCTCDAVLYSSVKDGGLGITRLAGLIPSVQAQRLHRLAQSSDETIRAILKEEQIEMEYEKLWVKAGGDKDIMPSIWEPGPAPLPPEQRDETTPSEWEVSAPKIKYPRPCNWRKIEFNKWTKLTSQGRGVENFEADKISNFWIEHYRGIPHRKLLTALQLRANVYPTKEFLARGRRDKCSTFCRHCRAPNESLSHIIGTCPIVQDARIKRHNYICGMLSEQAKKADWVVFQEPNLRDDNNELYKPDLIFVKDTQAYVVDVTIRYEQNLMTLETAAREKVEKYQHLQKQVQDLTNAAKVFFVGFPLGSRGKWFNKNYELLGALGLSKSRQERTARALASRALLTSVDIVHMFASRSRTAVV

SEQ ID NO: 460 - protein, 1253 aa, Otis tarda
MGRPIRVAFVSVATQTSPLDLRDDVVIKSIIDHREVVGEEIEYRGLEFINSQIVGVMAHPPTPIETLAMLPDVYEVPDVGPRGATTSPHLVEVESEEEEVLSPPGATAHPIQIPSTPILGAGSEHPTEGTPVVKVPDNNPPCPCCGNRMGKMSGLIEHLRRAHGKRKILFQCARCGRTNVKHHSIACHFPKCKGDITSPPKGDWVCEECGKAFETKIGLGQHKRLVHPAARNIERIIASRPKEGTARGLHRQCWTEEEVELLKRLDKQYEGSKNINKLIAEHIPSKTAKQISDKRRGLHKSPIKRGGKEQGGKKLLEEEGEHLVETGSHENGGLRSHYRRTVSEWITSEKLPILQGTFESVLEGSGEPSTLVDEAVDESYARMFRTSIELKACQERKQRMARRARPSEPPKGWMKRRAKKRGQFLRFQRLFHLDRGKLAGIILDDVESLKCEIPLDEVHSVFKSRWESPGTFKGLGAFRTNVQADNSAFEAMITAKEISKNIKEMSKNAAPGPDGLTLRDLIKMDPECDQLMEVFNLWLVTGSIPNMVRECRTVLISKSALPERQRDINNWRPITIGSILLRLFSRILTARLTKACPINPRQRGFIKSAGCAENLKLLQLLIKNAKKNHRPLGIVFVDLAKAFDTVSHHHIIMALIQRGVDNHIIALIKNLYSNISTRIYLKNEQSDPIGIHIGVKQGDPMSPILFNLAIDPLLCKLEKEGNGFQHCSRTITALAFADDLVLLSGSWEGMERNIEILEAFCHLTGLKTQGEKCHGFYIKPTKDSYTINDCPAWIINGTPLNMIEPGETEKYLGLQIDPWVGISKPELRMKIEDWLQRIGRAPLKPFQKVDILKGYTIPRLIYLADQADVKVTYLESLDLIIRTTVKEWLHLPTSTCDAILYSNTRDGGLGIVRLVGLIPNIQARRLHRIAQSSDELIRSVVQEEGIEREFEKLWVTAGGKVDKIPSIWDPGTVMIISEGVGGEEPASEWEIAAPKAIFPRPCDWRKQEFANWTKLLSQGRGISNFEKDKISNSWLEYYRGIPHRKLITALQLRANVCPTREFLARGRQELQIKACRHCLAENESCSHIIGFCPAVQDARIKRHNQLCETLANEAKKKNWIIFNEPVLRNEQNELYKPDLIFVKENQAMVVDITIRYESKITSLVDAANEKVKKYEPLKIQIQDLTNCENIKFYGFPIGARGKWHQGNYQLLTELGLSSSRREKVARQMSKRALFTSVDIMHMFMSKSRSVVRS

SEQ ID NO: 461 - protein, 1231 aa, Prinia subflava
MVQSLALRLVSTGTQTDPLHLWVSRAEIPPPPVVLCEESYDLVTLEFVNSNVCFEGGFHLGNARECLARFPEPYDILPSGLVREERFECEINESGGPVTPVVPPVCSGAGSPPKTPVVSVPDKNPSCPRCSTRFTRMLGLIDHLKRVHGQSKIFFRCSKCGKQHLKYHSIACHVPRCKGMVSVVPTGEWSCEVCHRGFATKVGLGQHKRLKHPLVRNEERIAASRPKESSLRGAHKKVWTEEEEALLKQLVERFAGSRNINQLIMEHIPSKTAKQISDKRRLLSKSPSKKHLGEGEKVGSEHPPQSAKGPQEGQLKLHYIGTIRRRLSAGGFTSCKEAFLKILDGQDPQKVVNEEYEMFRDSLSRLGPRTPRGPRLRRLHGPDASKITAKWMRKRAEKRGKYLRYQRLFQVHRGRLARVILDDTEALQCQIPSGTVHSAFKARWESSVCFKGLETFPVYRDADNIKFQDLITEKEIGKNLDEMKTTSAPGPDGITLGHLSKLDPKFSRLTEIFNLWLVTGTVPDALRECRTVLIPKSSREERLGDINNWRPITIASVVLRLFSRIATARLSRACPINPRQRGFISASGCSENLKLLQLMVKCAKQERKNLGVMFVDIAKAFDTVCHGHILAGLAQRGVDPHIVGLVGEMYNNIKTYIVTRKGRTDPITISSGVKQGDPMSPVLFNLALDPLLCKLETEGKGFHHGGFKITAMAFADDLVLLSDSWEGMCYNIKILETFCELTGLRTQGEKCHGFYIKPTRDSYTINDCPVWQINGTPLNMIDPGTSEKYLGVQIDPWVGFADSGLSAKLEEWLDRIGQAPLKPLQKLDILRTYTIPRLIYLADHTEVRSGLLESLDLAIRRKVKEWLHLPPSTCDAILYSRFKDGGLGIIKLAALIPNIQARRLFKLAQSSDVALVSFLKGEQLERTFEKLWLRAGGTRESIPPIWEPIPMDEGVAEGDKALSEWEAPRSRFHAPRPCDWRKLEFKRWIQLVSQGHGVGNFENDKISNWWMVQYRGIPHRKLITALQLRANVYPTREFLARGRQDVCVRSCRHCGAQLETTAHIIGTCPITQEARIKRHNSICETLSGEAKREGWTVFEEPHLRDEQNELFKPDLIFVKGEKALVVDVTVRYEHSSSSLKEAAAEKAKKYQRLLPQIRDLTNAAAVQFVGFPLGARGKWYERNAELLLALGLSKARLGRIARALASKALLSSVDIVHIFTSKARALYHEIN

SEQ ID NO: 462 - protein, 1243 aa, Scolopax minor
MGWSGRMRFVSVATQTKYSDWAFTVPSILNPELAGDEIANISANISGWEFVNSEKGYDVGLSPSRSSLLATLPEPYESPRVMGIVISPRSEQTEYEGERTSSPPRTPSPPVLEAGADLPQEGTPVVKVPDNNPACPCCGNRMGRITGLIDHLKRTHGKKKILFRCAQCGKTDVKHHSIACHVPKCKGAKESSPLRGWTCEECNRTFGSKIGLSQHKRLAHPVARNIERITAARPKEESARGAHRRCWSEEEVELLKRLEKQYEGNKNINKLIAEHLPTKTAKQISDKRRGLAKSPPKKKGKDLALREQLIQEGEHLVPSGSHEVGGLRSQYRKVIAEWLRSQKITTLRKTYERVIKGKEDLPSLVDEAAQNHYACLRKDLIEGEVHQIRKIREIRRPRPQKPSKQWTIKRARKRGQFLRFQRLFHLDRGKLAGIILDDVETLKCGLPLEAVHEVFKSRWESPGTFKGLGTFCTVGHSDNSAFQSMITANEIKKNIREMNKNAAPGPDGITVRDLLKCDSQCIKLMELFNLWLLTGYIPDDVKSCKTILLPKSNVPEKLNDVNNWRPITIGSIILRLFSKILTARLSKACPINTRQRGFIKSPGCSENLKLLQTLIRYAKREHHPLGVVFVDLAKAFDTVSHSHILAVLRQKGVDEHIIRLIENSYQNIHTYIDMKNEKSEPIGIRIGVKQGDPMSPILFNLSVDPLLCKLEEIGNGFKCHSQNVTALAFADDLVLLSGSWESMQSNIEIVETFCELTGLKMQGEKCHGFLIQPTKDSYTINDCPPWTINGTPLNMIEPGSSEKYLGLYIDPWTGISKPELLEKVDRWLERVGKAPLKPFQKVDILKGHLIPRLVYSADQANLKPVYLEHIDLAIRNAAKEWLHLPACTCDAILYSNTQDGGLGISRLTALIPSIQTRRLHRIAQTSDDVLKEIVKQEGIEREFEKLWLMAGGDKEKIPSIWDPKTIMVISETGDDELSEWEMPNPKLIYPKPCNWRKREFTNWTKLLSQGRGIVNFEKDKISNNWITQYRGIPQRKLITALQLRANIYPTREFLARGRAETYIKSCRHCQADNETCAHIIGYCPSVQDARIKRHNQICQILAEEAKSKDWLVYQEPLLRDERNELYKPDLIFVKGNQAIVTDVTLRYETTVKILEEAALEKAKKYAHLKTQVQDLTNASIVNFTGFPLGSRGKWYQGNYKVLKELGLSSSRQEKVARRLSNYALFSSVDIVHMFASKARTEVR

SEQ ID NO: 463 - protein, 1326 aa, Serinus canaria
MAPRSDRGNGFGDGPATHPVPVNEIGQEPIDPDPFLGGENCGLPLRLFGVSVGTQTSQEDLTPIPTKLAVNELDVLVNFSFEVYRSDLKGYVGGVHFPVNLEVLEGFPEVYEHLEPQPCQGDNLDPSPPDDGVQVVLGREEGKKEREGAPEALPPVQRGHSEQVPDDIVKVTVPDKNPPCPCCSTRLNSVLALIDHLKGSHGKRRVCFRCAKCGRENFNHHSTVCHFAKCKGPSEEKPPVGEWICEVCGRDFTTKIGLGQHKRLAHPMVRNQERIDASQPKETSNRGAHKKCWTKEEEELLARLEVQFEGHKNINKLIAEHITTKTNKQISDKRRQMTRKDKGEGGAAGKLGPDTGRGNHSQAKVGNNGLGGNQLPGGPAATKDKAGCHLDKEEGNRIAISQQKKGRLQGRYHKEIKRRLEEGVINTFTKAFKQLLECQEVQPLINKTAQDCFGLLESACHIRTALRGKNKKETQEKPTGGQCLKWMKKRAVKKGNYLRFQRLFHLDRGKLARIILDDIECLSCDIAPSEIYSVFKARWETPGQFAGLGNFKSTGKADNKAFSDLITAKEIKKNVQEMSKGSAPGPDGIAIGDIKGMDPGYSRTAELFNLWLTSGEIPDMVRGCRTVLIPKSTQPERLKDINNWRPITIGSILLRLFSRIITARMTKACPLNPRQRGFIRAAGCSENLKLLQTIIRTAKSEHRPLGVVFVDIAKAFDTVSHQHILHVLQQRGVDPHIIGLVSNMYKDISTFVTTKKDTHTDKIQIRVGVKQGDPLSPLLFNLAMDPLLCKLEESGNGFHRGGHTITAMAFADDLVLLSDSWENMEKNIEILEAFCDLTGLKTQGQKCHGFYIKPTKDSYTVNNCAAWTIYGTPLNMINPGDSEKYLGLQIDPWTGIARSNISSKLDSWLERINQAPLKPLQKLDILKTYTIPRLTYMVDHSEMKAGALEALDLQIRSAVKDWLHLPSCTCDAILYVSTKDGGLGVTKLAGLIPSIQARRLHRIAQSPDETMKAFLDKEQMEKQYAKLWVQAGGKREKIPSIWDALPTPVLLTTSDTLSEWEAPNPKSKYPRPCNWRRKEFEKWTKLQCQGRGIQNFKGDVISNNWIQNYRRIPHRKLLTAVQLRANVYPTREFLGRGRGDDCVKFCRHCEVDLETCGHIISYCPVTKEARIKRHNRICERLIEEAEKKDWVVFKEPHIRDAVKELFKPDLIFVKEDRALVVDVTVRFEATTTSLEEAAIEKVDKYKRLETEVRSLTNAKDVLFMGFPLGARGKWYQGNFKLLDMLGLSESRQVTVAKTLSTDALISSVDIVHMFASKARKMNLVTV

SEQ ID NO: 464 - protein, 1231 aa, Setophaga kirtlandii
MVQSLALHFVSIATQTDPLDLRVTEVKVPSIPSVPRVEGFQLVCLEFINSSIIRESGIHQTDVWEGLALFPEAYETAPIGPAQDMPEGAVGNTGSTDEPKTPEAPPESDSTTVKTSVVSSQTNNHHVQYVRLGLLGCWGSLIILKGLTGRKKKIIFRCSKCGKQNLKYHSIACHVPRCKGVVCMVPTGEWICEVCHSGFATKIGLGQHKRIRHPLVRNVERIVASHPKESSARGAHKRVWTEEEEALLVQLVGMFAGKRNINQLIAEQIPSKTAKQISDKRRLLFKTPSTKHRLEKGGAFGVEHQAESAVLPKEGKLRLRYHEAITAGLLEGKFTVYPEAFKKVLEGQNLGQVVNDVYGDFCGVLEVHSPTKSVKGRKSRSSHSPKASKNPTNWMRKRAIKRGKFLRYQLLYELHRRRLARIILDSTEAVQCQLPSGVVHEHFKKRWDISGLFVGLQNFPPYEEAGNTWFEALITEKEIERNVSEMCKTSAPGPDGITLGHLVKKDPKFSLLCEIFNLWLITGTIPDALRDCRTVLIPKSSAVEKLGDINNWRPITIGSVVIRLFSRIATARLSKACPINPRQRGFICASGCAENLKLLQLVVKRAKRERKHLGMVFVDIAKAFDTVCHLHVIEGLIQRGVDSQVIELVREIYQDIRTYISMGKERTDHIYIRSGVKQGDPMSPLLFNLAMDPLLCKLEKEGEGFHHAGWKITAMAFADDLVLLSDSWEGMCHNIRIVEAFCELTGHRTQGEKCHGFYIKPTRDSYTINDCPTWVINGSPLNMIDPGSSEKYLGTWVDPWTGFADHGLSERSTDWLHRIGESPLKPLQKVDILRSYTIQRLIYLADHTEVNMGFLESLDLSIRNAVKEWLHLPPSTCDAILYSSFKDGGLGLIKLAALVPSVQARRLHRLAQSSDGVLVSYLREIHLESLFEKLWLKAGGDQESIPSIWEPLPLSEVGDVGDGRFGWDAPLLKIRYPKPCDWRKNEFRKWCHLVSQGHGIENFENDEISNAWIKRFKGIPHRKLITALQLRANVYPTREFLARGRQDDAVRSCRHCGATFESVAHIVGNCAITQDARIKRHNAICEVLSEEAKREKWVVFQEPHLRDDENELFKPDLIIVKGSKAMVVDVTVRYEHSVTSLKEAASEKAKKYQRLHLQIQRLTNAKDIEYVGFPMGARGKWFSRNTQLLTALGLSKTRLERTARALASRVLFASVDIVHIFASKGRSIVTV

SEQ ID NO: 465 - protein, 1255 aa, Tyto alba
MCLAARIAFVSVGTQTSLLDLRDDVVPRTIRDHAKLVDVGINFRRLEFVNSDVEGLEGGDLSTVTESLAMLPEVYEEPSPSALEGKDISPLLRESESEGEGELSPPGAVAQLFPLPSSPILASGGEPSPEGTPVVKVPDKNTSCPCCGTRIGKVSGLVEHLRRVHGRRKILFQCALCGKTNEKHHSIACHVPKCKGAIEATPKEGLACEECGRTFETKIGLGQHKRLAHPVTRNLERIMAARPKETSARGVHRKCWTEEEVEILRKLEKQYEGNRNINKLIAEELPFKTAKQISDKRRILHKSPVKKREEDQEWKKHLREGEHLVSIGPRKRGGGLKSHYRKTISKWITAGKLRILHATFEKVIEGGEDLPTTVGGAVEDCYARLFKRSSELEASQGRKLQTARTARSSEPPKEWMKKRARKRGEFLRFQRLFHLDRGKLAGIILDDVESLKCGLPLDEVHCVFKSRWESPGTFKGLGGFKTLGRADNSAFEAMITSKEISKNIKEMSKNSAPGPDGLSLRGLMAIDPHYTMLAELYNLWLLTGTIPDMVKECRTVLISKSALPERQKDINNWRPITIGSTVLRLFSRIITARLTKACPISPRQRGFIRSAGCAENLKLLQLLIRNAKREKHPLGVVFVDLAKAFDTVSHNHIIEVLKQKGVDNHIISLISNMYSNTHTYIDMKSEQSDPIGIRIGVKQGDPMSPILFNLSVDPLLCVLEKEGSGYQHYSTSITSMAFADDLVLLSGSWEGMRRNIEIVEAFCDLTGLKTQGEKCHGFYIQPTKDSYTINDCPAWTIKGTPLNMIEPGSSEKYLGLKIDPWVGISKPELLAKIKDWLHRIDRAPLKPMQKVDILKVYTIPRMIYLADQSDVKVSYLESLDLTIRTAVKEWVHLPPSTCDAILYSSTRDGGLGLTRLSGLIPSVQARRLHRIAQSSDEVIREIVSKEGIEKEYEKLWLAAGGNKEKIPSIWDPSSAMVITEVLGGIDQYSEWERPAPKTIFPKPSDWRKQEFIKWTKLASQGRGITNFEKDKISNSWLERYRGIPQRKIVTALQLRANVYPTREFLARGRQETHVRSCRHCGAEIESCSHIIGYCPAVQDARIKRHNQICELLIEEAKKKEWIAFQEPLIRDEKKELFKPDLVFVREEIAIVVDVTIRYESKETSLEDAAKEKIKKYQHLEDQIQELTNATTIKFMGFPLGARGKWYQGNYTLLKELGLSSSRQDKVARRLSNRALFSSVDIIHMFSSKVRTVENV

SEQ ID NO: 466 - protein, 1230 aa, Aphelocoma californica
MVQSVALRYVSTATQTDPLDLWVREAKIPSPSVVIEEERFDLVSLEFNNSKIAFEIGSHLGNTADCLALFPEPYETLPAGLVQEETIGCEIRESEEPTTPRTPPGDKRGGTNTGTPVMSVPDKNPSCPRCMTRFTRMLGLINHLKTAHGCNKIWFRCSKCGKQNLKYHSISCHVPRCKGEGFVAPTGCWVCEVCSRGFATKIGLGQHKRLQHPLVRNVERIAASHPKETSLRGAHKKVWTEEEEALLNELVIKFAGSRNINQLIAEHIPSKTPKQISDKRRLLKSPSKKVQSKEGGAIGSQELPRSAEQQSEGRLVLHYHNIIKLKLSAGEFTMCREAFEKCIQGQDPQLVVNGIYEKFRDSLERLDHKRSKPRRSRGPRGQKASGATTRWMQKRAVKKGKYLRYQRLFQIHRGRLARVILDNTEALQCQIPSGIVHKAYKERWETSVCFNGLESFPVYREADNTMFRDLISEKEIGKNLNEMCKTSAPGPDGITLGHLMKKDPKFSQLKEIFNLWLATGTLPDALRDCRTVLIPKSSNEERLGDINNWRPITIASVVFRLFSRIVNARLVRACPINPRQRGFISASGCSENLKLLQLLVRKAKQEHTSLGVVFVDIAKAFDTVCHQHILAGLVKRGVDSHVVHLIGEMYRNIKTYIVTKSGKTDPINICSGVKQGDPMSPLLFNLALDPLLCKLETEGCGFYHGGFKITAMAFADDLVLLSNSWEGMRNNIEILETFCELTGLRTQGEKCHGFYIKPTKDAYTINDCPAWLIGGTPLNMIDPGSSEKYLGTQIDPWTGFADPGLPTKLEEWLHRIGDAPLKPLQKADILRTYTIPRLIYLADHTDVKIGLLESLDLMIKKSVKEWLHLPTCTCDAILYSRFKDGGLGFIKLAALIPSIQARRLHKLAQSSDGTLVSFLKEEHLEVMYEKLWVKAGGVRESIPQIWDPIPLTEVVGEGDEALSEWEAPRSKLRLPRPCDWRKVEFNKWKHLVAQGHGIDNFENDKISNDWLVHYRGIPHRKLITALQLRANVYPTREFLARGRHDVSVRSCRHCGAEYESASHVIGKCPITQDARIKRHNSICETLSREAKRENWTVFQEPHLRDEENELFKPDLIFVKDAKAFVVDVTVRYEHSNSSLKEAAVEKAKKYQRLLPQICDLTNVTSVEFAGFPLGARGKWFEKNSELLEALGLSKTRLGRLARALASRALFSSVDIVHMFASKARLLVPFK

SEQ ID NO: 467 - protein, 1363 aa, Erithacus rubecula
MALIWGGGVWFRAPVRLSRVSVGSQTSPGDWVDLVSWNFNFPGSKSNSQWVDLLPRHGVDLLSKFDQVDLVARNLPSKLSPDLAENELALLANLEFYRSDLYVYEGVHFFADREGLSGLPEVYEQLAPQPCAGDGSHSDLPRDTKLFVLEQKGSEEKEKVDAPKTSPPSPRKPGEQKPEETVMVTVPDKNPPCPCCGTRENSVLALIEHLKGSHGKKRICFRCVKCGKEGTNYHSIVCHFPKCRGPVTEAAPAGEWICEVCGRDFQTKIGLGQHKRHAHPLIRNQERIVASHPKETSNRGAHKRCWTKEEEEMLIKLEAQFEGQKNINKLIAEHITTKTAKQISDKRRLLPRKPDKEVEEEPAVSTRTRRAAAGLRKEPELSHQSQAAVEDNGPGRSEPLGKPAAGKKTIGVKSRGLEEANGRRGTIKQQMAGQLQAHYHRTLGERLSAGAINTFPGAFKQLMEGREMQETVNQSAQDCFGCLESISQIRTATRDKNNKGAQEKQPRKPFQKWMKDRAIKKGDYLRFQRLFHLDRGKLAKIILDDIETLSCDIPPSEIYSVFKDRWETPGNFNGLGDFQNNGKADNSAFRDLITPKEIEKNVQEMSKGSAPGPDGITLGDIKKMDPEYSQTAEIFNLWLTSGKIPDSVRGYRTVLIPKSTEPERLKDANNWRPITIGSILLRLFSRIVTARLSKACPLNPRQRGFIRAAGCSENLKLLQSLMRSAKKEHRPLGVVFVDIAKAFDTISHQHIIQALQQREVDPHIISLVSNMYKDTSTYITVKKNTRTQQIHFRVGVKQGDPMSPLLFNLAMDPLLCKLEESGKGYHRGRSSITAMAFADDLVLVSDSWENMVTNIKILETFCDLTGLKTQGAKCHGFYIKPTKDSYTVNDCAAWTIKGTPLKMIDPGETEKYLGLQIDPWTGIAKSNLSTKLEFWLQRIDEAPLKPLQKIDILKTYTIPRLTYLADHSDLKAGFLESLDQKIRTTVKDWLHLPSCTCDAILYSSTKDGGLGITKLAGLIPSVQARRLHRIAQSSDETMKMFLEKDQMQEMYKKLWIQAGGDREKIPSIWDALPPSEPSNDAGTTSEWEAPSLKTKFPKPCNWRKNEFKNWIKLVSQGRGIANFEGDKISNHWLQYYRSIPHRKLLTAVQLRANVYPTREFLARGRQDKYIKSCRHCDADIESCADIIGNCPVTQDARIKRHNYICEVLLEEAKKKDWVVFKEPHLRDTTKELYKPDLIFVKDACALVVDVTVRYEAAKTSLEDAAAEKVNKYKHLETEVRNLTNAKDVVFMGFPLEARGKWHQKNFELLETLGLSKSRQEKIARTLSTTELMSSVDIVHMFASRLENYVVRNSLFLFVAVLIL

SEQ ID NO: 468 - protein, 1181 aa, Geothlypis trichas
MDNMVQSLALHFISIATQTDPLDLQVTEVEVPSIPSVPREEGLQLVCLEFVNSRIVKEGGIHHADVWEGLAQFPEAYEISPMGLAQDVPEGVVGGTGGIDEPKTPEAPPRSDSTTVKSPVVYVPDKQPSCPRCETRFTRMLGLIDHLKRVHGQKKIIFRCSKCGKQNLKYHSISCHVPWCKGVVCVVPTGKWICEVCHRGFATKIGLGQNKRIRHPLVRNVERIVASHPKESSSRGAHKRVWTDEEEALLVQLVDMFAGKRNINQLIAEQIPSKTAKQISDKRRLLFRVPSAKDHVGRGGAIGIEHQAESAKLPKEGKLKHRYCEAIKAGLSAGKFTMYREAFEKILEGQNPGQVVNDVYKEFCGILDVPSQIKSAKGRKARPSRSPKASKTPTNWMRKRAIKRGKFLRFQLLYELHRRCFARIILDSTEVVQCQLPSSVVQDHFKRRWDISGVFGGLQNFPPYEEADNTLFEALITEKEIEKSVSEMCKTSAPGPDGITLGQLVKKDPEFSRLSEIFNLRLITGTVADALRDCRTVLIPKSSVSEKLGDINNWRPITIGSVEIRLFSRIAAARLSKTCPINPRQGGFICASGCAENLKLLQLVVKTAKRERKHLGVVFVDIAKAFDTVRHQHVIEGLVQRGVDPHVVELVREMYRDIRTYISMEREKTDHIYIRSGVKQGDPMSPLLFNLAMDPLLCKLEKEGEGFHHVGWKVTAMAFADDLVLLRDSWEGMCNNIKILEAFCELMGLRTQGEKCHGFYIKPTRDSYTINDCPSRIINRSLLNMIDPGSSEKYLGTWVDPWTGFADHGLSEKLIDWLHRIGASPLKPLQKVNILRTYTIQRLIYLPDHTEVNVGLLESLDQVIRNAAKEWLHLPPSTCDAILYSSFKDGGLGLIKLVALIPSIQARRLHRLAQSSDEALVSYLKEVHLERLFEKLWLKAGGRQESIPSIWEPLLLVEVGDVGEARSEWEAPVPKIRYPKPCDWWKIEFQKWCHLVTQGHGITNFENDAISNAWIKWFKGIPHRKLITALQLRANVYPTREFLARGRQEDVVRSCRHCGATFETVAHIVGNCVITQDARIKRHNAIYETPSDEAKREKWMVFQEPHLRDDVNEFFKPDLIFVKGSKAVAVDVMVRYEHSVTSLSEAASEKAKKYQRLHLQIQQLTNAVDNRLCWLPYGSPW

SEQ ID NO: 469 - protein, 1366 aa, Lichenostomus cassidix
MGPSIRLYQVSIGTQTSHLDWVDLVSENFKTDSSSARRVDLVSRGVDLVSRGVDLFSRNLPSGPPDSAKNEIELVNLEFCRSDRLCFANENVRFSMNWECLSRLPEVYEQLTPQPTAGDSDSGLPGTCVLENERESGESEGACASEPLPPEPENASLPATPPAPPESSGNGTPEDIPTVTVPDKHPPCPRCGTRQDSMRGLIEHLKRAHGEKRTRFRCSKCGREGFNFHSIACHVPKCKVTTVETAPAKEWTCEECGRDFKSKIGLSQHKRHAHPLIRNQERIEASRPKEINNTGAHKKCWTKEEEEMLVKLVTQFRDCKNINKLIAEQITTKTAKQISDQRRLLPKEPAGEDNDPGVSHRTRRAAADSKTMARGCERPGEIEAGGEPEMSHQSRGATAGVRTIPEAGHQPRESAGSVGTGSGKNHRPDKRRKHLEKLTTSDHQQREGQLRAHYQRTLGEWLSSGKINTFPEAFKQVLNGQEVSSLVNETAQDCFEDLELISQARTSTRGNSNKKGTQEVQSRRPRQKWMTKRAIKRGNYLRFQRLFHLDRGKLAKIILDDVESLSCDIPPSEIYSVFKARWDTPGGFDSLGNFQINGKADNSAFRDLITAKEIEKNVQEMSKSSAPGPDGITLGDIKKMDPDYSRTMELFNLWLTSGRIPDTVRGCRTVLIPKSTRPERLKDINNWRPITIGSILLRLFSRILTARLTKACPLNPRQRGFIKAAGCSENLKLLQTIIRSAKKNHRPLGVVFVDIAKAFDTVSHEHILHVLRQREVDPHIVDLVSNTYENISTFIDTKKAQTEHIQIRIGVKQGDPMSPPLFNLAMDPLLCKLEECGKGFHQGRDSVTAMAFADDLVLLSDSWEDMKRNIEILETFCHLTGLKTQGAKCHGFFIKPTTDSYTINNCSAWTINGTPLNMIDPGDSEKYLGLQFDPWTGVAKSELSTKIDFWLQRIGSAPLKPLQKIDILKTYTIPRLTYLADHSELKESFLEALDQTIRSAVKEWLHLPACTCDAILYSSTKDGGLGLTKLAGLIPSVQARRLHRLAQSSDETMKAFLEKDLMERRYEKLWIQAGGDKGNIPSIWETKPVREPTGSYSADTTSEWEAPSLKNKFPKPCNWRKIEFEKWTKLISQGRGISNFEGDKISNHWLENYRGIPHRKLLTALQLRANVYPTREFLARGRRDKCTTACRHCKADNETLAHIIGNCPITQDARIKRHNYICEVLIREAKKKEWVEFQEPRLRDTNKELYKPDLVFVKDDRALVVDVTVRYESAETSLEEAAAEKVNKYKHLETEIRELTNAKDVLFAGFPLGARGKWFHENFEVLGALSLSKTRQEKVARSLTTIALTSSVDIVHIFASRAKSSA

SEQ ID NO: 470 - protein, 1364 aa, Oenanthe melanoleuca
MPPTAQGGPIEMGENSGSDFGGGVWFRAPVRLSRVSVGSQTSPSDWVDLLSWNLNLFPGSKTQWVDLLPVHGVDLVSKNDRVNLAARNLPSKLSPDSAENELALVANLEFYRSDLQEGVHFSANREGLSGLPEVYEQLTPQPCAGDSLHANLPRDAKLFVLEQRCSEEKESEEAPETSPPTPGKPGGQTPEGTVTVTVPDKNPPCPCCGTRVNSVLALIEHLKGSHGRRRVCFRCVKCGKEGSNYHSIVCHFPKCRGAETEAAPAGEWICEVCGRDFQTKIGLGQHKRHAHPSVRNQERIVASHPKETSNRGAHKRCWTKEEEEMLIRLEAQFEGHKNINKLIAEHITTKTNKQISDKRRLLPRKPVEDLEEEPAVSTRTRRAAAGLRKEPGVSHQGQAVAENNGPGRSRLPGEPAAGEETMDEIRRRPDKGKGRRGAIKKQKEGQLQAHYHRTLGERLSAGTINTFPRAFKQLIEGQEMQATINQTAQDCFGCLEAISQIRTATRDKNNKGAQEKQPKRPFQKWMKDRAIRKGDYLRFQRLFHLDRGKLAKIILDDIETLSCDIAPSEIYSVFKNRWETPGNFTSLGEFQINGKADNSAFRDLITAKEVEKNVQEMSKGSAPGPDGITLGDIKKMDPEYSRTAEIFNLWLTSGKIPDTVRGCRTVLIPKSTEPERLKDTNNWRPITIGSILLRLFSRIITARLSKACPLNPRQRGFIRAAGCSENLKLLQSLMWSAKKEHKPLGVVFVDIAKAFDTISHQHIIQALQQREVDPHIIGLVSNMYKDTSTYITVKKNTRTDEIHFRVGVKQGDPMSPLLFNLAMDPLLCKLEESGKGYHRGGSSITAMAFADDLVLLSDSWENMKTNIKILETFCNLTGLKTQGVKCHGYYIKPTKDSYTVNDCAAWTINGTPLKMIDPGETEKYLGLQIDPWTGIAKSNLSTKLEYWLQRIDQAPLKPLQKVDILKTYTIPRLTYLADHSDLKAGFLESLDQKIRTTVKDWLHLPSCTCDAILYSSTKDGGLGIVKLAGLIPSVQARRLHRIAQSSDETMKMFLEKDQMEQTYRKLWVQAGGDREKIPSIWDAPPVSEPADSAETYSEWEAPSLKTKFPKPCNWRKNEFKNWTKLVSQGRGITNFEGDKISNHWLQYYRSIPHRKLLTALQLRANVYPTREFLARGRQDKYIKACRHCDAAIESCAHIIGNCPVTQDARIKRHNYICDVLLEEAKKKDWVVFKEPHIRDTTKELYKPDLIFVKDARALVVDVTVRYEAAKTSLDDAAAEKVNKYKHLETEVRNLTNAKDVAFMGFPLGARGKWHQKNFELLGALGLSKSRQEKIARTLSTTALMSSVDIVHMFASRARKLGNQE

SEQ ID NO: 471 - protein, 1434 aa, Phylloscopus trochilus
MSKPDPLNVNMSTPFLGTQMRLLRVSTGTQTSMSDWADWAQRLCGTATRSALCKVVPVSLLSRHQTELLAMGHGSQMPLNAPLNTPDLTESELACLVLDWEFYRTDLSASSFNLVQFSANRESLSGLPEVYEQPTPFQPEGEKICPPRDCEAVLVGEGEGSSEEVTPEPSPPEPETTSVAASPTLPVTNVEQSSESPITVIVPDKNPSCPCCGIRASGVSGLIEHLREVHRRREVCFRCSKCEKENTNYHSIICHFPKCKGKEETSAPAGEWSCEVCGRDFNTKIGLGQHKRLAHPAVRNQERVAASHPKENSKRGAHKKCWTEEEEKLLIELIAQFEGHANINKLIAEHITTKTAKQISEKRRLLSKKLMVVEAECEPGPSHRTRRAAAEIRKGAEMNHHNEDAAEDNGAGRGPLTRRAAARGETKEEISQFPDKANDQQEASSSGRGPVTRRAAAGKKTKKSIDHPTDKANGQQVAISTRRGCLNRGVTAGVETIEGSSHLPDKDSDGQGTPSREKEGQLQDHYQEVIGAWLSDGRINTFPEAFKGLLGKREIQATINQSILDCFGGIDSKSQVNKMTRDKKDKKPGRPPQKWMKKRAIKRGSYLRFQRLFHLDRGKLAKIVLDNIECLTCDIPPSEIYSVFKARWETAGKFTSLGDFKFTEKVDNSAFRDLITAKEVEKNMQEMSKGSAPGPDGITLRDIQKMDPKLSRTTEIFNLWLAAGKIPDGVRECRTVLIPKSTKPERLKDINNWRPITIGSTLLRLFSRILTARLSKACPLNPRQKGFIQAAGCSENLQLLQSIIWSAKREHRPLGVVFVDIAKAFDTVSHKHILHVLQRRGVDPHIIGLVSDMYENIHTSITTKKARTDRIQIRVGVKQGDPMSPLLFNLAMDPLLCELETNGRGHHRGTNCITAMAFADDLVLLSDSWEDMKSNIKILEAFCDLTGLKTQGEKCHGFYIKPTKDSYTVNDCAAWTINGTPLNMILPGESEKYLGLQIDPWTGLAKSDLSTKLDSWLEQIDRVPLKPLQKIELLKTYTIPRLTYVADHSDLKVSFLETLDQKIRTIVKDWLHLPACTCDAILYSSTKDGGLGITKLAKLIPSVQARRLHRIAQSSDETMKQFLHRDKMEAMYQKLWVQAGGDREKVPAIWEARPTIESPNLQEVGVSSEWEAPTLKNKFPKPCNWRKIEFEKWTNLISQGRGIGNFKGDQISNNWLQHYRNIPHRKLLTAVQLRANVYPTREFLARGRQDKYIRTCRHCDAANETCAHIIGNCPITQDARIKRHNYICQVLSEKAIGKDWIVYKEPHIRDSNKELYKPDLIFVKDNRAYVVDVTVRYESDETSLEMAATEKVDKYKHLTKEIRTITNAKDIVFMGFPLGARGKWYQGNFELLKALGLSKSDREKTARSLSSIALMSSVDIVHIFASKSRTCTTL

SEQ ID NO: 472 - protein, 1246 aa, Melospiza georgiana
MVQSLALRYISTATQTDPLDLRVNDAKSVPSLPREEGFNLVSLEFVNSGIVKGDGIHHADVWEFLGQLPEPYEISPMGLAQEEAVSAEGSFEEPRTPEAESRRGDTEEPKTPEAPYGSKAIGSMPKTPVVSMPDKQPSCPQCETRFTRMLGLIDHLKRVHGQRKIIFRCAKCGKQNLKYHSISCHIPRCKGMVCVAPTGDWVCEVCHRGFATKIGLGQHKRIRHPLVRNEERIIASHPKESSARGAHKQVWTEEEEALLIQLVDKYTGKRNINQPLAEHIPMKTAKQISDKRRRLVKGPSAEEHEGLVGAVGIEHPPESAKLPKEGQLKLQYRKMIKAGLSVGKFTMYREAFEKIVDGQDPGRVVNDVYNEFLGILGEPSQSKSICKGRKKQAPRGEKTSKTTPNWMCKRAIKRGKFLRFQLLFKSHRRRLTRIILDRTEAIQCQVPSSVVHDHFKNRWDTSGTFGGLLGFPPYKEANNVVFEALITEKEVDKNLKEMCKTSAPGPDGITLGQIIAKDPRFSRLTEIFNLWLITGTIPDALRDCRTVLIPKSSDVEKLGDINNWRPITIGSMVIRLFSRIATARLSKACPINPRQRGFICASGCAENLKLLQLVVKTAKREHKHLGVVFVDIAKAFDTVCHEHVFEGLVQRGVDSHVIDLVREMYRDVRTYISVGRGRTDPIYICSGVKQGNPMSPLLFNLAMDPLLCKLEREGEGFHHGGWKTTAMAFADDLVLLSDSWEGMCCNIKILEAFCNLTGLSTKGEKCHGFYIKPTRDSYTINDCPAWVINGSPLNMIDPGSSERYLGTWVDPWTGFADPRLSEKLTDWLHRIGRSPLKPLQKVDILRTYTIPRLIYLADHTEVKVGLLESLDQLIRNTVKEWLHLPQSTCDAILYSSFKDGGLGLIRLVALIPSIQARRLHRLAQSLDETLVNYLKEIHLERLFERLWLKAGGTQESVPSIWEPLPAVELGGDDEARLEWEAPAPKICYPKPCNWRKLEFQKWIHLVSQGHGIENFENDEISNAWIRWFGGIPHRKLITALQLRANVYPTREFLARGRQENVVQSCRHCGARYETVAHIVGNCAITQEARIKRHNAICETLSEEAKRECWAVYEEPHIRDEANELFKPDLIFVKGSKAVVVDVTVRYEHSEISLSEAASEKAKKYQRLHKQIEQLTNAKEIEYVGFPMGACGKWLGKNTELLTALGLSKTRLERTARALASKVLFASVDIAHIFVSKARSTVSVNTL

SEQ ID NO: 473 - protein, 1181 aa, Geothlypis trichas
MDNMVQSLALHFISIATQTDPLDLQVTEVEVPSIPSVPREEGLQLVCLEFVNSRIVKEGGIHHADVWEGLAQFPEAYEISPMGLAQDVPEGVVGGTGGIDEPKTPEAPPRSDSTTVKSPVVYVPDKQPSCPRCETRFTRMLGLIDHLKRVHGQKKIIFRCSKCGKQNLKYHSISCHVPRCKGVVCVVPTGKWICEVCHRGFATKIGLGQNKRIRHPLVRNVERIVASHPKESSSRGAHKRVWTDEEEALLVQLVDMFAGKRNINQLIAEQIPSKTAKQISDKRRLLFRVPSAKDHVGRGGAIGIEHQAESAKLPKEGKLKHRYCEAIKAGLSAGKFTMYREAFEKILEGQNPGQVVNDVYKEFCGILDVPSQIKSAKGRKARPSRSPKASKTPTNWMRKRAIKRGKFLRFQLLYELHRRCFARIILDSTEVVQCQLPSSVVQDHFKRRWDISGVFGGLQNFPPYEEADNTLFEALITEKEIEKSVSEMCKTSAPGPDGITLGQLVKKDPEFSRLSEIFNLRLITGTVADALRDCRTVLIPKSSVSEKLGDINNWRPITIGSVEIRLFSRIAAARLSKTCPINPRQGGFICASGCAENLKLLQLVVKTAKRERKHLGVVFVDIAKAFDTVRHQHVIEGLVQRGVDPHVVELVREMYRDIRTYISMERERTDHIYIHSGVKQGDPMSPLLFNLAMDPLLCKLEKEGEGFHHVGWKVTAMAFADDLVLLRDSWEGMCNNIKILEAFCELMGLRTQGEKCHGFYIKPTRDSYTINDCPSRIINRSLLNMIDPGSSEKYLGTWVDPWTGFADHGLSEKLIDWLHRIGASPLKPLQKVNILRTYTIQRLIYLADHTEVNVGLLESLDQLIRNAAKEWLHLPPSTCDAILYSSFKDGGLGLIKLVALIPSIQARRLHRLAQSSDEALVSYLKEVHLERLFEKLWLKAGGRQESIPSIWEPLLLVEVGDVGEARSEWEAPVPKIRYPKPCDWWKIEFQKWCHLVTQGHGITNFENDAISNAWIKWFKGIPHRKLITALQLRANVYPTREFLARGRQEDVVRSCRHCGATFETVAHIVGNCVITQDARIKRHNAIYETLSDEAKREKWMVFQEPHLRDDVNEFFKPDLIFVKGSKAVAVDVMVRYEHSVTSLSEAASEKAKKYQRLHLQIQQLTNAVDNRLCWLPYGSPW

SEQ ID NO: 474 - protein, 1245 aa, Xenus cinereus
MGWLGRIWFVSVATQTNYSDWAFTVHSITNPELPGDGNAEIRGLEFCNSEKGYYVGHSPSWFSVLDTLPEVYETPMLQGNVISPRSEPAEQEGERPSSPPITPPPPILETEADLPQEGTPVVKVPDENPACPCCGNRMGRISGLIDHLKRTHGKRKILFQCARCGKTNLKHQSIACHVPKCKGVEGLSPVRAWTCEECNRSFGTKIGLSQHKRLAHPVTRNLERITASRPKEESARGAHRRCWSEEEVELLKKLEKQYEGNRNINKLIAEHLPSKTAKQISDKRRGLVKSPSKKSPSKRKGKNLALREQLMEEGEHLPESGSQDGGGLRPHYRKVIAEWIRSQKITSLKDVFERVIKGKEDLPLLVDKAAQDHYACLKMDLIEEGDRQSQKIREIRRPRPQKPSKQWTKRRARKRGQFLRFQRLFHLDRGKLAGIILDDVESLQCGIPLDVVHEVFKSRWESPGTFKGLGTFNTIGHADNSAFQTLITAKEIVKNIREMNKNAAPGPDGISLRDLMKTDPHCTKLMELFNLWLTTGYIPEGIKNCRTILIPKSSVPEKLNDVNNWRPITIGSIVLRLFSKILTARLTKACPINTRQRGFIRSPGCSENLKLLQLLIRYAKREHLPLGVVFVDLAKAFDTVSHSHIIAVLKQKGVDEHIIRLIENSYENINTYIDMKNVKSDLIGIQIGVKQGDPMSPILFNLSVDPLLCKLEEMGNGFQYYTKDVTSLAFADDLVLVSGSWEGMQRNIEIVETFCELTGLKMQGEKCHGFYIKPTKDSYTINDCPPWTINGTPLNMIEPGSSEKYLGLYIDPWTGISKPELLEKVDRWLSKVGKAPLKPFQKVDILKGHLIPRLIYLADQANLKSTHLESLDLAIRIGVKEWLHLPSCTCDSILYSNTQDGGLGISRLAALIPSVQARRLHRIAQTTDDVLRTVVEREGIEGEFKKLWVTAGGDKEKIPSIWDPKTIMVISETGGDQSLSEWETPNPKIFYPKPCNWRKREFNNWTKLLTQGRGIANFEKDKISNNWIIHYRGIPQRKLITALQLRANIYPTREFLSRGRSETYIKSCRHCQADNETCSHIIGYCPSVQDARIKRHNQICHILAEEAKSKDWLVYQEPLLRDQQNELYKPDLIFVKGNQAIVTDITIRYETSLTTLEEAALEKAKKYAHLVTQIQDLTNTSVINFTGFPLGSRGKWYQNNFKILKELGLSSSRQEKVARRLSNYALFSSVDIVHMFASKARTEVR

SEQ ID NO: 475 - protein, 1392 aa, Aphelocoma californica
MEISKPFLGPPIRLYQVSVGTQTSNSDWVDLVSRDFKPGSLSKSCGVDLASLISERRVALLSKTDRVDLVYLTSKRQVDLLAKTNQADLVPQNLPSGSPNSAENELDLVNLEFYRSDWCVDNVCGHFSVNWVGLSGLPEVYEQPTPQPSAGGGDHPPKDSEVIVLSDGEESGEHERGSALETSPPEPETTSETSPPEPGTSALPAPSPPPAEDHGKQAPGDILVVTIPDKNPPCPCCGTRVGGVGGLIEHLREAHGRREACFRCAKCGKESNNCHSIVCHFPKCRAKTETAPAGEWICEECGRDFKTKIGLGQHKRLAHPMIRNQERIAASHPKETSNRGAHKRCWTKEEEELLIKLETQFEGNKNINKLIAEHIPTKTAKQISDKRRLLPRKPTEDVCEEPGVSHRTRRAAAGLKIEPGLSTQPGKGTEDKEPEISQRLRRPAAGRRAEPEIRHHPDKRTKQLGTIDQQREGQLQAHYLKKLGEWLSAGTIKTFPRAFKQLIKGREMQPLVNETAQDCFGCLEAKSQTKPTARDKDKRETREGKPTRPLQKWMKKRAVKRGKYLRFQRLFHLDRGKLAKIILDDVECLSCDISPSKIYSDFKARWETAGKFDGLGDFQINGKADNSAFRDLITAKEIEKNVQEMSRNSAPGPDGITLRDIRKMDPEFSQTMEIFNLWLTSGKIPDMVRGCRTVLIPKSSRPERLKDINNWRPITIGSILLRLFSRILTARLTKACPLNPRQRGFIRAAGCSENLKLLQTIIRSAKREHKPLGVVFVDIAKAFDTVSHRHILQGLQQRCVDPHIVSLVSNMYENIRTYITTGKTQTDHIQLQVGVKQGDPMSPFLFNLAMDPLLCELETSGKGYHRGQSSVTAMAFADDLVLLSDSWENMKQNIRIVETFCDLTGLKTQGEKCHGFFIKPTKDSYTVNDCAAWTINGTPLNMIHPGESEKYLGLQIDPWTGLAKSDLSTKLENWLEKIGKSPLKPLQKLDILKTYTIPRLTYLADHSDLKAGFLEALDQTVRTTVKEWLHLPTCTCDAIFYSSTRDGGLGLTKLAGLIPSVQARRLHRLAQSSDETMKMFLDKDQVEQLHKKLWVQAGGDREKIPAIWEAKPANVPSTSCSADITSEWEAPSFKSKFPKPCNWRKNEFKNWTKLVSQGRGIENFEGDKISNHWIQYYRGIPHRKLLTALQLRANVYPTREFLARGRKDKYTKACRHCEADNETCAHIIGNCPITQDARIKRHNYICKVLSEEAKKKDWVVFQEPHLRDTNKELYKPDLIFVKDARAFVVDVTVRYEASKTSLEEAAAEKVNKYKHLTEEIRELTNAKDVVFMGFPLGARGKWYHGNFELLGALGLSKTRQERVARTLSSIALTSSVDIVHMFASRSRNCKVV

SEQ ID NO: 476 - protein, 1230 aa, Cichladusa arquata
MVQTISLRYISTGTQTDPLDLWVIKADVSSTPPTLIDERFDLVCLEFVNSSYSEESGFHPECIWEGLANLPEPYETLPLRLVQSEESECVQTVVEELKTPEALPGPSGDRTPVGTPVVSVPDKNPACPRCATRFTRMLGLIDHLKRNHGQKKIWFKCSKCGKQNLKYHSIACHFPRCKGEVCVVPTGDWVCEVCQRSFTTKIGLGQHKRLMHPLVRNLERIEASHPKVSSLRGAHKKVWTEEEEALLSQLVVAYAGRKNINQLIMEHIPSKTAKQISDKRRLLMKVPSKKDRLEEEGAGKEEPPQSADLPQEGQLKLQYSDAIKRKLAACEFTSCQEAFEKFIDGQDLQTVVNEVYEKFLGSPCGLSQDVKPSRGRKLQKVQKASGTTTNWMRKRAKRKGKYLRYQRLFHLQRGRLARIILDNIEAIQCQIPSDIVHAAFKARWETSVGFKGLESFPPHGKADNTVFQALITEKEVEKNLKEMAKTSAPGPDGITLGQLLKKDPKFSLLTEIFNLWLVTGTIPDLLRDCRTVLIPKSTDLEKVGDINNWRPITIASTVLRLFSRIVTARLTRACPINPRQRGFIRASGCSENLKLLQLVVRHAKREHCDLGVVFVDIAKAFDTISHEHIIMGLTQRGVDPHVIQLVIELYKNISTYIDMKSERTDPIKILRGVKQGDPMSPILFNLALDPLLCKLETDGYGFQRGRLRLTAMAFADDLVLLSDSWDGMCGNIKILETFCELTGLQTKGEKCHGFYIKPTKDAYTINDCPAWTINGSPLNMIDPGNSEKYLGIQVDPWTGFADSGLSKRLEEWLQRIGDAPLKPLQKVDILRTYTIPRLIYLADHTEVKSGPLESLDLIVRNEVKVWLHLPPSTCDAILYSRCKDGGLGIIKLSALVPSIQARRLHRLAQSSDETLVQFLKGEHLELLYEKLWVRAGGEKESIPIIWEPIPMDVSVGSGGEGLSEWEAPVPKIRYPRPCNWRKVEFNRWKHLVAQGHGIENFENDNISNGWLIHYRGIPHRKLVTALQLRANVYPTREFLARGRGDVCVRSCRHCGADYETTAHIIGSCPITKEARIKRHNSICETLSNEAKREGWSVFQEPHIRDEKQELFKPDLIFIKGNKALVVDVTVRYEHNNSSLKEAAAEKAKKYQCLVHQIKDLTNAAEIEFIGFPIGARGKWYEKNSELLTALGLSKTRLGKTARALASRALLTSVDIVHIFASKARSVVSNK

SEQ ID NO: 477 - protein, 1302 aa, Erithacus rubecula
MVQLVSLRYISTATQTDPLDLRVATAAISSIPPTRHDEGFRLMCLESIPPTRHDKGFQLKCLESIPPTRHDKGFQLKCLESIPPTRHDKSFQLKCLESIPPTRHDEGFKLKCLEFVNSSYNEEIGYHLGGIWEGLADLPEPYETLPFRLVQGDVSECVRTVVEEPKSPEALPGLSSEGTPSGTPIVSVPDKNPFCPCCATRFTRMLGLIDHLKRNHGQKKIWFKCSKCGKQNLKYHSIACHLPRCKGEVCVVPTGDWACEVCQKSFTTKIGLGQHKRLAHPLVRNLERIEASHPKVPSLRGAHKKVWTEEEEALLSQLVMIYEGKKNINQRIMEHLPSKTAKQISDKRRLLMKVPSKGVLSQEEGVGSEDLPQSVDLPQEGLPQEGRLKLQYSVAIKRMFATYGFTSCQEAFAKILDGQDPQMVVNEVYEKFFGSPLELSQDGKSTRRRKSQKGQKASKTTTSWMRKRAKKKGKYLRYQRLFHLHRRRLARIILDDVEDLQCQLPSNIVHAAFKARWETPVGFKGLQSFPPHGRADNTAFQALITPKEVEKNLKEIAKTSAPGPDGITLGQLLKKDPKFSLLTEIFNLWLVAGTIPDLLRDCRTVLIPKSTDLEKVGDINNWRPITIASTVLRLFSRIVTARLTRACPINPRQRGFIRASGCSENLKLLQLVVRHAKREHCDLGVVFVDIAKAFDTISHEHIIMGLRQRGVDSHIVQLAVDLYKNINTFIAMKSGRTDPIKILRGVKQGDPMSPILFNLALDPLLCKLEKNGYGFQRGNLRITAMAFADDLVLLSDSWDGMCGNIKILETFCELTGLQTKGEKCHGFYIRPTRDAYTINDCPAWTINGTPLNMIDPGNSERYLGIQIDPWTGFADSGISKKLEEWLHRIRDAPLKPLQKVDILRTYTIPRLIYLADHTEVRGGPLEFLDLVVRNEVKGWLHLPPSTCDAILYSKCKDGGLGIIKLSALVPSIQARRLHRLAQSSDETLVQFLKGEHIEVLYEKLWLRAGGVKESIPTIWEPIPVSVSVVSGGGDVSEWEVPVPRPCYPRPCNWRKTEFNRWKHLVAQGHGIENFENDNISNGWLTQYRGIPHRKLITALQLRANVYPTREFLARGKKDVYVTTCRHCGADYETTAHIIGSCPITKDARIKRHNSICETLSNEAKREGWSVFQEPHIRDENQELFKPDLIFIKESKALVVDATVRYEHNNSSLKEAAAEKVKKYQCLLQQVKDLTNAEDIEFIGFPIGARGKWYEENFDLLLALGLSKTRLGKTARALASRALLSSVDIVHIFASKARTVVSN

SEQ ID NO: 478 - protein, 1246 aa, Myiozetetes cayanensis
MGLLMRLMHVSTATQTNINDLKPVTTKLSETITPVTLPSDDIELCQLEFSNSNEIEDWQTTKFVDQREKLALYPEVYESLPSDSVRENNIILSGNDIDADGEGEDSFALATEFVLDSQKDNLPGETPLVKLPDKTPSCPCCKIKIMGIEKLVDHLLRSHGKRKIIFQCVTCGLQNENYRSIVCHYPLCKGASEVIPSGDCVCEECGRSFQTKRGLGQHKRHAHPEVRNQERIDAARLKVKTSREPARKCWSKEEEELLEKLVQQYEGERCINKLIAEHIPTKTLKQISDKRRCMKPVRKEKEDQEICVQVAKRKNQPAVTETSNPDQLRAHYVETIKKGIKLRTINIYPRAFRKIVEGSKDQLTLVNDTTEDWYGHLKARCQAERKIKVGSKKKKAQETQSKRKATNWMKKRAIKKGQYLRYQKLFYKDRGKLANIILDEIESVKCEIPLSEVFSVFKSKWETTGKFKGLGHFQSKGMADNSAFEVMITEKEVAKNIKEANKNAAPGPDGIIMKDLIKMDSKYTEITELFNLWLTSGKIPDSLRRCRTILIPKSTKPDRLNDINNWRPITIGSAVLRLFSKILTARLEKACPINLRQRGFIKSPGCSENLKLLELIIRNAKKQHRELGVVFVDIAKAFDTVSHQHIIMGLKQKGVDSHIINLIANMYENIYTEIGTKEEKSEPIQIKVGVKQGDPMSPILFNLAMDPLLCELEQYGKEYHYDTKSITAMAFADDLVLLSDSWEGMKENIEILEVFCDLTGLKTQGEKCHGFFIKPTKDSYTINDCPPWTVGGTPLNMICPGSSEKYLGLHIDPWMQIAKPDLSSKIDTWLDRISESPLKPLQKVDILKIYMIPRIIYLADHTEIKTGFLEALDLKLRARVKKWLHLPNDTCDAIFYSSMKDGGLGIIKLQSLIPSVQARRIHRLAQSSDETLRDILQQENISQKYEKLWITAGGDKDQIPDIWAPKPTVQTSYLGEEDTSEWEVTTSKNTYPRPCNWRKTEFRKWTKLQSQGIGIVNFEGDTISNSWIKNYRGIPHRKLLTALKLRANVYPTREYLARGKKDGWTTSCRHCKAENESCAHVIGQCPAVKDARIKRHNYICEMLLNEARRKDWVVYQEPNIRDSDGELFKPDLVFVKEKQALVVDVTVRYEGDVNTLEKAAKEKVKKYQHLEKEIQELTNTEKVIFVGFPLGARGKWFNKNFDLLQTLGLSSSRRERVARAMASRALLTSVDIMHIFTSKVRTAINK

SEQ ID NO: 479 - protein, 1375 aa, Phylloscopus trochilus
MSQVGGLTTHYRPTERGGGIPDLDKSGCDLGGGGVWSGPPVRLVRVSVGCQTSPGDWVDLVSWNRNFVPGSKSKSQRVDLVSRHRVDLFSKNDWVDLVAQNLPSKLPPDSAENELASLANLEFYRSDLHGDEGIHFSAVWEGLSGLPEVYEHLAPLPCAGDNSHPSPPRDNNMFVLEERFCREKDSGDAPKTSPPEPGEPGEQTPVETVTVTVPDKNPPCPCCGTRVNSVLSLIEHLKGSHGKKRICFRCVKCGKENPNYHSVVCHVPKCRGPETEAAPAGEWICEVCGRDFKTKIGLGQHKRHAHPLIRNQERIVASHPKETSNRGDHIRCWTKEEEEMLIKLEAQFAGHRNINKLIAEHITTKTNKQISDKRRLLPRKSDKEVEEEPAVCTRTRRAAAGLRKEPEMSHHDQAVTEDNGPGKSHLPGKPAAGKKTRDEISQRPDKGNGRRGAIKHQGAGQLQAHYHQTLGERLSAGTINTFPHAFKQLMEGQEMQLTINKTAQDCFGCLESISQIRTATRDNNNKGAREKRPKRPFQKWMKDRAIKKGDYLRFQRLFHLDRGKLARIILEDIEALSCDIPPSDIYSVFKDRWETPGNFKCLGEFQINGKADNSAFKDLITAKEIEKNVQEMSKGSAPGPDGITLGDIIKMDPEFSLTAEIFNLWLTSGKIPDMVRGCRTTLIPKSTDPERLKDTNNWRPITIGSILLRLFSRIVTARLSKACPLNPRQRGFIRAPGCSENLKLLHSIIRTAKKEHRQLGVVFVDFAKAFDTVSHQHIIHALQQRGVDPHIIGLVSDMYKDISTHITVNKNTHTDKIHFRVGVKQGDPMSPLLFNLAMDPLLCKLEECGKGYHRDGNSITTMAFADDLVLLSDSWENMKTNIKILETFCNLTGLKTQGVKCHGFYIKPTKDSYTVNDCAAWTIYGTPLNMINPGEFEKYLGLQIDPWTGFAKSNLSTKLDYWLQQINQAPLKPLQKVDILKTYTIPRLTYLADHSELKAGFLESLDQKIRTTVKDWLHLPSCTCDAILYSSTRDGGLGITKLAGLIPSVQARRLHRIAQSLDETMKMFLEKDQMEQLHEKLWVQAGGDREKIPSIWEAPPVSNPSNSAGASSEWEAPVLKTKFPKPCNWRKNEFKNWTKLVSQGRGIINFEGDKISNNWLQHYRSIPHRKLLTALQLRANVYPTREFLARGRHDKYSKSCRHCDADTESCAHIIGNCPVTQDARIKRHNHICEVLLEEAKKKDWVVFKEPHIRDTNKELFKPDLIFVKDTRAIVVDVTVRYESAKTSLEDAASEKVDKYKHLETEVRSLTNAKDVDFMGFPLGARGKWYPKNFELFTALGLSKSRQEKIARTLSTTALLSSVDIVHMFASRARKF

SEQ ID NO: 480 - protein, 1243 aa, Scolopax minor
MGWSGRMRFVSVATQTKYSDWAFTVPSILNPELAGDEIANISANISGLEFVNSEKGYDVGLSPSRSSLLATLPEPYESPRVMGIVISPRSEQTEYEGERTSSPPRTPSPPVLEAGADLPQEGTPVVKVPDNNPACPCCGNRMGRITGLIDHLKRTHGKKKILFQCARCGKTDVKHHSIACHVPKCKGAKESSPLRGWTCEECNRTFGSKIGLSQHKRLAHPVARNIERITAARPKEESARGAHRRCWSEEEVELLKRLEKQYEGNKNINKLIAEHLPTKTAKQISDKRRGLAKSPPKKKGKDLALREQLIQEGEHLVPSGSHEVGGLRSHYRKVIAEWLRSQKITTLRKTYERVIKGKEDLPSLVDEAAQDCYACLRKDLIEGEVHQIRKIREIRRPRPQKPSKQWTKKRARKRGQFLRFQRLFHLDRGKLAGIILDDVETLKCGLPLEAVHEVFKSRWESPGTFKGLGTFCTVGHADNSAFQSMITAKEIKKNIREMNKNAAPGPDGITVRDLLKIDPQCIKLMELFNLWLLTGYIPDDVKSCKTILLPKSNVPEKLNDVNNWRPITIGSIILRLFSKILTARLSKACPINTRQRGFIKSPGCSENLKLLQLLIRYAKREHHPLGVVFVDLAKAFDTVSHSHILAVLRQKGVDEHIIRLIENSYQNIHTYIDMKNEKSEPIGIRIGVKQGDPMSPILFNLSVDPLLCKLEEIGNGFKCHSQNVTALAFADDLVLLSGSWEGMQSNIEIVETFCELTGLKMQGEKCHGFYIQPTKDSYTINDCPPWTINGTPLNMIEPGSSEKYLGLYIDPWTGISKPELLEKVDRWLERVGKAPLKPFQKVDILKGYLIPRLVYLADQANLKPTYLEHIDLAIRNAAKEWLHLPACTCDAILYSNTQDGGLGISRLTALIPSIQARRLHRIAQTSDDVLKEIVKQEGIEREFEKLWLMAGGDKEKIPSIWDPKTIMVISETGDDELSEWEMPNPKLIYPKPCNWRKREFTNWTKLLSQGRGIVNFEKDKISNNWITQYRGIPQRKLITALQLRANIYPTREFLARGRQETYIKSCRHCQADNETCAHIIGYCPSVQDARIKRHNQICQILAEEAKSKDWLVYQEPLLRDERNELYKPDLIFVKGNQAIVTDVTLRYETTVTSLEEAALEKAKKYAHLKTQVQDLTNASIVNFTGFPLGSRGKWYQGNYKVLKELGLSSSRQEKVARRLSNYALFSSVDIVHMFASKARTEVR

SEQ ID NO: 481-500 - skipped (20 entries)

SEQ ID NO: 501 - DNA, 4828 bp, Agelaius tricolor
  source 1..4828: mol_type = genomic DNA
ggcggcttttgagagtatagttgcaaactgggcttcgttgcagagatcgcacctcctcgtggtcccgctggtagccctgcgtagggtgaccaagtcgatctctgccccaggtacggaaccgttggggctcaccagtccaacggattcctaccaaattcggtgaaacaaattcctcggtaaaagccgcatggcttattgcctgaaacctggccccccggtttcagacaggggcatggagttcggaaatggactgaccacccattccgttctcaccgtcgaatgtggtcccaattcgatggttattccggatccgtcctttggggggggggtctgggggccgccggtacgcctgtccagggtatcggtgggcactcagacttccccctccgactgggtagacctgttgtccaggggtttacccggcgccaggtctaactcccagcgggtagacctggtgtctttatttcccagacaccgggtagacctgttgtccaaaactcagcgggtagacctgttgtctgaaagtcagcgggtagacctgttgtccaaaagacagcgggtagacctgttgtctgacagtcagcgggtagacctgttgtccaaaactcaccgggtagacctgttgtctaaaactgaccgggtagacctggtgtcccaaattgacttaacatctaaaaccaccaatttggcagaaaatgaattggatttgctggtgaatttttctttagagttctatagatcggacttgcatgtgcatgagggtgttcatttttctgtggattgggaagtgttgaacgggttgcccgaggtgtatgaacaacttgcaccacaaccgtgtgtgggggagaacttagactcgagccccccacaagacagcgaaccgcttgtgcttggtgagggaagcggcgagaaggagggagaaggcgcaccagaggcattgcccccagtgcctggggaaaacggagagcagtcaccggatgagatcgtgaaggtgactgttcctgacaaaaatccaccttgtccttgctgtggtacccgggtaaactctgtggtaagcctgcttgaacatcttaaggggtcacacgggaaaaagagggtttgctttcggtgtgccaaatgtggaaaagaaaatgttaactatcatagtgttatttgtcattttccaaaatgcaagggtgcagaaattgaaaaggttccagctggagagtggatctgtgaggtatgcggcagagatttcacaaccaaaattggcctgggacaacacaaaagattggcgcacccgttgataagaaaccaagaaaggatcgttgcttcccaaccgaaagaaacatcaaaccgaggagcccacaaaaggtgctggacaaaagaagaggaagaactgctgataaaattggaggcgcagtttgagggaaacaaaaacatcaataaacttattgccgaacacataacgaccaaaacggcaaagcagattagcgataaaagaagattgctgcccaaaaaattgccagaggtaacggacaaggaacctggggtgtgtcttcgcaccaggagagcggccgccagcgtgagaacggaacctgggatgagtcaccagtcccaggcgggaatattggacaatggacctgggaaatgccacctgccagggaggccggctgccggagagaaaacaatggagaagttgagacgacaccctgataaggataacggtcgccagaagaccagcggccagcggagggaggggcagctgcaggctcattatcaaaagacgatcaaagaaggcttatcagctggagcaattaacaacttccccggagcattcaagcaattaatggacggccgggaaatgagaacaatgatcaatcaaacagcgcaggactgctttggatgcctggaatcgataagccagataagaactgctatgcgtgacaaaaattccgggaagaaggcaactgaggagcacccaaaaagaccattccagaagtggatgaaagatagggcgatcaaaaaaggtaatttccttcgcttccagcgtttatttcatctcgacagggggaaactagcgaaaattattttggatgacatcgaatgcttgtcctgtgatataccacccagtgaaatttattcggtctttaaagccagatgggaaacacctggtaattttgccggccttggggactttaaaattactgggaaggcagacaacaatgccttcaaggacttaatcacggccaaagaaattgaacgaaatgtgcaggaaatgagcaagggctcagctccaggtccggatgggattactcttggggacatcgtaaagatggatcccgggtattcccggactgctgagctcttcaacttatggttaacatctgggaagatcccggacatggtgagggggtgcagatctgttctgattccgaagtcgacaaaaccggaaagattaaaggacatcaataactggagacccatcacgatcggttccatcttgctgaggctgttctccaggattgtaacagcaaggctaagcaaagcgtgccccctcaacccaaggcaaagaggctttattagagcggcaggttgctctgaaaacctgaaactcctgcaaactataattcggactgccaaaaaggaacacaaaccactgggtgttgtattcgtggacattgctaaggcttttgacaccgtaagccaccaacacatcctacacgctttacagcagaggggagtggatccccacatcattggactggtgaacaatatgtacaaggacatcagtacgtatgttaccacaaaaagagacacacacacagacaaaatccagatccgggttggagtaaagcaaggtgacccgctgtcaccccttttatttaacctggcaatggaccccctgttgtgcaagctggaagagagcggtaaaggatttcatcgaggagagagcagtataacagcaatggcgttcgctgatgatttggtcttgctgagcgactcctgggaaaacatgcaaacaaacatcaagatattagagaccttttgcgatctcaccggtctcaaaacacaaggggaaaagtgccacggcttctacataaagcccacaaaggactcttacaccattaatgactgcgctgcatggaccatcaatggcacacccctgaacatgattaatcccggagaatctgagaaatacctcggtctgcagattgacccctggactgggctagcaaaaaccaacctcaccacaaaattagaattctggcttgaacgaattgatcaagctccacttaaacctctgcaaaaactcgacatcctcaaaacttacaccatccctcgactgacctacctggctgaccattcagaaattaaagcaggggctctggaagctctcgaccagaagatcagaacagcggtcaaggactggctgcacctacctccgtgcacctgcgatgccatcctgtactcgagcacgaaggacggcggtttgggcgtcaccaaattggcgggactgatccccagtgtacaggcccgaagactgcaccggatagcgcagtcctcggatgagacaatgaaggagttcctggagaaagatcaaatggaacaattatatagaaaactgtgggttcaagctggaggggaaagagaagagataccctcaatttgggaggcactaccgacaagtgaaccatctaatagagcagacacaacctcggagtgggaagcaccgagcctgaaaactaaattccctaaaccttgtaattggaggaagaaagaattcaagaagtggaccaaattagtatcccaaggccgcggtattagtagctttgaaaatgactcgattagtaacgattggctccaatattatagacgcatacctcacaggaaactcatcactgcactacaactcagggctaacgtctaccccacgagagaatttctcgcccggggtagagaggaaaattccaccaaggcctgtaggcactgcaacgtggaaaatgaaacttgcgcccacatcatcggccaatgcccagtgacgcaggacgccagaatcaagaggcacaatcacatctgtgacatgcttagtgaggaggcgaggaagaaggactgggtagtgttcaaagaaccgcacataagggataccaccaaggaactgtacaaaccagatctgatatttgtcaaagacggacatgccttcgtcgtggatgtgacagtacggtatgaaaccaccaaaacatctctggaagaagccgctgcagagaaagtaaacaagtacaagcatttagaaaccgaggtgcgaaacctcaccaacgcaaaggacgttgtttttatgggttttccccttggagcgcgggggaaatggtacacagggaattttgaacttttgaatacgctcggcctctccaaatcgaggcaagtgagggttgcaaagactctatccacggtagcgctcctgtcatctgtggacattgtacatatgttcgccagtagggccagaagggtacaggattcagggtaatgaatttagattgtactgtttgtagatttttgtaggactgtttttatatattgttttcttgtatgtaacttttgtaatttttattacttgtactttattttataaataaactagacggtagctaggttcgtagggcagccacaagccagttaggtagctcatagtaggtagggacagagactttaattctaaacgcgtcaagtaccacctgatttggactgaattaccggacctgaaccaatttaccggatatgtccaaggtggacgggccacctttacttaacccggaaaaggagcatatattatttatatgtgttcgaaata

SEQ ID NO: 502 - DNA, 4728 bp, Chamaetylas choloensis
  source 1..4728: mol_type = genomic DNA
ggcggcttttgagagtatagttacaaactgggcatcgctgcagagatcgcacctcctcgtggtcccgctggtaaccctgcgtagggtaactaagtcgatcttctgccccaggatggagccgttgggaatcgccagttcaacggtctcctgccaaaaattcggtgaaacaaattcctcggtaaaaagccgcgtggcttcattgcccgaaacctggccccccggtttcaaaggggcaatgtctccggtaagtggactgaccacccactaccgttccaccttccaaggtgggcccattccgatgggttctggctctgatttgggggggggggtctggtttagagcgccggcacgcctgtccagggtgtcggtgggctcccagacctcccccagcgactgggtagacctgttgtcctggaattttaattttttaccaggctccaagtctaattcccagcgggttgacctgttgtctaggcactgggttgacctgttgtccaaaaatgaccaggtagacctggtggctcaaaatttaccatccaaattgtcccccgattcggcagaaaatgaattggctttgctggtgaacttagagttttacaggtcggatttgcatgagcatgagggtgttcatttttctgctaattgggagggtttgagcgggttgcctgaggtgtatgaacagctagcaccacaaccgtgtgcgggagatagttcacattctagtctcccgcgggacactaaactgtttgtgcttgagcaaaagggcagcgtggagaaggagagcgaggacgtgccaaaaacatcccctccgacgcctgggaagcccggggagcagacacctgaggagacggtgacggtgactgttcccgacaaaaatccaccttgtccttgctgtggtacccggctgaactctgtgttgggcctaattgaacatctaaaggggtcgcacgggaaaaagagggtttgttttcggtgtgttaaatgtggaaaggaaggtactaactatcacagtattgtttgtcactttcccaaatgcaggggtgcagagactgaagcggctccagctggggagtggatctgtgaggtatgcggacgagattttcaaactaaaattggcctgggacaacataaaagacatgcacacccgttgataagaaaccaagagaggatcgctgcttcccacccgaaagaaacatctaaccgaggagctcacaaaagatgctggacaaaggaggaggaggagatgctgataaagttagaggcgcagttcgagggccacaaaaacatcaataaactcatcgcggaacacatcacaagcaaaacagctaagcagataagcgacaaaaggagattgctgcccaggaaaccagataaggaccttgaagaggaacctgctgtgagtactcgcaccaggagagcagctgcgggcctgagaaaggaacctggggtgagtcatcaaagccaggctacgatcgaggacaatggacctgggcggagccaccggccagggaagccagctgccggaaagaaaacaatggacgagataagccaccgccctgataagggtaacggccggaggggaaccatcaagcagcagatggctgggcaactgcaggcccattatcaccggacactcggggaaaggctatcagctggggcaattaacaccttcccccgggcattcaagcagttaatggaaggccaggagatgcaagaaaccatcaaccaatcagcgcaggactgcttcggatgcctggaatcgataagccagataagaacagcaacccgagataagatcaacaaagggacccgggagaagcacccaaagagaccttttcaaaagtggatgaaggacagagcaattaggaagggtaattaccttcgcttccagcgattattccatcttgacagggggaaacttgcaaaaattattttggacgatgttgagactttgtcctgtgatattccacccagtgaaatttattcggtttttaaagatagatgggaaacacctggtaactttaatagccttggggaattccaaagtaatgggaaagccgacaatagcgctttcagagacttaattacggccaaagaaattgagaaaaatgtgcaggaaatgagcaagggctcagctcccggtccagatgggattactcttggggacgtcaaaaagatggatcccgagtattcccggacagcggagatcttcaatctgtggttaacatctggaaaaatcccggacatggtgaggggatgcaggactgttttaattccaaaatcaacagaaccggaacgtttgaaggacattaacaactggagacccatcacaattggttccatcttgctgagacttttctccaggattgtaacagctaggctgagcaaggcctgccccctcaacccaaggcaaagaggcttcatcagagcggcgggatgctctgaaaacttgaaactcctgcaatctgtaatgcggtctgccaaaaaagaacacagaccactgggtgttgtattcgtggacattgccaaggcttttgacaccataagccaccaacacatcatacacgctttgcagcaaagagaggtggatccccacatcatcggcctggtgagcaatatgtacaaggacatcagtacttatatcaccgtaaagaaaaacacacacacagatgaaatccatttccgggttggagtaaaacagggtgacccgatgtcaccccttttatttaatctggctatggaccccctgttgtgcaagctggaagagagcggcaaagggtaccatcgaggccggagcagcatcacggcgatggcattcgcggacgatctggtcttattgagtgactcctgggaaaatatggaaacaaacatcaagatattagagaccttctgcaatctgaccggtctcaaaacacagggagtgaaatgccacggctactacatcaagccgactaaggactcttacaccgtcaatgactgcgctgcttggaccatcaacggcacacccctgaacatgattgaccccggtgaaactgagaaatacctaggcctgcagattgacccctggactgggatagcaaaatccaatctctccactaaacttgaatattggctccaacgaattgatcaagctccacttaaacctctgcagaaagttgatatcctcaaaacatacaccatccctcgaatgacgtacctggccgaccattcagacctgaaagccgggttcctcgagagccttgaccaaaagatccgaacgacggtcaaggactggctgcacttaccttcttgcacgtgcgatgccatcctgtactcgagcacgaaggacggcggtttgggcatcaccaaattggcagggctgatccccagcgtgcaggcccgaagactgcatcgtatcgctcagtcttcggatgaaacgatgaagatgttcctggagaaagatcaaatggaacaaatgcataagaaactgtggattcaagctggaggggacagggagaagattccttccatctgggatgcaccgccggtgagcgaaccatctaacagtgcaagcacaatttcggagtgggaagcaccatccttgaaaactaaatttccaaaaccgtgtaattggaggaaaaatgaatttaaaaattggactaaattagtgtcccaaggccgtggaattataaattttgaaggtgataaaattagcaaccattggctacagtattacagaagcatacctcacaggaagctcctcactgctttacaactcagagccaacgtataccccacaagagagttcttagctagggggaggcaagataaatacatcaaggcatgcaggcactgcgatgcggacattgaaagctgcgcccacatcatcggcaactgcccagtgacgcaggacgcccgtatcaagaggcacaattacatctgcgaagtgcttcttgaggaggcgaaaaagaaggactgggtagtgttccaagaaccgcacataagggataccaccaaggaactgtacaagcctgatctgatatttgtaaaagacgcccgtgcacttgtggtggatgtgacagtacgatacgaagcagccaaaacatcgctagaggacgccgctgcggagaaagtgaacaagtacaagcatttagagactgaggtacgtaacctcaccaacgcaaaggacgttgcttttatgggctttccccttggagcgcgggggaaatggcaccagaaaaactttgaacttctggaagctctgggcctctctaagtcgaggcaagagaaaattgcaaggactttatccacaacagcgctcctgtcatctgtggacattgtacgtatgtttgctagtagggccaggaaattaggtaaccaggagtagtttattttttatttttattttattttatagctttttgtaactgtttgtagcttcctttttgtagtatttttgcatttttgtatctttttatatgctttaatttaaaaaaaaaaaaaaaaaaaaaaaaaaaaaaaaaaaaaaaaaaaaaaaaaaaaaaacctaataaaaagacagcagctagggacgtagggcagccacaagccagttaggtagctgatagtgagtagggacaggactttttatttcataacgcgtcaattaccacccgaattggaccaatttaccggatttgtccaaggtggacgggccacctttacttaacccggaaaaggaacatatattatttatatgtgttcgaaaaa

SEQ ID NO: 503 - DNA, 4693 bp, Cichladusa arquata
  source 1..4693: mol_type = genomic DNA
ggcggctttggagagtatagttacaaactgggcatcgctgcagagatcgcacctcctcgtggtcccgctggtagccctgcgtagggtaactaagtcgatctctgccccaggatggagccgttgggaatcgccagttcaacggactcctgccaaaaacccggcgaaacaaatttctcggtaaaaagccgcgtggcttcattgcccgaaacctggccccccggtttcataggggcaatgtctccggtaagtggactgaccacccactaccgttccaccttccatggtgggcccattccgatgggttctggctctgatttgggggggggggtctggtttagagcgccggtacgcctgtccagggtatcggtgggctcccagacctcccccagcgactgggttgacctgttgtcctggaattttaattttttaccaggctccaagtctaatgcccagtgggtcgacctggtgtctaggcacggggttgacctgttatccaaaaatgaccaggtagacctggcaactcaaaatttaccatccaaattgtcccccgatttggcagaaaatgaattggctttgctggcgaacttagagttttacaggtcggatttgcatgtgcatgagggtgttcatttttctgctaattgggagggtttgagcgggttgcctgaggtgtatgaacaactagcaccacaaccgtgtgtgggagatagttcacgtgctagtctcccgcgagacactaaactgtttgtgcctgagcaaaggagcagcgaggagaaggagagcgaggacgcgccaaaaacattccctccaacgcctgagaagcccggggagcagacacctgaggagactgtgacggtgactgttcctgacaaaaatccaccttgtccttgctgtggtaccagggtaaactctgtattgggcctaattgaacacctaaaggggtcgcacgggaaaaagagggtttgttttcggtgtgttaaatgtggaaaggaaggtactaactatcatagtattgtttgtcactttcccaaatgcaggggtgcagagaccgaagcggctccagctggggagtggatctgtgaggtatgcggaagagattttcaaactaaaattggcctgggacaacataaaagacatgcacacccgctgataagaaaccaagaaaggatcgctgcttcccacccgaaagaaacatctaaccgaggggctcacaaaagatgctggacaaaggaggaggaggagatgctgataaagttagagatgcagttcgagggccacaaaaacatcaataaactcatcgcggagcacatcacaaccaaaacagctaagcagataagcgacaaaaggagattgctgcccaggaaaccagataaggacattgaagaggaacctgctgtgagtactcgcaccaggagagcagctgcgggcctgagaaaggaacctggggtgagtcatcaaagccaggctgcggtcgagaacaatggacctgggcggagccaactgccagggaagccagctgccggaaagaaaacaatggacgagataagccaccgccctgataagggtaacggccggaggggaaccatcaagcagcagatggctgggcaactgcaggcccattatcaccggacactcggggagaggctatcagctggggcaattaacaccttcccccgggcattcaagcagttaatggaaggccaggagatgcaagaaacgatcaaccaatcagcgcaggactgcttcggatgcctggaatcggtaagccagataagaacagcaacccgagataagatcaacaaagggacccgggagaaaagaccaaagagaccttttcaaaagtggatgaaggacagagcaattaagaagggtaattaccttcgcttccagcgattattccatcttgacagggggaaacttgcaaaaattattttggacgatattgagactttgtcctgtgatattccacccagtgaaatttattcggtttttaaagacagatgggaaacacctggtaattttaagagccttggggacttccaaattaatgggaaagccgacaatagcgctttcagagacttaattacggccaaagaaattgagaaaaatgtgcaggaaatgagcaagggctcagctccaggtccagatgggattactcttggggacatcaaaaagatggatcccgagtattcccggacagcggagatcttcaacctgtggttaacatctggaaaaatcccggacatgctgaggggatgcaggactgttttaattccaaaatcaacagaacctgaacgtttgaaggacattaacaactggagacccatcacaattggctccatcttgctgagacttttctccaggattataacagcgaggctgagcaaggcctgccccctcaacccaaggcaaagaggcttcatcagagcggcgggatgctctgaaaacttgaaactcctgcaatctgtaatgcggtctgccaaaaaagaacacagaccactgggtgttgtattcgtggacatagccaaggcttttgacaccataagccaccagcacatcatacacgctttgcagcaaagagaggtggatccccacatcattggcctggtgagcaatatgtacaaagacatcagtacctatatcaccgtgaagaaaaacacacacacagatagaatccatttccgggttggagtaaaacagggtgacccgatgtcaccccttttatttaatctggctatggaccccctgttgtgcaagctggaagagagcggcaaagggtaccatagaggccggagcagtatcacggcgatggcatttgcggacgatctggtcttgctgagtgactcctgggaaaatatgaaaacaaacatcaagatattagagaccttttgcaatctgaccggtctcaaaacacagggagtgaagtgccacggctactacatcaagccgacaaaggactcttacaccgtcaatgactgcgctgcttggaccatcaacggcacacccctgaacatgattgaccccggtgaaactgagaaatacctaggcctgcagattgacccctggactgggatagcaaaatccaatctctccactaaactagaatattggctccaacgaattgatcaagctccactgaaacctctacagaaagttgatatcctcaaaacatacaccatccctcgaatgacatacctggccgaccattcagagctgaaagccgggttcctcgaaagcctcgaccaaaagatccgaacgacggtcaaggactggctgcacttaccttcgtgcacgtgcgatgccatcctgtactcgagcacgaaggacggaggcttgggcatcaccaaattggcaggactgatccccagcgtgcaggcccgaagactgcatcgtattgctcagtcttcggatgaaacgatgaagatgttcctggaaaaagatcaaatggaacaaatgcataagaaattgtggattcaagctggaggggacagggagaagattccttcaatctgggatgcaccgccggtgagcgaaccatctaacagtgcaagcacaatttcggagtgggaagcaccgtccttgaaaactaaatttccaaaaccgtgcaattggaggaaaaatgaatttaaaaattggactaaattagtgtcccaaggccgtggaattataaattttgaaggcgataaaattagcaaccattggctacaatattacagaagcatacctcacaggaagctcctcactgctttacaactcagagccaacgtataccccacgagagagttcttagctagggggaggcaagataagtacatcaaggcatgtaggcactgcgatgcggacattgaaagctgcgcccacatcattggcaactgcccagtgacccaggacgcccggatcaagaggcacaattacatctgcgaagtgcttcttgaggaggcgaaaaagaaggactgggtagtgttccaagagccgcacataagggataccaccaaggaactgtacaaacctgatctgatatttgtgaaagatgcccgtgcacttgtggtggatgtgacagtacggtacgagtcagccaaaacatcgctagaggatgccgctgcagagaaggtgaacaagtacaaacatttagagacggaggtacgaaacctcaccaacgcaaaggacgttgtttttatgggctttccacttggagcgcgggggaaatggcaccagaaaaactttgaacttttgggagctctgggcctctctaagtcgaggcaagagaaaattgcaagaactttatccacaacagcgctcatgtcatctgtggacattgtacatatgtttgccagtagggccagaaaattatgtaaccaggagtagtttagttttcttttgtaacttttatagcttttagtatgtttttgtagctccctgctttatagtatttttacattcttgtatctttttgtatttttttatatgctttaatattttttttaaaaaatttaataaaaagacggtagctaggggcgtagggcagccacaagccagttaggtagctgatagtgagtagggacaggactttttatttcataacgcgtcaattaccacccgaattggaccaatttaccggatttgtccaaggtggacgggccacctttacttaacccggaaaaggaacatatattatttatatgtgttcgaaaaa

SEQ ID NO: 504 - DNA, 4374 bp, Ciconia episcopus
  source 1..4374: mol_type = genomic DNA
atggtcatagttactaactgggcttagctgcagaggccacacctcctcgtggtcccgctggataccctaacgggtaactaagttggcctctgccccagagagagggggctttgctccctctcgccctatcgattggcctcaccgatctttcgatagtatttacggtgatacaaatttacggcaccgagttctactcgctgcccaaaacctgcgcccacgggtattagatgggcataaaccgacagtattagaggggaatactgtcggggtctgacaaccctcattccaaactggtcaaaatgggtcgtccgatacggattgcgttcgtatcggtggccacacaaacaggtccgatagacctgcgcgaaagagtaatcacagagactgggaaagagcacgataaaagtaacgtgccggaggacagctggaattgtacagggctggagtttattaactcaattgttgaaggactggaatggagtcatccttccaaccgggctgagagactggccaagctgcctgaagtttacgagacgtataacagctcacacgcggctgagacggagatcaatgagaagggggaaccatcacctcgaaaggccatgtcaccgccacggactcctagtccggatcacaatactgacctgccaaacgaaggcacaccggtggtaaaggtcccggacaagaatacatcatgtccgtgctgtggaaaccggataggaaaaatctcgcagctggttgaacatctaaagagagcccatggaaagaaaaagatcttgtttcagtgtgccaaatgtggaaaaacagaaatgaaacatcacagtattgcgtgccattttccgaagtgtaaagggtccataacaacagacccaaagtgcaaggggtccataacagctgacccaacggtgggctggacctgtgaggaatgcgggagagcatttacatcaaaaatcggtctgggacagcataaacgcctagcccacccggtgctcagaaacatcgagcggatcgccgccgctagaccaaaagcaagtacggcaagagggctacatcggcagtgctggacagaggaggaagtggaactactacgaaaattagagaaacagtacgagggaagtaagaacatcaacaaactgattgcagagcatattccatcaaaaactgcaaagcagataagtgacaagagaagaggactctctaagagtccggaggaggagggtgagaaagaccaagacccagagtggagaaaacaaatgacaatggagcaagaccatctgaggggcgttggatcagatacggagggaggactgatttcccactataaaaagagaattgcagagtggataacatctgagaaactgcccattctccagggtgtgtttgaagaggtgctaaatgggaatgaggacaccgattgtttggttcaagaggcagctgacgaatactacccacacctattcaggaggtccacagagcctgaaacaaaccaagatgaaaagcacccaggggccagtaaagctagaccttccggaccatctaaggagtggatgaaaaagagggcaagaaaaaggggacaattcctaagattccagcggctgttttacctggatagagggaaactagccggtatcatcctggatgatgtggagtccctgcagtgcggtatcccgcttgaggaggtacataaagtgttcaagtcgagatgggaaacaccgggaacatttaagggcctgggtgcctttcgatcggcaggccaagcagacaactctgcattcaaagccatgatcacggcaaaggaaattgcgaaaaacatcagagagatgaataagaacgcagcaccaggaccagacgggcttagtctgagagatctcataaaaatagatcctcactatacccaagtcatggaactattcaatctatggttgctgtctgggaatattcctgacgtggctagagaatgccggaccgtgctaatatcaaaatctgcagtgccagagcgccaaaaggacatcaataactggcggccaattaccatcggctctattgccctgagactgttctcaagaattctaacggcacggttaaccaaggcgtgccccatcaatccaagacaaaggggctttatcaagtcgccaggatgtgctgagaacctcaaactattacagctattaattcggagtgctaagaaggagcaccggcctctgggcgtagtcttcgtcgatttagccaaagcctttgacacagtgagtcattctcacatcttaacagttctcaaacaaaagggtgtggacgagcatatcatcaaattaattaaaaatctctatcataatatcaacacccgtatcgatctaaagaacaaacaatccgaacccattggtatgcaaattggagtaaagcagggtgatccaatgtccccgattctattcaacttatctgtggaccccctactgtgtaaactagaggaggaaggaagtggattccagtacggctctagaaatataacaactatggcctttgctgacgacttggtactactaagcgaatcatgggaaggaatgaagaaaaacattgaaattctagaggtcttttgcgagctcactggcctcaaaacacaaggggagaagtgccacggttttttcatccaaccgacaaaagactcatatacaatcaatgactgccctccatggacagtgaacggcacccccctcaatatgatcgagcccggtagttctgagaagtacctgggtctgcgcgtcgacccatggaccggaatatctaagccagaactacaacaaaaagtgaagggatggctgcaaaggatcaacgatgctccactgaagccgttccaaaaggttgacatcctgaaaggctacaccattccaagactgatttacttagcagaccaagccgatgtaaaaacaacatacctagagacccttgacttggagattcgaacggcggtcaaggagtggttacacctaccaccatgtacttgcgatgccatcctttactccagcactcgggatggaggtctcggtatcactaggctcacgggcttgattcccagtgtgcaggctcgaaggctgcacagaattgcacagtcttcagacgaagtgatcagagagatagccaagaaagagggcattgagaaagaatatgagaggctgtggatcgcagcaggaggtaacaaagacaagattccatccatatgggacccaagagctgtaacggtgatatcggaaggacaaggcggcgagaaacaggtctcggaatgggagctacctgcccccaagaccatctatccgaagccctgtgattggcgaaagcaggaatttacgaactggactaagttgataacccagggccgtggcatttccaactttgaaagtgacaagatcagtaacagttggttagaattttataggggcattccacacaggaagctacttaccgcactacaactaagggcaaatgtttaccccacgagagaatttctagcaagaggaaaacaagaaaccccgatgagagcgtgccgacattgccaagcggaagccgagacctgcgcacacataattggatattgtccggcagtacaggatgccaggatcaaaagacacaaccaaatatgcgaggtactaatggaagaggccaaaaagaaagaatggattgtgtttcaagaaccacacgttcatgacgagcgaaatgaactgtacaaaccagacttggttttcgttaaagaaaaccaagccatagtggtggatgttacagtcaggtacgagagtaaatcaacatcattggctgatgctgcggcagagaaagttaggaaataccaacacctcaaagaccagatacaagatctaacgaacgccttaaacatcaaatttatgggcttcccaataggagcacgaggaaaatggtaccctggaaattatgaattattgaaagaacttgggctctcttcctccagacaggacaaagtggctcggcgtctatcaaatcgagcactgttctcctcagtcgacataatacacatattcgccagcaaaacaagaactgtcatcagatcgacatgactcaattatctattgggtcacgagccgcgggaataccatgtaaattgtattttattattgattatcaataaagtgacaaccccctatccatcaggtgggagggacccctagagactgcctagacagacaaaagcttgtgtcagggcgctaatagtatgtaggactttatgggactcgaatcatgacgcgtcatcaacccggccttaagacactaattaccggtctttacccaggtggacgggccacctttacttaacccggaaaagaaacatgtatatttattatatatgtgtttgttaaa

SEQ ID NO: 505 - DNA, 4383 bp, Ciconia stormi
  source 1..4383: mol_type = genomic DNA
atggtcatagttactaactgggcttagctgcagaggccacacctcctcgtggtcccgctggataccctaacgggtaactaagttggcctctgccccagagagagggggctttgctccctctcgccctatcgattggcctcaccgatctttcgatagtatttacggtgatacaaatttacggcaccgagttcgactcgctgcccaaaacctgcgcccacgggtattagatgggcataaaccgacagtattagaggggaatactgtcggggtttgacaaccctcatcccaaactggtcaaaatgggtcgtccaatacggattgcgttcgtatcggtggccacacaaacaggtccgatagacctgcgcgaaagagtaatcacagagattgggaaagagcacgataaaagtaacgtgccggaggacagctggaattgtacagggctggagtttattaactcaattgttgaaggactggaatggagtcatccttccaaccgggctgagagactggccaagctgcctgaagtttacgagacatataacagctcacacgcggctgagacggaaatcaataagaagggggaaccatcacctcgaaaggccatgtcaccgccacggactcctagtccgaatcacaatactgacctgccaaacgaaggcacaccggtggtaaaggtcccggacaagaatacatcatgtccgtgctgcggaaaccggataggaaaaatctcgcagctggttgaacatctaaagagagcccatggaaagaaaaagatcttgtttcagtgtgccaaatgtggaaaaacagaaatgaaacatcacagtattgcgtgccattttccgaagtgtaaagggtccataacaacagacccaaagtgcaaggggtccataacagctgacccagcggtgggctggacctgtgaggaatgcgggagagcatttacatcaaaaatcggtctgggacagcataaacgcctagcccacccggtgctccgaaacatcgagcggatcgccgccgctagaccaagagcaagtacggcaagagggctacatcggcagtgctggacagaggaggaagtggaactactacgaaaattagaaaaacagtacgagggaagtaagaacatcaacaaactgattgcagagcatattccatcaaaaactgcaaagcagataagtgacaagagaagaggactctctaagagtccggaggaggagggtgagaaagaccaagacccagagtggagaaaacaaatgacaatggaacaagaccatctgaggggcgttggatcagatacggagggaggactgatgtcgcactataaaaagagaatcgcagagtggataacatctgagaaactgcccattctccagggtgtgtttgaagaggtgctaaatggggatgaggacaccgattgtttggtccaggaggcagctgacgaatactacccacacctattcaggaggtccacagagcctgaaacaaaccaagataaaaagcacccaggggccaataaggttagaccttccggaccatctaaggagtggatgaaaaagagagcaaggaaaagaggacaattcctaagattccagcggctgttttacctggatagagggaaactagccggtatcatcctggatgatgtggagtccctgcagtgcggtatcccgcttgaggaggtacataaagtgttcaagtcgagatgggaaacaccgggaacatttaagggcctgggtgcctttcgatcggcaggccaagcagacaactctgcattcaaagccatgatcacggcaaaggaaattgcgaaaaacatcagagagatgaataagaacgcagcaccaggaccagacgggcttagtctgagagatcttataaaaatagatcctcactatacccaaatcatggaactattcaatctatggttgctgtctgggaatattcctgacgtggctagagaatgccggaccgtgctaatatcaaaatctgcagtgccagagcgccaaaaggacatcaataactggcggccaattaccatcggctctattgccctgagactgttctcaagaattctaacggcacggttaaccaaggcgtgccccatcaatccaagacaaaggggctttatcaagtcgccaggatgtgctgagaacctcaaactattacagctattaattcggagtgctaagaaagagcaccggcctctgggcgtagtcttcgtcgatttagccaaagcctttgacacagtgagtcattctcacatcttaacagttctcaaacaaaagggtgtggatgagcatatcatcaaattaattaaaaatctctatcataatatcaacacccgtatcgatctaaagaacaaacaatccgaacccattggtatgcaaattggagtaaagcagggtgatccaatgtccccgattctattcaacttatctgtggaccccctactgtgtaaactagaggaggaaggaagtggattccagtacggctctagaaatataacaactatggcctttgctgacgacttggtactactaagcgaatcatgggaaggaatgaagaaaaacatcgaaattctagaggtcttttgcgagctcactggcctcaaaacacaaggggagaagtgccacggtttcttcatccaaccgacaaaagactcatatacaatcaacgactgccctccatggacagtgaacggcacccccctcaatatgatcgagcccggtagttctgagaagtacctgggtctgcacgtcgacccatggaccggaatatctaagccagaactacaacaaaaaatgaagggatggctgcaaaggatcaacgatgctccactgaaaccgttccaaaaggttgacatcctgaaaggctacaccattccaagactgatttacttagcagaccaagccgatgtaaaaacaacatacctagagacccttgacttggagattcgaacggcggtcaaggagtggttacacctaccaccatgtacttgcgacgccatcctttactccagcactcgggatggaggtctcggtatcactaggctcacgggcttgattcccagtgtgcaggctcgaaggctgcacagaattgcacagtcttcagatgaagtgatcagagagatagccaagaaagagggcattgagaaagaatatgagaggctgtggatcgcggcaggaggtaacaaagacaagattccatccatatgggacccaagagctgtaacggtgatatcggaaggacaaggcggcgagaaacaggtctcggaatgggagctacctgcccccaagaccatctatccgaagccctgtgattggcgaaagcaggaatttacgaactggactaagttgataacccagggccgtggcatttccaactttgaaagtgacaagatcagtaacagttggttagaattttataggggcattccacacaggaagctacttaccgcactacaactaagggcaaatgtttaccccacaagagaatttctagcaagaggaaaacaagaaaccccgatgagagcgtgccgacattgccaagcggaagccgagacctgcgcacacataattggatattgtccggcagtacaggatgccaggatcaaaagacataaccaaatatgcgaagtactaatggaagaggccaaaaagaaagaatggattgtgtttcaagaaccacacgtccatgacgagcaaaatgagctgtacaaaccagacttggttttcgttaaagaaaaccaagccatagtggtggatgttacagtcaggtatgagagtaaatcaacatcaatggctgatgctgtggcagagaaagtcaggaaatatcaacaccttaaagaccagatacaagatctaacaaacgcctcaaacatcaaatttatgggtttcccaataggagcatgaggaaaacggcaccctggaaactatgcattataaaagaacttgggctctcttcctccagacaggacaaagttgctcggcgcctatcaaatcgagcattgttctcttcagtcgacataatacacgtttgccagcaaaacaaggaccattactagatcggcatgactcaattatctattgtatcatccattgtgtcatgagccaggggactatcatgtaaattgtattctataattgactatcaataaagtgacaactcctctatttatcaggcgggaggggccccgagagactgcctagacagacaaaagcttgtgtcagggagctaatagtatgtaggactttgtggaactcggatcatgagcgtcatcaaccccgcctaaagacattaattactggtctttacccaggtagacaggccacctttacttaacgcggaaaagaaacatgtacatttactatatatgtgtttgttaaa

SEQ ID NO: 506 - DNA, 4666 bp, Erithacus rubecula
  source 1..4666: mol_type = genomic DNA
ggcggcttgggagagtatagttacgaactgggcatcgctgcagagatcgcacctcctcgtggtcccgctggtagccctgcgtagggtgactaagtcgatcttctgccccagtacggagccgttgggaatcgccagcccaacgtcctcccgccaaaattcggtgaaacaaattcctcggtaaaagccgcgtggcttattgcccaaaacctggccccccggtttcataggggcaatgtctctggcaagtggactgaccacccactgccaacccaccgcccaaggtggtcccattccgatgggttatggctctgatttggggggggggggtctggtttagagcgccggtacgcctgtccagggtatcggtcggctcccagacctcccccggagactgggtagacctggtgtcctggaattttaattttccaggctccaagtctaattcccagtgggttgacctgttgcccaggcacggggttgacctgttatccaaatttgaccaggtagacctggtggctcgaaatttaccatctaaattgtcccccgatttggcagaaaatgaattggctttgctggcgaacttagagttctatagatcggacttgtatgtgtatgagggtgttcatttctttgccgatcgggagggattgagcgggttgcctgaggtgtatgaacaactagcaccacaaccgtgtgcgggagatggttcacattctgatctcccgagagatactaaactgtttgtgcttgagcaaaagggcagcgaggagaaggagaaggtggacgcgccaaaaacatcgcctccgtcgcccaggaagccaggggagcagaagcctgaggagacggtgatggtgactgttcctgacaaaaacccaccttgtccttgctgtggtacccgggtgaactctgtgttggccctaattgaacatctgaaggggtcgcacgggaaaaagaggatttgttttcggtgtgttaaatgtggaaaagagggtactaactatcacagtattgtttgtcattttcccaaatgcaggggtcctgtaactgaagcggctccagctggggagtggatctgtgaggtatgcggaagagattttcaaactaaaattggcctgggacaacataaaagacatgcacacccattgataagaaatcaagaaaggatagttgcttcccacccgaaagaaacatctaaccgtggtgcccacaaaagatgctggacaaaagaggaggaagagatgctgataaagttagaggcgcagttcgagggacagaaaaacatcaataagctcatcgcggaacacatcacaaccaaaacagctaagcagataagcgacaaaaggagattgctgcccaggaaaccagataaggaggttgaagaggaacctgctgtgagtactcgcaccaggagagcagctgcgggcctgagaaaggaacctgagctgagtcatcaaagccaggctgcagtcgaggacaatggacctgggcggagtgaaccgctgggtaagccagctgccggaaagaaaacaataggtgtgaaaagccgcagacctgaggaggctaacggccggaggggaaccatcaagcagcagatggccgggcaattgcaggcccattatcaccggacactcggggagaggctatcagctggggcaattaacaccttccccggggcattcaagcagttaatggaaggccgggagatgcaagagaccgttaatcaatcagcgcaggactgcttcggatgcctggaatcgataagccagataagaacagcaacccgagataagaacaacaaaggggcccaggagaagcaccccaggaaaccttttcaaaagtggatgaaggacagagcgattaagaagggtaattaccttcgcttccagcgattattccatcttgacagggggaaacttgctaaaattattttggacgatatcgagactttgtcctgtgatattccacccagtgaaatttattcggtttttaaagacagatgggaaacacctggtaattttaacggccttggggacttccaaaataatgggaaagccgacaatagcgctttcagggacttaattacggctaaagaaattgagaaaaatgtgcaggaaatgagcaagggctcagctcccggtccagatgggattactctcggggacatcaagaagatggaccctgagtactcccagacggccgagatcttcaacttatggttaacatctggaaaaatcccggactcggtgaggggctgcaggactgttttaattccgaaatcaacagaacctgaacgtttaaaggacgcaaataactggagacccatcacgatcggttccatcttgctgagacttttctccaggattgtaacagctaggctgagcaaagcctgccccctcaacccaaggcaaagaggcttcatcagagcggcgggatgctctgaaaacctgaaactcctgcaatctttaatgcggtctgccaaaaaagaacacaggccactgggtgtagtattcgtggacattgccaaggcttttgacaccataagccaccagcacatcatacaagctttgcagcaaagagaagttgacccccacatcattagcctggtgagcaatatgtacaaggacatcagtacttatatcaccgtgaagaagaacacacgcacagaccaaatccatttccgggttggagtaaaacagggtgaccccatgtcaccccttttatttaatctggctatggaccccctgttgtgcaagctggaagagagcggcaaagggtaccatcgaggccggagtagtattacggcgatggcattcgcagacgatctggtcctggtgagcgactcctgggaaaacatggtaacaaacatcaagattttggagaccttttgtgatctgaccggtctcaaaacacagggagcaaagtgccacggcttttacatcaagcccacaaaggactcttacaccgtcaatgactgcgctgcttggaccatcaaaggcacacccctgaacatgattgaccctggcgaaaccgagaaatacctaggcctgcaaattgacccctggactgggatagcaaaatccaatctatccacaaaactagaattttggctccaaaggattgatgaagctccacttaaacctctgcagaaaattgacatcctcaaaacatacaccatccctcgactgacgtacctggccgaccactcagacctgaaggccgggttccttgaaagcctcgaccaaaaaattcgaacaacagtgaaggactggctgcacttaccttcgtgcacgtgtgatgccatcttgtactcgagcacgaaggacggcggtttgggcatcaccaaattggcagggctgatccccagcgtgcaggcccgaagactgcatcgcatcgctcagtcttctgatgaaacgatgaaaatgttcctggagaaagatcaaatggaagaaatgtataagaaattgtggattcaagctggaggtgacagggagaagattccttccatttgggatgcactaccaccgagcgaaccatccaatgatgcaggcacaacttcggagtgggaagcaccatccttgaaaactaaatttccaaaaccgtgcaattggaggaaaaatgaatttaaaaattggacaaaattagtgtcccagggccgtggaattgcaaactttgaaggggataaaattagcaaccattggctacaatattacagaagcatacctcacaggaaactcctcactgctgtacaactcagagccaacgtataccccacaagagagttcttagctagagggaggcaagataaatacatcaaatcttgtaggcactgtgatgcggacattgaaagctgcgcccacatcatcggcaactgcccagtgacgcaggacgcccggatcaagaggcacaattacatctgcgaggtgcttcttgaggaggcgaaaaagaaggactgggtagtgtttaaagaaccgcaccttagggacaccaccaaggaactgtacaagcctgatctgatattcgtgaaagacgccagagcacttgtggtggacgtgacagtacgatacgaagcagccaaaacatcgctagaggacgccgctgcggagaaggtgaacaagtacaaacatttagagactgaggtacgaaacctcactaacgcaaaggatgttgttttcatgggctttccccttggagcgcgggggaaatggcaccagaaaaactttgaacttttggaaactctgggcctctctaagtcgaggcaggagaaaattgcaaggactctatccacaacagccctcatgtcatctgtggacattgtacacatgtttgctagtaggctaagaaattatgtagtcaggaatagtttatttttgtttgtagctgttttaattttgtagttgtattattgtatttttgcattttgttttgttatatgctttaattaaaaaaaaaaaaaaaaaaaaaaaaaaaaaaaaaagacggcagctagggacgtaggccagccacaagccagttaggtagctgatagtgagtagggacagaactttttatttcataacgcgtcaattaccacccgaactggaccaatttaccggatttgtccaaggtggacgggccacctttacttaacccggaaaaggagcatatatttttatatgtgttcgaaaaa

SEQ ID NO: 507 - DNA, 4254 bp, Gallinago paraguaiae
  source 1..4254: mol_type = genomic DNA
gacgggatcatagttacaactgggcatagctgcggggggtcacacctccccgtggtcccgccggatacctcttgtgggtaaccgagttgaccccctgccccagtgcgaacggagttatggttacttcctccctatcaattggcctcaccaaccaattgatagtaatatcccaaggtgaaacaaagttctgaccttgcgtctaaattcctagcccacggtaatagttgggcttgtccggcaagttctgttggggtactgtcggacttgtcgaaatccccacaaatttggatatacgaaatgggttggtccggacggttgtgctttgtgtccgtggccacccagactaaatatttggattgggcactatcggttccttccatcttgaaccctgatctggtagggggtgggattgcggaaagaaaaagatgggagtttgttaactctgagaaaggttatgtgttggtgctttccccctcccgatccagcttacttgctacgttaccggaggtgttcgagtctccgaaggtgtcgggcaggactatcagcccaagctctgtgcagaccgaatatacaggagaaagaacatcatctcctccaataacaccacctcccatcttggaagccggggcagatcctccgcaggagggcacacctgtggtaaagatcccagacaaaaatccagcttgtccatgctgcggcaaccgaatgggaaagattacgggactggttgatcatctgaagagaacccatgggaagagaaagatcttattccagtgtgcccgttgtgggagaacgaacccgaaacatcatagtatcgcttgccacatcccaaagtgtaaaggcgctgaggagcccagcccatcgatgggctgggcctgtgaggaatgcaatagaacatttgggacaaaaattggtttgagtcaacataaaaggttggcccatccagttacaaggaatgtggaacgtataacagcaacccgcccgaaagaggaaagtgcaagaggtgcacaccgtcggtgttggtcggaggaggaagtggaattacttaagaagctggaaaaacaatatgaagggaacaaaaacatcaataaattaattgcggaacatcttccaaccaaaacaacaaagcagataagtgacaaaagaaggggactggtgagaagtccatctaaaaagaaggtgaaagagctggggataagagaagaacttatgaaagagggagaacatctggaaaggagtggctcccaagaagaggggggactaaggtcccgatatcgaaagtcgattgcagaatggttaagaactcggaaaataaccactctcagggagatctacgagagagtgatgaaagggaaaaaagatcttcccgcgctagtggatgaagctgcccaggactgctatgcatgcctgaaaaaagatcttttggaaggggaaagacggcaaattcagaagatccgagaaatccgcagatcccgtccacagaaaccatcaaagcaatggacaaaaaagagggccagaaaaagggggcagttcctacggttccagcggctattccatctggatagagggaaactggccggtattatcctggacgatgtagaatccctccaatgtggtattccacttgatgcgatacatgaggtattcaagtcaagatgggaatcacccggaacattcaagggcctgggtacattctgtaccaatggacttgcagataattcagcattccaacctatgattactgtgaaggagattgagaagaatatcagagaaatgaacaaaaatacagcaccaggaccggatggggtcactctgcgggatctcatgaaagccgatccccaatgtgtcaatttaatggaattatttaatttatggttattaaccgggtatataccggatggcattaaaaattgtagaacaatattgatacctaaatcaaatgtaccagaaaagttaaacgatgtgaacaattggagacctataacaattggctcgattatattaagattgttttctaaaatattaacggcacgattaagtaaggcatgcccaattaatacccggcagagggggtttataaaatcgcctggatgctccgaaaatttaaaattattacagcttgtgattaggtatgcaaaaagggagcaccgccctctcggggtagtcttcgttgatctggcgaaagcatttgatacggtgagccatgctcatataatagcagtattaaagcaaaaaggtgtggatgaacatataataaatttgattgaaaattcttatcataatattaagacttatattgatatgaaaaacgaaaaatctgactcaattggaattcgaattggagtaaaacaaggcgatccaatgtctccaattttgtttaacttatctgtcgatcctctattatgtaaactggatgagattggtaatgggtttgagtgtcatacgaaagttgtaacatcactggccttcgccgacgatttagtattattaagtgggtcctgggaaggcatgcagaaaaacatagaaattgtcgagaccttttgtgaacttacgggtctcaaaatgcagggggaaaaatgtcacggcttttacatcaagccaacaaaagattcatatactatcaatgattgtcctccttggactattaatggcaccccccttaatatgattgaacccggtagctctgagaaatatttgggtcttcgtatagacccatggacaggaatatctaaaccagaactactggagaaagttgatagatggcttgcgaaagtgggaaaggctcctttgaaaccttttcagaaggttgatatcttgaaagggtacttgatcccaagattgatataccttgcggaccaagcaaatttaaaaccaacttatttggaaaatattgatttggccatacgaaacggagtcaaggagtggttgcacttaccagcgtgcacatgtgatgccatcctgtattctaatactcaggatggaggattgggaattaatagattggcagcattaattcctaatgttcaagctcgacgattacatagaattgcccagacaacggatgatgtattgaaagagattgtgaaacaagaaggaattgagagagaatatgagaaattgtgggtaatggctggtggtgataaggaaaagataccatctatatgggacccgaaatcaataatggtaatatcagaaacgggcggggaagaactatcggaatgggagtcccccaatccaaaattgatttatccaaaaccttgtaactggagaaaaagggaatttaacaattggaccaaattgtcaacacagggtcgaggtattagtaattttgaaaaagataaaataagtaataattggatacaacaatataggggcattcctcaaaggaaagtaattacagcattacaattacgtgctaatatctatccaacaagggaatttttagcgagaggaagatcagaaacatatattaaatcttgtcgtcattgtcaggctgatatagaaacgtgtgcacatataattggctattgtccatctgtacaggatgcaagaattaaaagacataatcaaatttgtaatatattggcagaggaagctaagagtaaagattggcttgtgtatcaagaaccattattaagagatgaatcaaatgaattatataaacctgatttaatttttgttaaggagaatcaggctattgtgacggatgtaactataagatatgaaagcactacaacaacattggaagaagcagcattggagaaagcaaaaaagtatgctcatttaaaatcacaaattcaggacttgaccaatacttctattataaattttacaggctttcctttgggatcccgtggtaaatggtaccagggtaattacaatatattaaaggatttgggtctctccagttcccgacaagagaaggtcgccagacgattgtcgaattacgctttatttagctcggtggacattgttcacatgtttgcaagtaaagcgaggacagaggtaagataaacattttcattatattactcttgatgtattaggtaatagattagtataagtagtatgtagatgtattagattgtaatgtagtattgtagtattgtagaaatgtagtattgcaataaactggactgggatctcgtgatgattacctttaatcatgacgctcactggacatgacttggtaggtggacgggccaccttcataaaacccggaaaaagtacacatactcgtaatgtgttcgtaaa

SEQ ID NO: 508 - DNA, 4454 bp, Geranoaetus albicaudatus
  source 1..4454: mol_type = genomic DNA
gatgggatcatagttactaactgggcagagctgcagaggttacacctcctcgtggtcccgctggatgcccttcggggtaaccaagttaacctctgccccagtgtgggaattatagctacttcccccctatcgtccggcctcaccgaccgttcgatagattctgtttggtgatacaaattcctggcaacgatttccagtcgctgcccaaagccttgcctacgggcacagttgggctcagtcatacagcacttgagggggtgttgtttgacttatactactcctctatctggactggcaaaatgggtcggccgatgcgaatttccttcgtgtcggtggccacacaaacaagtcctttggacttgcgtgacaatgtggtctcctgttccatccaagaccacaaaactgggggattgctggaagggagatttgaaataaggggattggagtttgtgaactctgatctggagggtctaaaatgccagcaatctcccaccctgactgacctcctggctgtgcttcctgaggtgtatgaggtacctaactcttttagtctcggggacaagaacacctgtccgactccggtggaggacgagaacgaagaggaggagccctcgcctctcggggccgtggctgggacttctccattgccatcgactccggtctcacgatcccgtgacgatctcccaacagagggcactcctgtggtgaagatcccggacaagaatacatcatgtccgtgttgtggtaataggatgggtaaactgtcgggtttaattgaacatctgaaaagagcacatgggaagaaaaagatcttattccaatgtgctcggtgtgggagaactgatgtcaaacaccatagtattgcttgtcattttcctaagtgtaaggggcctgtggaagcctctcccgagaggagttggaagtgtgaggagtgtgagaaaacatttgatacaaaaatcggcctggggcagcataagcgcttggtccacccagtcacaagaaatctcgagcggattaccgctgctcgccctaagacaggtactatgagaggggcacatcgtcggtgctggaccgaggatgagatggaattattgagaaagttggataaacaatatgaggggcagaaaaacatcaataagttgattgcggagcatattccgaccaagacaacaaaacagataagtgataaaagacgggaccttcgtaagagcccggtaaaaaagggaaaagatcagggtcagacaaaacatctagaactagaaggggaacacctcgtggaaggggaacatctcgtgtgcattggatcggagatggaggggggactgaggtcccgataccgaaagacagtttctgagtgggtaacatccggaaaattgtccattctccatggaatgtttgagcaggtgatcgaaggagaagaagatccagcactagttgctgataaggcaatgaaagactgtttcacgtgccttgcctctaagtccctggagttgaaaaccagccagggtcgaccgcgtcaggtggcccaaactgctcgaccttcggaaccaccaaaggggtggatgaagaagagagctaggaaacgggggcaatttctacgcttccagcggctgttctacctggatagggggaaactggccggtattatcctggatgacgtggaatccctgaagtgtgctatcccacaagacgagatacacaacgtgttcaagtcgagatgggagtcaccgggaacattcaagggcctgggtgcgttcagatccaagggcctggcggacaactcggcattcgaagccatgatcacggcaaaagaaatctctaaaaacatcagagagatgaacaagaacagtgcaccaggaccagacggactaagtctgcgggatatcatgaagatagacccccattgtgtccagctaatggaactattcaatctatggctggtgactggcaccgtaccggacgtggtgaaagaatgtcggactgtattaatatcgaaatcatctctgccggagcgccaaatggacattaataactggcgtccaattaccatcggatcgattatcttgaggctgttctcaaggatcctgacggcaaggctggcaaaggcatgccctattaactcccgacaaaagggctttattagatcagcgggatgtgctgaaaatttgaaactgttacagctcttgattaagagtgcaaaaaaggaacatcgacccttgggcgttgtcttcattgacctggctaaagccttcgacacagtgagtcaccaccatcttatggcagtgctgaaacaaaagggtgtggaccatcacattatcaccctgattacgaacatgtatcaaaacattagaactcgcattactgtgaagaatgagcactcggatcccatcgggattcaaattggtgttaaacaaggagatccaatgtcacctttattgtttaacttatctgtggaccccctattgtgtaagttagaggaagaagggagtggataccatcatgactctaagggtgtaacatctatggcttttgcagatgatttggtattgttaagtgggtcgtgggaaggaatgcagagtaatattaaaatcctggaggccttttgtgagctgactggcctcaggacgcagggggagaaatgccatggcttttacatacaacctactaaggactcgtatactatcaatgattgtcctccatggcagattaacggcaccccattaaatatgattgaacctggtagctcggagaagtacttgggactgagaatagacccatggactggaatatcgaaacccgagctactcaggaaaataagagattggttacaacggattggagaagcaccactgaaaccgtttcagaaagttgacatcttgaagggatataccatcccgcgactgatttacttagcagaccaagccgatgtaaaagcaacgtacctagaagaacttgacctgacgattcgaactacggtcaaggagtggctacatctacctcctagtacctgcgatgccatcctgtattccagcacacgtgacggaggattaggcatcactagactctcgggcttgatccctagtatacaagctcgaagactgcacagaattgcgcagtcttcggacgatgtgataagatcaatagtgaaacaagaggggatcgaaaaagactttgaaaaattgtggttaacagctgggggcgatagagagaaaataccatctatttgggacccgagtgcgattagggtaacatctgaggaattgggcgaggatgaatttgcttccgagtgggaaataccaactcccaaaaccatctttcctaaaccttgtgactggcgtaaacaggaatttattaattggaccaagttacagtcccagggccgtggtattgccaactttgagaaggataaaatcagtaataattggctcgaacgatatagaggcattcctcaccgaaaactcctcacggcattacaattgagagctaacgtgtaccccactagggaattcctggcaagggggagacaggagtcgcatataaaatcttgtcgacactgtcaagcggaaaatgaatcaagcgctcatatcattgggtactgccccgcggtgcaagacgccagaattaaaagacacaaccaattgtgtgatttattgataactgaagtaaaaaagaaggattggatcgtattccaagagcccatactaaaagatgaacaaaatgagatctacaagcctgatctcgtattcgtaaaaggggaccaggcgatggttattgatgtaacaattcgatacgagagtaaactgtcatcactggcggacgcggcggcagaaaaagtaaagaaatattgccatcttaaaaatcaaattcaagaattgacgaatgccaaaaatatcaaatttaagggattccctgtgggcgcacgaggtaaatggtattctggcaattacgaagtgttgaaagcattaggaatctcaaactcccgacaagataaaattgcgcgatgtatgtcaaggaaagctttatttacttctgtcgatatcgtacatatgtttgtgagtcattctagatctattgtaagaacttgactattgttactgtttcggttatattgctcttttttgctgtattattgttggttgttcttattgcatttattgttctgtcttgtatcgttcttgctatattatcattcattgccttgttgtattactatcaattctttaataaaactacccctggtactcctgctctgttcccttggcactggaaaggttgggagagtaatttggaactcgtattcatgacgtgtcacatcaacctaaattttgacaaaatactaattggacttgacaaattctgccgaattggactattcactggattggacacaggtggacgggccacctttacttaactcggaaaagaaacatatatacttttatgtgtttgttaaa

SEQ ID NO: 509 - DNA, 4454 bp, Harpyopsis novaeguineae
  source 1..4454: mol_type = genomic DNA
gacgggatcatagttactaactgggcagagctgcagaggttacacctcctcgtggtcccgctggatgcccttcggggtaaccaagttaacctctgccccagtgtgggaattatagctacttcccccctatcgtctggcctcaccaaccagtcgatagattcgctgtggtgatctaaattcctggcaccgattctcgatcgctgcccaaagcctcgcctacgggcacagttgggctcagtcatacagcacttgagggggtgttgtttgacttatacttctcctctatctggactggcaaaatgggtcggccgatgcgaatgtctttcgtatcggtggccacacaaacaagtcctttggacttgcgtgacaacgtggtctcttgttccaccaaagaccacgggggattgctggaggtaagatttgaaataaggggattggagtttgttaactctgatttggtgggtccggaaggtcagcaatcctccaccctgattgaccacctggctttacttcctgaggtgtatgaggtatctaactctttaagtctcagggacaagaacatctgtccaactccggtggagagcgagaacgaagaggaggaggagtcctcacctctcggggctacggccaggatctctccattgccatcgactccggtctcgcagcctcgtgacgatctcccaacggagggtactcccgtggtgaagatcccggacaagaatacaccatgtccatgttgcggtaataggatgggtaaactgtcgggtttaattgaacatctgaaaagagcacacgggaagaaaaagatcttattccaatgtgctcggtgtgggagaactgatgtaagacaccatagtattgcctgtcattttcctaagtgcaaggggcttgtggaagcctctcccgagaggggttggaagtgtgaggagtgtgagaaaacatttgatactaaaatcggcctggggcagcataagcgcttggtccatccagtcacaaggaatcttgagcggattaccgctgcacgccctaaggcaggtactatgagaggggcacatcgtcggtgctggaccgaggatgagatagaattattgagaaagttggataaacaatatgaggggcagaaaaacatcaataagttgattgcggaacatattccgactaagacgacaaagcagataagcgataagagacgggaccttcataagagcccggtgaagaagggaaaagatcaaggtcggaaggaacatctagaattggaagaggaacacctggcggaaggggaacatcttgtgtgcgttgggtcggagacggaggggggactgaggtcccgttaccggaagacaatttctgagtgggtaacatctggaaaactgtccattctccatgaaatgtttgagcaggtgatcgaaggcgaaaaagatctaacaacagttgctgataaggcaatgaaagactgctttgcatgccttgcctctaagtcctctgagttgaaagcgggccagggtcgaccgcgtcaggtggcccagactgctcggccttcggaaccaccaaaggggtggatgaagaagagagctaggaaacgggggcagttcctacggttccagcggctgttctacctggatagggggaaactggccggtattatcctggacgacgtggaatccctgaagtgcggtatcccacaagacgagatacacggagtgttcaagtcgagatgggagtcaccgggaacattcaagggcctgggtgcgttcagatccaggggccaggcggacaactcggcattcgaagccatgatcacggcaaaagaaatctctaaaaacatcaaagagatgaataagaacagcgcgccaggaccagacggactaagtctgcgggatatcattaagatagacccccattttgcccagttaatggaagtattcaatctatggttggtgactggcgttgtaccggacgtggtgaaagagtgtcggactgtgttaatatcgaagtcatctctgccggagcgccaaatggacatcaataactggcgaccaattaccatcggatcgattatcttgaggttattctcaaggatcttgacggcaagactggcaaaggcatgccctattaatccgcgacaaaagggctttattagatcagcgggatgtgcagaaaatctgaagctactacaactattgattaagaacgcaaaaaaggaacatcgacccttgggcgttgtcttcattgacctggctaaagccttcgacacagtcagtcattatcatcttattgcagtgcttaagcaaaagggtgtggaccatcacattatcaccctgattacgaacatgtatcaaaacatcaaaactcgcattgccatgaagaatgaacagtcggatcccatcgggattcaaattggggttaagcaaggcgacccaatgtcacctttattatttaacttatctgtggaccccctgttgtgtaagttagaggatgaaggcaatggataccatcacggttcaaaatgtgtaacatctatggcttttgcagacgacttggtgttgttaagtggatcatgggaaggaatgcaaagtaacatcaaaatcctcgaggccttctgcgagcttactggcctcaggactcagggggagaaatgccatggtttttatatacaacctactaaggactcgtatacgatcaatgactgtcctccatggcaaattaacggtaccccacttaatatgattgaacccggtagttcggaaaaatacctgggactgagaatagacccatggactggaatatctaaacccgaactactaacgaaaataagagattggttacaacggattggagaagcgccactgaaaccatttcagaaagttgacatcttgaagggatatactatcccgcgactgatttacttagcagaccaagctgatgtaaaagcaacgtacttggaagaacttgacctgacgattcgaactacggtcaaggagtggttacatctacctcctagtacctgcgatgccatactgtattccagcacacgcgatggaggtttaggcatcactagactctcgggtctgatccccagtatacaagctcgaagactacacaggattgcgcagtcttcggacgatgtcataagatcaatagtgagacaagaggggatcgaaaaagagtttgaaaaactgtggttaacagctggaggtgataaagagaaaataccatctatttgggacccgagtgcgatcagggtaacatctgaggaattgggcgatgatgaacttgtttcagaatgggaagtaccagctcccaaaaccatctttcctaaaccttgtgactggcgtaaacaggaatttataaattggaccaagttacagtcccagggccgtggtattgccaactttgagaaggataaaatcagtaacaattggctcgatcgatatagaggcattcctcaccgaaaactcctcacggcactacaattgagagctaacgtgtaccccactagggaattcctggcaagggggagacaggagtcgcaaataaaatcttgtcgacactgtcaagcagaaaatgaatcaagtgctcatattattgggtactgccccgcggtgcaagacgccagaattaagagacacaaccaactgtgtgatttacttataactgaagttaaaaggaaggattggattgtattccaagagcctatactaaaggatgaacaaaatgaaatctacaagcctgatcttgtatttgtaaaaggagaccaggcgatagttattgatgtaacaattcgatacgaaagcaaactgtcatcattggcggacgcggcggcagaaaaagtaaagaaatactgccatcttaaaagtcaaatccaggaattgacgaatgctaaaaatattaaatttaagggattccctgtgggagcacgaggtaaatggtactttggcaattacgaagtgttgaaagcattaggaatctcaaattcccgacaagacaaaattgcgagatgcatgtcaagaaaagctttatttacttctgttgatattgtgcatatgtttgcaagtcattccaggtctattgtaagaacttaatatctgctactgttctgttttatatcgggtttgctatattactacttgttgttactattgtacttactgttctgtcttatgttgtttcttgcggtattactacttactgccttgctgtattactattcaattctttaataaaactacccctggtactcctgctctattaccctggcactggaaaggtcgggacagaaaactggaactcgtattcatgacgtgtcacaccaacctaaatttggacaaaatgctaattggaaatgtcaaattttttaccgatttggaccactttaccggatttgacacaggtggacgggccacctttacttaactcggaaaagaaacatatataatttttatgtgtttgttaaa

SEQ ID NO: 510 - DNA, 4245 bp, Limnodromus scolopaceus
  source 1..4245: mol_type = genomic DNA
gacgggatcatagttacaactgggcatagctgcggggggtcacacctccacgtggtcccgccggatactccttgtgggtaaccgagttgaccccctgccccagtgtgaacggagctatggttacttccaccctatcaagtggcctcaccaaccacttgatagtatctccctaaggtgaaacaaagttcagacttctgtctaaattcctcagcccacggtaatagttgggcacgaccgacaagttcggtggggtactgtcggtcctaccaaagccccacaattggacattcgaaatgggttggtctgggcggatttggttcgtcacagttgccacccagacaaaatactcggattgggcatttacggttcattccatcacgaaccctgagctggcaggggacgggattgcagatttgagaggactggaatttgtgaatagcgagaagggatattatgtggggcattccccttcccgatccagccttctggctactttaccggaggtatatgaaactccgagggtgatgggcaaagtcaccagcccgagttctgtgctgaccgaacatgagggagatagaacatcttctcccccaagaacaccacctcctattcttgagaccggggcagaccttccacaggagggcacacctgtggtaaaggtcccggatgataatccagcgtgtccatgctgcggtaatcgaataggaaggatttcggggcttatcgatcacttaaagagaacccatggaaagaaaaagatcctctttcaatgtgccaaatgtgggagaacaaatctgaaacatcacagtatcgcttgtcacgttccaaagtgcaaaggcgccaaggggaccagcccattaaggggctgggcctgcgaggaatgcaatagaacatttgggactaaaattggcttaagtcagcataagcggcttgctcacccagttactaggaatatagagcgaataacagcttcccgcccgaaagaggaaagtgcacgaggtgcacaccgtcggtgttggtctgaagaggaagtggagttgctcaagaagttggaaaaacagtatgaagggaataagaatataaacaaactaattgcagaacaccttccatcaaaaacagcaaagcagataagtgacaaaagaaggggactgataaaaagtccatcaaagaaaaatgggaaagatctgacgttgcgggaacaactcacggaggaaggagaacatctaattgagagtggctcccaagaaggtgggggactacggtcccactaccgtaagtcgattgcagaatggataagatctcagaaaataacgtcactcaggaaaatctttgagagagtgattgaagggaaagaagatctcccatccatagtcgatgaagctgcccaggattgctatgcatgcctgaaaagagatctcactgaaggggaaggtcgacaaattcaaaagatccgagagatccgcaggacccacccacaaaaaccatcaaaacaatggacaaaaaaaagggccagaaaacgagggcagttcctacggttccagcggctgttctacttggatagagggaaattggccggtataatcctggacgacgtggaatccctcaaatgtggtattccacttgacgtggtgcatgaagtattcaagtcaagatgggaatcacccggaacattcaagggcctgggtacttttaagaccattggtcaggcagacaattctgctttccaagctatgattaccatgaaggagattaagaaaaacatccgagaaatgaataaaaatgcggctccagggccggatgggatttccttgcgggacctcatgaagattgatccccagtgtgcgaaattaatggaattatttaatttgtggttgttaaccgggtatataccggatggggttaaaaattgtagaacaatattgataccaaaatcaactgtaccagaaaagttaaatgatgtgaataattggagacctataacgattggctcgattatattgagactattttcaaaaatattaacggcacgattaactaaggcatgccctattaacatacgacagaggggttttataaagtcatctggttgttctgaaaatctgaaattattacaactgataattagatatgcaaaaagagaacacaggccccttggggtggtctttgtcgacctggctaaagcatttgatacggtgagccactctcacatactgtcggtattaaaacaaaagggtgtggatgaacatataataaaactaattgaaaactcgtattataacatcaaaacctatattgatttgaaaaatgaaaaatctgactctattggaattcgaattggcgtaaaacaaggcgatccaatgtctccaattttgtttaacttatctgtcgatcctctattatgtaaacttgaagaaatgggtaatggatttcaatgtcatagccaaaatgtaacagcactggccttcgccgacgatttagtattactaagtgggtcctgggagggcatgcaaaataatataacaattgtagagaccttttgtgagctcactggtctcaagatgcagggggaaaagtgccacggcttttatatcaagccaacaaaagattcctatacgatcaatgactgtcccgtgtggactatcaatggcaccccccttaatatgattgaaccaggtagttctgagaaatacttgggtctttatgtcgacccgtggataggaatatctaaaccagaactactggagaaagttgacagatggcttgtgaaagtgggcaaggcaccattaaaaccttttcagaaagtcgacatcttgaaaggatacctgatcccgagagtaatatacctcgcggatcaagcaaatttaaaaccaacatatttagaatccattgacttggctatacgaactggagtcaaggaatggttgcacctaccagcgtgcacgtgtgacgccatcctttattcgaatactcaggatggagggttaggaatcagcagattggcagcactgattccgagtgtgcaggttcggagactgcacagaattgcccaaacctctgacgaagttttaaaaactatcgtcaaaagagaaggaatagaaagagaatttgagaaattatggttgatggccggtggtgataaggaaaggataccatctatatgggacccaaaaactgttatgataatatcggaaacgggcggtgaccaaatattgtcggaatgggagattcccaatccaaaactaatttatccaaaaccctgtaactggagaaaaagggaatttaataattggactaaattactgagccaaggccgaggtattgtaaattttgaaaaagataaaataagtaataattggttaatacactataggggcattcctcaaaggaaattaattacagcattacaattacgggcgaatatatacccgacgagggaatttttagctagaggacggtcggaaacttatattaaatcctgccgtcactgtcaggccgataatgagacttgcgcacatataattggctactgtccatctgtacaagatgcgagaattaaaagacataatcaaatctgtcatatattggcagaagaagctaagagaaaagattggttggtatatcaagaaccattattaagagatcaacaaaatgaattatataaaccggatttaatttttgttaaagggaatcaagcaatagtaacggatataacaataagatatgaaacaactattacaacgttggaagaggctgccttagaaaaagcaaagaaatatgtacatctagaatcgcaagtccaggatctgacaaatacatctgttataaattttacaggctttcctttgggatctcgtggcaaatggtaccaaggtaactacaaaatactaaatgaactgggtctctccaactcccgacaggagaaggtcgccagacgattatcaaactatgctttattcagctcggtggatatcattcacatgtttgcgagtaaagcgagaacggaggtaagatgaattactttgaatttgcttaattgtaatgtttagatatgataagtagatgtattagtggtagtataagtagtatatagaattgtagcttgtattgtagtatgttaataaaaacggactgggatctcgtgatgattacctttaatcatgacgctcactggatggacttggtaggtggacgggccaccttcataaaacccggaaaaagttcacatacttgttatgtgttcgtaaa

SEQ ID NO: 511 - DNA, 4471 bp, Melierax canorus
  source 1..4471: mol_type = genomic DNA
gacgggatcatagttactaactgggcagagctgcagaggttacacctcctcgtggtcccgctggatgcccttcggggtaaccaagttaacctctgccccagtctgggaattatagctacttcccccctatcgtctggcctcaccaaccattcgatagattcggcctggtgatccaaattcctggcaacgatttttcgtcgctgcccaaagccttgcctacgggcacagttgggctcagtcatacagcacttgagggggtgttgtttgacttatactactcctctaactggactggcaaaatgggtcggccgacgcgaatttctttcgtgtcggtggccacacaaacaagtcctttggacttgcgtgacaatttggtctcttgttccaccaaagaccatgggggattgctggaagtaagatttgaaataaggggattggagtttgttaactctgatctggtgggtccaaaaggccagcaatctcccaccctgactgactacctggctttacttcctgaggtgtatgagatatctaactctttgagtctcagggacgagaacacctgtccaactccggtggagatcgagaacgaagaggaggagtcctcacctctcggggctacggccaggacctctccattgccatcgactccggtctcgcgatcccgtgacgatctcccgacggagggcactcctgtggtgaagatcccggacaggaatacatcatgtccgtgttgcggtaataggatgggtaaattgtcgggtttaattgaacatctgaaaagagcacatgggaagaaaaagatcttattccaatgcgctcggtgtgggagaactgatgtaagacaccatagtattgcctgtcattttcctaaatgtaaggggcctgtggaagcctctcccgagaggagttggaagtgtgaggagtgtgagaaaacatttgaaacaaaaatcggcctggggcagcataagcgcttggtccatccagtcacaagaaatctcgagcggattgccgctacacgccccaaggcaggtacaatgaggggggcacatcgtcggtgctggaccgaggatgagattgaactattgaggaagttggataaacaatatgaggggcagaaaaacatcaacaagttgattgcggagcatattccgaccaagacaacgaagcagataagcgataaaagacgggaccttcataagagcccggtgaagaagggaaaagaccatgggcggaagaaacatctagaattggaaggggaacaccttgccgaaggagaacatctcgtgtgcattggatcggagttggaggggggactgcggtcccgataccggaagacaatcgctgagtgggttacatctggaaaattgtccattctccatggaatgtttgagcaggtgatcgaaggggaagaagatccagcaatagttgctgacagggcaatgaaagactgtttcgcatgccttgcctctaagtccgtcgagttgaaagctggccagggtcgaccgtgccagagggcccaaactgctcggccttcggaaccaccaaaggggtggatgaagaagagagctaggaaacgggggcagttcctacggttccagcggctgttctacctggatagggggaaactggccggtattatcctggacgacgtggaatccctgaagtgtggtatcccacaagacgagatacacgacgtgttcaagtcgagatgggaatcaccgggaacattcaagggcctgggtgcgttccggtccaagggccaggcggacaactcggcattcgaagccatgatcacggcaagagaaatctctaagaacatcagagagatgaataagaacagtgcgccaggaccggacagactaagtctgcgggatatcattaagatagacccccattgtgtccagttaatggaagtattcaatctatggctggtgactggcatcgtaccggacgtggtgaaagaatgtcggactgtgttaatatcaaagtcatctctgccggagcgccaaatggacatcaataactggcgaccaattaccatcggatcgatcatcttgaggctgttctcaaggatcctgacggcaaggctggcgaaggcatgccctattaacccacgacaaaagggctttattagatcagcgggatgtgcggaaaacctgaagctgttacaactattgataaagaatgcaaaaaaggaacatcgacccttgggcgttgtcttcattgacctggccaaagccttcgacacagtaagtcaccatcacctgattgcagtgcttaagcaaaagggtgtggaccatcacattatcaccctgatttcaaacatgtatcaaaatatcagaactcgcattaccatgaagaatgaacagtcggatcccattgggattcaaattggtgttaaacaaggcgatccaatgtcacctttactatttaacttatctgtggaccctctgttgtgtaagttagaggaagaagggaatgggtaccatcacggctcgaagtgtgtaacatctatggcttttgcagacgatctggtgttgctaagtggatcatgggaaggaatgcaaagtaatattaaaatcctagaggccttttgcgatctgaccggcctcaggactcaaggggagaaatgccatggcttttatatacaacctactaaggactcgtataccatcaatgactgtcccccatggcagattaacggcaccccactaaatatgatcgaacccggtagttcggaaaaatacctgggactgagaatagacccatggactggaatatcgaaacccgaactactcatgaaaataagagattggctacaacggattggagaagcgccactgaaaccgtttcagaaagttgacatcttgaagggatatactatcccgcgactgatttacttagcagaccaggctgatgtaaaagcaacctacttagaagaacttgacctggcaattcgaactacggtcaaggagtggttacatctacctcctagtacctgcgatgccatcctgtattccagcacacgcgatggaggcctaggcatcactagactctcgggtctgatccccagtatacaagctcgaagactgcacaggattgcgcagtcttccgacgatgtgataagatcaatagtgaaacaagaggggatcgataaagagtttgaaaaattgtggttgatagctggaggtgataaagagaaaataccatctatttgggacccgagtgcgattagggtaacatctgaagaattgggcggggaggaacttgtttcagaatgggaaataccaactcccaaaaccatctttcctaaaccttgtgactggcgtaaacaggaatttaaaaactggaccaagctacagtcccagggccgtggtattgccaactttgagaaggacaaaatcagtaataattggctcgaacgatacagaggcattcctcaccgaaaactcctcacggcactacaattgagagctaacgtgtaccccactagggaattcctggcaagggggagacaggagtcgcatataaaatcctgtcgacactgtcaagcagaaaacgaatcaagcgctcatataattgggtactgccccgcagtgcaagatgccagaattaaaagacacaaccaattgtgtgatttacttgcagttgaagttaaaaggaaggattggatcgtatttcaggagcccatactaaaagatgaacaaaatgagatttacaagcctgatcttgtatttgtaaaaggagaccaggcgatagttattgatgtaacaattcggtatgaaagtaaattgtcatcattggcagacgcggcggcagaaaaagttaaaaaatattgccatctcaaaagtcaaattcaggaattgacgaatgctaaaaatattacatttaagggattccctgtgggcgcacgaggtaaatggtactctggcaattacgaagtgttgaaagcattaggaatctcaaactcccgacaagacaaaatagcacgatgtatgtcaagaaaagctttatttacctctgttgatatcatacatatgtttgtgagtcattcgagatctattgtaagaacctaattatctatactgttctgctttatatattgtttctgctgtattactatatgttgttttattgtaattattgttttgtttcatattggtcttgctctgttatatattgctcttgtcgcatggttacttattgttttgctgtgttactatcaattctttaataaaactacccctggtactcctgctctgttaccttggcactggaaaggtcgagacagtaagttggaactcgtattcatgacgtgtcacattcacctaaatttacacaaaatactaattggacttgtcaaaattttctaccaaattggacaattttaccggattggacataggtggacgggccacctttacttaactcggaaaagaaacatatataattttatgtgtttgttaaa

SEQ ID NO: 512 - DNA, 4672 bp, Oenanthe melanoleuca
  source 1..4672: mol_type = genomic DNA
aagagtatagttacaacctgggcatagccgcagagatcgcacctcctcgtggtcccgctggtaaccctgccaagggtgacaaagtcgatctctgccccaggacggagccgttgggactcgccaccccaacgaactccagccaaaactcggtgaaaccaatttctcggcaaaagccgcacggctcattgcctgaaacctggccccccggtttcataggggcaatgcctcccaccgcccaaggtggtcccattgagatgggtgagaattctggatctgattttggggggggggtctggtttagagcgccggtacgcctgtccagggtatcggtgggctcccagacctcccccagtgactgggttgacctgttgtcctggaatttaaatctatttccaggatctaaaacccagtgggttgacctgttgcctgtgcacggggtcgacctggtgtccaaaaatgaccgggtaaacctggccgctcgaaatttaccatccaaattgtcccccgattcggcagaaaatgaattggctttggtggcgaacttggagttctataggtcggacttgcaggagggtgttcatttttctgctaaccgggagggattgagcgggctgcccgaggtgtatgaacaactaacaccacaaccgtgtgcgggagatagtttacatgctaacctcccgcgagacgctaaactgtttgtgcttgagcaaaggtgcagcgaggagaaggagagcgaggaagcgccgaagacatcacctccaacgcctgggaagcccggggagcagacacctgaggagaccgtgacggtgactgttccggacaaaaatccaccttgtccttgttgtggtacccgggtgaactctgtgttggccctaatcgaacatctaaaggggtcgcacgggagaaggagggtttgttttcggtgtgtgaaatgtggaaaggaaggttctaactatcacagtattgtttgtcattttcccaaatgcaggggtgcagagactgaagcggctccagctggggagtggatctgtgaggtatgcggaagagatttccaaactaaaatcggcctgggacaacataaaagacatgcacacccgctggttaggaaccaagaaaggatcgttgcttcccacccgaaagaaacatctaaccgaggagctcacaaaagatgctggacaaaggaggaggaagagatgctgataagattagaggcgcagttcgagggccacaaaaacatcaataaactcatcgcggaacacattacaaccaaaacagctaagcagataagcgacaaaaggagattgctgcccaggaagccagttgaggaccttgaagaagaacctgctgtgagtactcgcaccaggagagcagctgcgggtctaagaaaggaacctggggtgagtcatcaaggccaggctgtagccgagaacaatggcccaggcaggagccgcctgccaggggagccagctgccggagaggaaacaatggacgagataaggcgccgccctgataagggtaacggccggaggggagccatcaagaagcaaaaggaggggcaactgcaggcccattaccaccggacactcggggaacggctatcagctgggacaattaacaccttcccccgggcattcaagcagttaattgagggtcaggaaatgcaagcaacgatcaaccagacagcgcaggactgcttcggatgcctggaagcgataagccagataagaacagcaacccgagataagaacaacaaaggggcccaggagaaaagaccaaagagaccttttcagaagtggatgaaggacagagcaattaggaagggtaattaccttcgcttccagcgattattccatctcgatagggggaaacttgctaaaattattttagacgatattgagacattgtcctgcgatatcccacccagtgaaatttattcggtttttaagaacagatgggaaacacctggtaacttcactagccttggggaattccaaattaacgggaaagccgacaatagcgctttcagagacttaattacggccaaagaagtcgagaaaaatgtgcaggaaatgagcaagggctcagctcccggtccagatgggattactcttggggacatcaagaagatggatcccgagtactcccggacagcggagatcttcaatctgtggttaacatctggaaaaatcccggacacggtgaggggatgcaggactgttttgattcctaagtcgacagaacctgagcgtttaaaggacattaacaactggagacccatcacaatcggttccatcttgctgagactattctccaggattataacagctaggctgagcaaagcctgccccctcaacccaaggcaaagaggattcatcagagcggcgggatgctctgaaaacctgaaactcctgcagtctttaatgtggtccgccaaaaaagaacacaaaccactgggtgttgtattcgtggacattgccaaggcttttgacaccataagccaccagcacatcattcaagctttgcagcaaagggaagtggacccccacatcatcggcctggtgagcaatatgtacaaggacaccagtacatatatcaccgtgaagaaaaacacacgcacagacgaaatccatttccgggttggagtaaaacagggtgacccgatgtcaccccttttatttaatctggctatggaccccctgttgtgcaagctggaagaaagcggcaaagggtaccatcgaggagggagcagcatcacggcgatggcatttgcggacgatctggtcttgctgagtgactcctgggaaaatatgaaaactaacatcaagatattagagaccttttgcaatcttaccggtctcaaaacacagggagtaaagtgccacggctactacatcaagccgacaaaggactcttacaccgtcaatgactgcgctgcgtggaccatcaatggcacacccctgaacatgattgaccccggagaaactgagaagtacctcggcctgcagattgacccctggactgggatagcaaaatccaatctctccacaaaactggaatattggcttcagcgaattgatcaagctccacttaaacccctgcagaaagttgatatcctcaaaacatacaccatccctcgactgacatacctggccgaccattcagacctgaaggctgggttcctggaaagcctcgaccaaaaaattagaacgacggtcaaggactggctgcacttaccttcgtgcacgtgcgatgccatcctgtactcgagcacgaaggacggtggtttgggcattaccaaattggcgggactgatccccagcgtgcaggcccgaagactgcatcgtatcgctcagtcttcggacgaaacgatgaaaatgttcctggagaaagatcaaatggaacaactgtataggaaattgtgggttcaagctggaggggacagggagaagatcccttcaatttgggatgcaccaccggtgagcgaaccagctaacagtgcagagacatattcggagtgggaagcaccgtccttgaaaactaaatttccaaaaccgtgcaattggaggaaaaatgaatttaagaattggactaaattagtgtcccagggccgtggaattacaaattttgaaggcgataaaattagcaaccattggctacaatattacagaagcatacctcacaggaagctcctcactgctttacaacttagagccaacgtataccccacgagagagttcttagctagggggagacaggataaatacatcaaggcatgcaggcactgcgatgcagatattgaaagctgcgcccacatcatcggcaactgcccagtaacgcaggacgcccggatcaagaggcacaattacatctgcgatgtgcttcttgaggaggcgaaaaagaaggactgggtggtgttcaaggaaccgcacataagggataccaccaaggaactgtacaagcctgacctgatattcgtgaaggacgcccgtgcacttgtggtggatgtgacagtacgatacgaagcagccaaaacatcgctggatgacgccgctgcagagaaggtgaacaagtacaagcatttagagaccgaggtacgaaacctcaccaacgcaaaggacgttgcttttatgggctttccccttggagcgcgggggaaatggcaccagaaaaactttgagctattgggagctctgggcctctccaagtcgaggcaggagaaaatcgcaaggactttatccacaacagcgctcatgtcatctgtggacattgtacatatgtttgccagtagggccagaaaattaggtaaccaggagtagtttatttatttttattcttgttattgttataggttgttttactttttgttgtatttttgtctttttgtattttgttgcaatgttttgtatgttttcttattatttaaaaaaaaaaaaaaaaaaaaaaaaaaaaaaaaaaaaaaaaaaaaaaaccaataaaaaagacagtagctagggacgcagggcagccacaagccagttaggtagctgatagtgagtagggacaggactttttatttcataccgcgtcaattaccacccgaactggaccaatttaccggatttgtccaaggtggacgggccacctttacttaacccggaaaaggaacatatattatttatatgtgttcgaaaaa

SEQ ID NO: 513 - DNA, 4430 bp, Otis tarda
  source 1..4430: mol_type = genomic DNA
gtcgggatcatagttactagctgggcagagttgcagaggtcacacctccacgtggtcccgctggatgcccttcggggtaaccaagttgacctctgccccagtgtgagagggagttatagttccttcctccctatcgattggcttcgccgacctgtcgatagtattccaggtgaaacaaatttctggcaattgattcggtatcattgcccaaagccttgcccacgggtataaagttgggcagagtctgatagcggctggagggggctgctatccggcttataagacccctcacattgcaggacaaaatgggccggccgatacgagtggccttcgtatcggtggcaacacagacaagtcccttggacttgagagacgatgtggtcattaaatccatcatcgaccacagggaagtggtgggagaggaaattgaatatagaggactggagtttataaactcacagattgttggggtgatggcccaccctcccactccgattgagactttggccatgttaccagatgtgtacgaggtccctgatgtgggtcctaggggcgctacaactagcccccatttagtggaggtggagagtgaagaggaggaggtactctcacctccgggtgcaacggctcacccaattcagataccatcaacgcctatccttggtgctggaagcgagcatccaaccgagggcacaccggttgtgaaggttccggacaataatccaccttgtccctgctgcggcaaccggatgggaaaaatgtcgggactgattgaacatctccggagagcgcatgggaagagaaagatcctgttccagtgtgcccgatgtggacggaccaatgtgaaacatcatagtattgcctgccattttcctaagtgcaaaggggatattacatctcccccaaaaggtgattgggtctgtgaggaatgcgggaaggcatttgaaacgaaaatcggcctgggacaacataagcgtttggtccacccagctgcgaggaatattgagcggattatcgcctcccgccctaaggaaggtaccgctagagggttacaccgacaatgttggacggaagaggaggttgagttgttgaaaagattggataagcagtatgagggaagtaagaacatcaataaactgattgcggaacatattccatcaaaaaccgctaaacaaataagtgataaaagaaggggacttcataagagtccaataaagagaggtgggaaagaacaaggtgggaagaaacttttggaagaggaaggagaacatcttgtggagactggttcgcatgaaaacgggggtttaagatctcattatagaaggacggtttcggaatggataacatcagagaagttacccattcttcaggggacctttgagagcgtgttggaaggatcgggagagccatcaaccctggttgatgaagcggtggacgaatcctacgcacgcatgttcagaacatccatcgaattgaaagcttgccaagagagaaagcagcggatggcccgcagggctcgtccctcggaaccaccgaaagggtggatgaagaggagggccaagaaaagggggcaatttctacgattccagcggctgtttcacctagatagagggaaacttgccggtattatcctggatgatgtggaatccctgaagtgtgaaatcccactggatgaggtgcacagtgtgttcaagtcgagatgggaatcaccgggaacattcaagggcctgggtgctttcaggaccaacgggcaggcggacaattccgcattcgaggccatgattacggcaaaagaaatctcaaagaacatcaaagagatgagtaagaacgcagcaccaggaccagatggactgactttaagagatcttattaagatggatccagagtgtgatcaattgatggaggtgtttaatttgtggctggtcactggctctataccggacatggtgagagaatgccgaacagtattaatatctaagtcagccttgcctgagcgtcagagggacatcaataattggcgccctattactatcggttccatcctcttgagactattctcaaggattttaactgcgaggctgaccaaagcgtgccccattaatccaagacaaaggggatttattaaatctgctgggtgtgcagagaatttaaagctattacaactgttaattaagaacgcaaaaaaggagcatcgacccctggggatagtattcgttgacttagcaaaagcctttgacacggtgagccatcatcacatcattatggctcttaagcaacggggcgtggacaatcatattattgccctaattaagaacttgtacagtaacatcagtactcgaatttacctgaagaatgagcagtctgatcccattgggatccacattggtgtaaagcaaggcgatccaatgtctccgatattatttaatttgtccatagaccctctgctgtgtaagttggaagaggaagggaatgggttccaacactgttcgaggacaataacagcattggcttttgcagacgacctggttctgctgagtggatcatgggagggtatggagagaaatattgaaattttagaggcattttgtgagctgactggcctcaaaacacaaggtgaaaagtgccatgggttttacatcaaaccgactaaggactcatatacgatcaatgactgtccagcttggactataaacggcacgccattgaatatgatcgaaccggggagcactgagaaatatctgggtctacagattgatccatgggttggtatatctaagcccgaattacgtatgaaaattgaagattggctccaacggattgggagggctcctttaaagccgtttcagaaggttgacatcttgaaagggtataccattcctcgcttgatctatctggcagatcaggccgatgtgaaagtcacatatcttgaatcccttgacctgattatacgaactacggtcaaggagtggctacatttaccaactagcacttgcgacgccatactctactccaacactcgagatggcggcttggggattaccagacttgtgggcctgatccctaatatccaggcccgaagactgcaccgaatagcgcagtcatcggacgaactaattcgatctgtcgtcaaagaagagggcatagagagagaatttgagaaactgtgggttacagctggaggaaaaaaggacaaaattccatcgatatgggacccagggacggtcatgataatatcagagggagtgggcggtgaggaaccagcctcggaatgggagatacccgctccgaaagccatctttccgagaccttgtgactggaggaaacaagaatttgcgaactggaccaaactcttatcccagggccgtggtatttccaactttgaaaaagataaaatcagtaacagttggcttgaatattacaggggcattccccacagaaaactaatcacggcattacaactaagagcaaatgtctaccctacaagggaattcttagcgagaggcagacaggaataccaaattaaagcgtgccgacattgtcaggcggaaaatgaatcatgtgcccatattataggcttttgtcctgcggtacaggacgcaaggataaagcgtcataatcaattgtgcgaactgttggcaaatgaagccaaaaagaaagattggattatttttaatgaaccagtactcagagatgagcaaaatgaattatacaaaccagatttaatatttgtcaaggaaaatcaggccatggtggtagatataacaataaggtatgaaagtaaaatcacttcccttgtagatgctgctgctgaaaaagttaaaaaatacgaacatttaaaaatacaaattcaagatttgactaattgtgagaatatcaaattttatggatttccaattggtgcacgcggaaaatggtatcaaggcaattatcaattattaactgaactgggactctcctcatcccgacaagagaaggtggctcgacaaatgtcaaagcgagcgttgtttacatctgtagatattatgcatatgtttatgagcaaatcgagaagcgtcgtgagatcataattgtaatgaattgtatattatgaattgggaataaagtatttattgtctgtttactaaagggaaagggagccgaggtggtggccccggaggcgatttcgacacaatagtaacatcctggtacgacggtctaaactatgatctattagtgggtgatctatgaatgtaattaacatcaatgatagtatgtagggatatctctggaatcagaatcatgacgtgtcacttaacaacaatttgacaccaaattactggtttgactttaaactgaatttgacactaaattactggttttgtcctaggtggacgggccacctatatttaacccggaaaaggaacatgtataaattatatatgttcgataaa

SEQ ID NO: 514 - DNA, 4370 bp, Tyto alba
  source 1..4370: mol_type = genomic DNA
gacgggatcatagttactaactgggctcagctgcagaggtcacgcctcctcgtggtcccgccggataccctcttgggtaactgaagtggcctctgccccagtgtgatgagatatggttacttcctccctatcaagtgacttcaccgaccacttgatagtatctaattggtgatacaaaatttcggagtcttaattgactacccagagcctggcccacgggcctatgttgggcgcagtctgacagctcgtaagggagtgctgtctggcttaaatttgacccttacctggatttgacaaaatgggcctagcagcacgaatagccttcgtgtctgtggccacccaaacaagtcttttagacttgcgtgacgatgtggtccctcgtaccatcagagaccacgccaaattggtggacgttgggataaattttagaggattggagtttgttaactcagatgtggaaggattggaagggggagatctatccaccgtgactgagagtttagccatgttgccggaggtgtatgaggaaccttccccttctgcactggagggcaaggacatcagccccctccttcgggagagtgagtcagaaggcgagggggagctctcgcccccaggggccgtggctcaactcttcccattgccatcgtcgcctatcctggcttccgggggagaacctccaccggaaggtacacctgtggtgaaggttccggacaaaaatacatcttgtccatgttgtggaaccaggataggaaaagtgtcgggactggttgaacatctaaggagagtgcatgggaggagaaagatcttgtttcagtgtgcgaggtgtgggaaaacgaatgagaaacatcatagtattgcttgccacgttcccaaatgcaagggagccatagaggcaaccccaaaagaagggtgggcgtgtgaggagtgcggacggacatttgaaacaaaaatcggcctgggacaacataagcgtttggcccatccagtcactagaaatctggagcgaattatggccgcacgccctaaggagacttccgcgagaggggtacaccgaaagtgttggacggaagaggaagtcgagatcttgcgtaagttggagaagcagtatgaaggaaacagaaacatcaataagctgattgcggagcacttgcccaccaagacagcgaagcagataagcgacaaaagaaggattctgcacaagagtccggttaagaagagggaaaaagaccaagagtggaagaaacatctgagagaaggggaacatctggtgagcattggatcccggaaaagaggtggggggctgaagtcccattatcgaaagactatctcagaatggataacatccggaaaactgcgcattcttcatgcgacatttgagaaggtgatcgaaggcggagaagatctgccaacgctggttggtggtgcggtggaggactgttacgcacgcctgttcaagaggtcctccgagttggaagcgagtcaggggaggaaactccagacggcccgcacggcacgcccttcggaaccaccgaaggagtggatgaagaagagggccaggaagagagggcagtttctacggttccagcggctgttccacctggacagggggaaactagccggcataatcctggacgatgtagagtccctgaagtgcggtctgccgcttgacgaggtgcactgtgtgttcaagtcaagatgggagtcgccgggaacattcaagggcctcggaggtttcaagaccctgggtcgcgcagacaactcggcattcgaagccatgatcacggccaaagaaatctcgaagaacatcaaggagatgagcaagaactcagcaccaggaccagatggtcttagtttgagggatcttatgaagattgacccccactataccatgctggcggaactgtacaatctgtggctgctgactggtaccatcccggacatggtgaaagaatgtcggaccgtgttaatatctaaatcagccctgccggagcgccagaaggatattaataactggcgccccattaccatcggctcgatcgtcctgagattattctcaaggatcatcacagcgaggctgaccaaggcgtgcccgatcagtccacggcaaagggggtttataagatctgctggctgcgcggagaatctaaagttgctgcaacttctgattcggaacgcgaagagagaaaagcatcccctgggtgtggtgtttgtcgatctagcaaaggccttcgacacagtaagccataatcacattattgaagtgttaaaacaaaagggtgtggacaaccacataatttctttgatttccaacatgtacagtaatattcatacatatatcgacatgaagtctgagcagtcggatcccatcgggattcggattggtgtgaaacagggtgatccaatgtctcctatattgtttaacttatctgtggatcctctactgtgtaaattggaggaggaggggagtgggtaccaacattattcgacgagtataacatctatggcttttgcggacgatctggtactgctaagtgggtcctgggaaggaatgcggagaaatattgaaattgttgaggctttttgtgatttgacgggtctgaaaacacagggagagaagtgccacggcttttatatacagccgactaaagactcgtataccatcaatgattgtcctgcatggaccattaacggcactcccctcaacatgattgagccaggcagctcggagaaatatctgggtctgaaaatcgacccgtgggttggtatatccaaaccggaactgctggccaaaattaaagattggttacatcggattgaccgggctcctttaaaacctttccagaaagtagacatcttgaaagggtataccattccgcgcatgatctacttggcagaccaggccgatgtaaaagtctcgtaccttgaatcgctagatttgacaattagaactgctgtcaaagagtgggtacacttgccacctagtacctgtgacgccatcctatattccagcacaagggatggcggtctgggactcaccaggctatcggggttaattcccagtgtgcaggctcgaagactgcacagaattgcgcagtcttcggatgaggtgatcagggaaattgtaaagaaagagggtatagagaaagagtatgagaaattatggttagcggcaggaggaaataaggaaaagattccatctatatgggacccgagttcggccatggtgatcacggaagtgttgggcggggaagatcaactgtcggaatgggaaaggcccgctcctaagaccatatttccgaaaccttgtgattggcgtaagcaagaatttataaactggaccaaattggcttcccagggccgtgggattaccaactttgagaaggataagatcagtaacagctggttagaaagatataggggcattcctcagagaaagatcgtcaccgctttacaactacgggccaatgtctaccccacaagagaatttctagcgaggggtaggcaagagacacatgtaagatcgtgtcgtcactgtcaagcggaaattgagagctgtgcccatatcatcggatactgcccggcggtgcaagacgcgagaataaaaagacataaccaaatttgtgaattactaattgaggaggcaaagaaaaaggaatggatagcattccaagaaccattgattcgagacgagaaaaacgaattattcaaacccgatttggtatttgtaagagaagaacaagcaatagtagtagatgtgaccattagatacgaaagtaaagaaacatccctagaggatgcggccgcagagaaaattaagaaatatcagcatttggaagatcagattcaggaattgactaatgcaacaactattaaatttatgggctttcccttgggggcacgtggcaagtggtaccagggcaattacaccttgttaaaggaattgggactctctagttctcggcaagataaagttgcacgtcgattgtctaatcgtgcattgttttcttctgttgacatcattcatatgtttgctagtaaagtaagaactgtagaaaatgtttaattgtatcatcacattgtagttgtaatatctgtgcactgtattacttttaattaataaaataaagtggtatgaagagccgacatggaaggatcgtgggggggttagatcaggagagaaaacgatcagagtattgggatttcaacatagtaggtgggaatcttgttctttttatgacgcgtctcaaccgaaattgacattaacaattggacttgacaaaatttttcaccaatttggacccaggtggacgggccacctttacttaactcggaaaagaaacatatataatttatatgtgtttgataaa

SEQ ID NO: 515 - DNA, 4244 bp, Xenus cinereus
  source 1..4244: mol_type = genomic DNA
gacgggatcatagttactaactgggcacagctgcggggggtcacacctccacgtggtcccgctggataccccttgtgggtaaccgagttgaccccctgccccagtggcacggagctatggttacttcctccctatcgagtggactcaccaaccacttgatagtatctcccaaaggtgaaacaaagttctgaaacgctccgtttctaaattccttagcccacggtaatagttgggcacctccgacaagttcggtggggtactgtcggattgatcaaatcctcacaattggcacttcgaaatgggatggctcgggcgaatctggttcgtttccgttgctacccagactaattactcggattgggcatttacggttcattccatcacgaaccctgagctgccaggggatgggaatgcagaaataagagggttggagttttgtaactcggaaaagggctattatgttgggcactccccctcctggttcagtgtacttgatactttaccggaggtctatgagactccgatgttgcagggcaatgtcatcagcccacgttctgagccggccgaacaggaaggagaaagaccatcttctcctccgataacacctccacctcccattctggaaaccgaggcagacctcccgcaagagggcacacctgtggtgaaggtcccggacgaaaatccagcatgtccatgctgcgggaaccggatgggaaggatctcggggcttattgaccatcttaagaggacccatggaaagagaaagatcttatttcaatgtgcccgatgtggaaaaacaaatttgaaacatcacagtatcgcttgccacgtcccaaagtgtaaaggcgtagagggattgagtccagtaagagcttggacttgcgaggaatgcaatagatcatttgggacaaaaattggtctgagccagcacaaacggctcgctcacccagttacaaggaatcttgaacgaataacagcttcccgcccaaaagaggagagtgcaagaggtgcacaccgtcggtgttggtcggaagaggaagtggaattacttaaaaagctggaaaaacaatatgaagggaacagaaacatcaataaattaattgcagaacatttaccatcaaaaacggctaaacagataagtgacaaaagaaggggactggtgaaaagtccatctaagaaatctccatctaaaagaaaagggaaaaatctggcgctgcgagaacaacttatggaagaaggggaacatctaccagagagtggctcacaagatggagggggactgcggtcccattaccgaaaggttattgctgaatggataagatctcagaaaataacctccctcaaggatgtctttgagagagtgatcaaagggaaagaagatctcccattactagtggacaaagctgcccaggactgctatgcatgcctgaaaatggatttgattgaagagggggatcggcaaagtcaaaagatccgagaaatccgcaggccccgtccacagaaaccatcaaaacaatggactaaaagaagggccagaaaaagggggcagttcctacggttccagcggctgttccacctagatagagggaaacttgccggtattatcctggacgacgtggaatccctccaatgtggtattccacttgacgtggtgcatgaagtattcaagtcaagatgggaatcacccggtacattcaagggcctgggaacattcaatactattggacacgcggacaattccgcatttcaaaccttgattactgcaaaggagatcgtgaaaaacatccgagaaatgaataaaaacgcagcaccaggaccggacgggatttccctgcgggatctcatgaaaatcgacccccattgtactaaattaatggaattatttaatttgtggttgctgactggttatataccagagggaataaaaaattgtagaacaatattgataccgaaatcatctgtaccagaaaagttaaatgatgtaaataattggagacctataactattggctcgattgtattaagattgttttcaaaaatcttgactgctcgattaactaaggcatgtcctattaacactcggcaaagagggtttataagatctcctggttgttccgaaaatttgaagttattacaattattaattcgatatgcaaaaagggaacacagacccctcggggttgtctttgttgacttggcaaaagcatttgatacggtgagccactcccatataattgcagttcttaaacaaaagggagtcgatgagcatataataagactaattgaaaattcatatgaaaatattaatacatatattgatatgaaaaatgttaaatctgaccttattggaatacaaattggtgtgaaacaaggcgatccgatgtctccaattttgtttaacttgtctgtggaccctcttttatgtaaacttgaagaaatgggtaacggatttcaatattatacgaaagatgtaacatcactggccttcgctgacgatttagtattagtaagtgggtcctgggaaggtatgcaaagaaatatagaaatcgtcgagaccttttgtgaacttactggtctcaaaatgcaaggggaaaagtgccatggcttttacatcaagccaacaaaggactcatatacgatcaatgactgtccaccatggactattaacggcacccccctcaatatgattgaacctggtagctctgagaaatacctgggtctatatattgacccatggacaggaatatctaaacccgagctactcgagaaagtcgatagatggttgtcgaaagtgggaaaggcaccattaaaaccttttcagaaggttgacatcttgaaggggtacctgatcccaagattaatttatcttgcggaccaagcaaatttgaaatcaacttacttagagtcccttgacttagccatacgaactggagtcaaggagtggttgcacttaccatcgtgcacctgtgatgccatcctttattctaatactcaggatggaggattagggatcagtagattggcggcactgatccccagtgtgcaagctcggagactgcacagaattgcccaaactacggacgatgttttaagaactgtagtcaaaagagaaggaatagaaaaagaatttgagaaattatgggtgacggctggtggtgacaaagaaaagattccatctatatgggaccccaaaacaattatggtaatatctgaaacgggcggtgaccaatcactatcggaatgggagactcccaatccaaaaattatctatccaaaaccttgtaactggcgaaaaagggaatttaacaattggactaaattattaactcaaggtcggggtatcgctaactttgaaaaagataaaataagtaacaattggattatacattacaggggcattcctcaaaggaaattgattactgcattacaactgcgtgctaatatttatccaacaagggaatttttagctagaggacggtcagaaacttatattaaatcttgccgtcactgtcaggctgacaatgaaacttgtgcacatataattggctattgtccatctgtacaagacgcaagaatcaaaaggcataatcaaatttgtcatatattggcagaagaagccaaaagtaaggattggctggtttaccaagaaccgttattaagggatcagcaaaatgaattatataaacctgatttgatttttgttaaagggaatcaggcaatagttaccgatataacaattagatatgaaacatctttaacaactttggaggaggcagcattggaaaaagcaaagaagtatgcacatttagttactcaaattcaggacctgacgaatacatctgttataaattttacaggctttcctttgggatctcgtggtaaatggtaccagggcaacttcaaaatattaaaggaattgggtctctccagctcccgacaagaaaaggtcgccagacgattgtcaaactatgctttatttagctcggtggacattgttcacatgtttgctagtaaagcgaggacagaggtaagataaacttattctgacttatttagatttgtaatgtttagatgtagtattgtagcatgtagttttgtagattgtaatgtagaatgtaataaaatggactgggatctcgtgatgattaccttaatcatgacgctcactggactgacttggttggtggacgggccaccttataaaacccggaaaaagtacacataccctgttatgtgttcgtaag

SEQ ID NO: 516 - DNA, 4699 bp, Aphelocoma californica
  source 1..4699: mol_type = genomic DNA
ggcggcttatgagagtatagttacaaactgggcatcgctgcagagatcgcacctcctcgtggtcccgctggataccctgcgtagggtaacaaagtcgatctctgccccagcacggagtcgttgggaatcaccagttcaacgatctcctgctaaattcggtgacacaaatttgaggtaaaagccacgcggccattgccctaaacctggccccagggtttaaaaaagagggcaaaagatcggtaggcggtgaagggggccactaccgttctcatggaaatctccaaaccatttttggggccgccgatacgcctgtaccaggtatcggtcggcacccaaacctccaattctgattgggttgacctggtgtcccgggatttcaaaccgggctccttgtctaagtcctgcggggtcgacctggcgtctttaatttctgaacgccgggtagccctgctgtctaaaaccgatcgggtagacctggtgtatttaacttctaaacgccaggtagacctgctgtccaaaactgaccaggcagacctggtgcctcaaaatttaccatctggctctcctaattcggcagaaaatgaattagatctggtgaacttagagttttataggtcggatctgtgtgttgataacgtgtgtgtgcatttttctgtgaattgggagggtttgagcgggctgcctgaggtgtatgaacaactgacaccacaaccgagtgcgggagacggcgaccatccccccaaggacagtgaagtgattgtgcttagcgacggggaggaaagcggcgagcacgagcgtgggagcgccttggagacttcgcctcctgagcccgagaccacctcggagacttcgcctcccgagccggggaccagcgctttaccggcaccatcccctcctccagcagaggaccacggggagcaggcaccagaggacatcctagtggtgactattccggacaaaaatccaccttgtccatgctgtgggacccgggtgaacagcgtggggggcttaattgaacatctaagagaagcccacgggaggaggagggcctgttttcgatgtgctaagtgtgggaaagaaagtaacaactgtcatagtattgtttgtcactttcctaaatgcagggcaaagacagagacagctccggctggggagtggatctgtgaggtgtgcgggagagacttcaaaactaaaattggcctgggacaacacaaaagattggcacaccctatgattagaaatcaggagaggattgctgcttcccacccaaaagagacctctaacagaggagcccacaaaaggtgctggacaaaagaggaggaagaactgttgataaaattggaagctcagtttgagggcaacaaaaatatcaataaactcatagccgaacatatcacaactaaaacagcaaaacagatcagtgacaaacggaggctgctgcccagaaaaccgacagaggatgtttgtgaggagcctggggtgagtcatcgcaccaggagagcagctgcggggctaaaaatagaacctgggctgagtcatcagcctgggaaaggaacagaagacaacggacctgggataagccagcgactcaggaggccggctgccgggaggagaaccgaaccagagataaggcaccaccctgataagaggacaaaacagctgggaaccatcgaccagcagagggaggggcaactgcaggcccattatctgaagacactcggtgaatggctttctgccgggacaattaacaccttcccacgggcattcaagcagttaatcaaaggccgggagatgcaacccctggtgaatgagacagcgcaggactgctttggatgcctggaggcaatcagccaaatcaaaacagcagcccgagataaggacaagagggagacccgggaggggaaaccgaaaagaccccttcagaagtggatgaaaaagagagcagttaaaagaggtaaatacctacgtttccaacgtttattccatcttgataggggaaaattagctaagattattctggatgatgtagaatgtctgtcctgtgatatcccacccagcgaaatttattcggtcttcaaagccagatgggaaacagctggtaaatttgatggccttggggactttcaaattaatgggaaagccgacaatagtgctttcagggacttaattacggctaaagaaattgagaaaaatgtgcaggagatgagcaggggctcggctccaggtccagacgggattactctgggagacatcaggaagatggaccccgagttttcccagaccatggagatcttcaacctatggttaacatcaggaaaaatcccggacatggtgagggggtgcaggactgtgttaatcccgaagtcatccaggccggagcgcttaaaggacattaataactggagacccatcacgattggatccatcttgctgcgtctgttctccagaattctaacagcaaggttaaccaaggcgtgccccctcaacccaaggcaaagaggctttatcagagcggcgggatgctctgaaaacctgaaactcctgcaaactataattcgatcagccaaaagagagcataaaccgctgggtgttgtatttgtggacattgccaaggcctttgacaccgtgagccaccagcacattctacaagctctgcagcaaaggtgcgtggatccccacatcgtcagcctggtgagcaatatgtacgagaacatcagcacatatatcaccacgaagaaaacacacacagaccacatccagctcagggttggagtaaaacagggcgacccgatgtcacccctgttatttaatctggctatggaccccctactatgcaaactggaagagagtggcaaggggtaccaccgaggacagagcagcgtcacagcgatggcatttgcggacgatctggtcctgttgagcgactcctgggaaaacatgaagcagaacatcaggatagtagagaccttttgcgacctcaccggtctcaaaacacagggggaaaagtgccacggcttcttcatcaagcccaccaaggactcctacactgtcaacgactgcgctgcttggactattaatggcacacccctgaacatgatacaccccggagaatcggaaaagtacctgggcctgcagattgacccctggactgggctagcaaaatccgacctatctacaaaactagaaaactggcttgagaaaataggtaaagctcctcttaaacctctgcagaaactagatatcctcaaaacatataccatccctcgactgacctacctggctgaccattcggatctgaaagcagggttcctcgaggcccttgaccagacggttcggacgacggtcaaggaatggctgcacttacctacgtgcacttgcgatgccatcctgtactcgagcacgagagacggcggtttgggccttaccaaattggcaggactgatccctagcgtgcaggctcgaagactgcatcggctcgctcagtcttccgacgagaccatgaagatgttcctggataaagatcaggtggaacaactgcataagaagctgtgggttcaagctggaggggacagggagaagataccttccatttgggaagcaaagccggcgaatgtaccatctacctcatgcagtgcagacactacttctgagtgggaagcaccatccttcaaaagcaaatttcccaaaccatgcaattggcgtaagaacgaatttaaaaattggactaaattagtgtcccagggccgtggaattgaaaattttgagggagacaaaattagtaaccattggatacaatattacagaggcattcctcacaggaaactccttacagctttacaactgagagcaaatgtctaccccacgagagaatttctagccaggggtagaaaagataaatacaccaaggcgtgcagacactgtgaggcggacaacgaaacctgtgcccacatcatcggcaactgcccgataacgcaggacgcgagaatcaagaggcacaattacatctgtgaggtgctgtcagaggaggcaaagaagaaggactgggtagtgtttcaggaaccgcacctaagggataccaacaaggaactgtacaaaccggatctaatattcgtgaaagacgcccgtgcactggtcgtggacgtgacagtacgatacgaagcaagcaaaacatcgctggaggaggccgccgcagagaaagtgaataagtacaagcacctcgaggaagagatacgagaactgaccaacgcaaaggacgttgtgtttatgggctttcccctaggagcgcgggggaaatggtaccatgggaactttgaactgttgggtgctctcggcctttccaaaacaaggcaggagagggttgcccggactctatcctccattgcgctcacatcatctgttgacattgtacatatgtttgctagtagagctaggaactgtaaggtagtataggcagttccttactattgttttgtaaacttcctctgtagcacgttttcaataaagtttcggcggaggctagggacgcagggcagccacaagccagaacatcgctcatggtaagtagggacaggacggaacttttcataacgcgtcaattaccacccgatttggaccgatttacctgatttgtccgaggtggacgggccacctttacttaacccggaaaaggaacatatagtatttatatgtgttcgaaaaa

SEQ ID NO: 517 - DNA, 4713 bp, Phylloscopus trochilus
  source 1..4713: mol_type = genomic DNA
ggcggcttggagagtatagttaccaactgggcaaagctgcagagatcgcacctcctcgtggtaccgccggacgcccggtaaagggtgaccaagacgatcgatgccccaggatcggagccgtcgggaatcgccagcccgacgaactcctgcctaaaatcggcgacgcaaatttcacggtaaaaagccgcgcggcttcttgcccaaaacctggcccccgggtttctgcggaggcactgtcggggcctggccccccggttccgatgtctcaggtaggtggactgaccacccactaccgtcccaccgaacgcggcggtgggatcccggatttggacaaatctggctgtgatttggggggggggggggtctggtccggaccgccggtgcgcttggtccgcgtatcggtcggcacccagacctcccccggggactgggtagacctggtgtcctggaatcggaacttcgtaccgggctccaagtctaagtcccagcgggttgacctggtgtctagacaccgggttgacctgttctccaaaaatgactgggtagacctggtcgctcaaaatttaccatctaaattgccccccgattcggcagaaaatgaattggctagtctggcgaacttagagttttacagatcggatttgcatggggatgaggggattcatttttctgctgtttgggagggattgagcgggctacctgaggtgtacgaacagctagcaccacaaccatgtgcgggagacaattcacatcctagtcccccgcgagacaataacatgtttgtacttgaggagaggttttgcagggagaaggacagcggagacgcgccgaaaacatcgcctccagagcctggggagcccggggagcagacacccgaggaaacggtgacagtgactgttccggacaaaaatccaccttgtccttgttgtggtacccgggtaaactctgtgttgagccttattgaacatcttaaggggtcacacgggaaaaagaggatttgttttcgctgtgttaaatgtgggaaagaaaatcctaattatcatagtgttgtttgtcacttccctaaatgcaggggtccagagactgaagcggctccagctggagagtggatctgtgaggtgtgtgggagagatttcaaaacaaaaattggcctgggacaacacaaaagacacgcacacccgttaattaggaaccaagaaaggatcgttgcttcccacccgaaagaaacatccaaccgaggagctcacaaaaggtgctggacaaaggaagaggaagaaatgctgataaaattagaagcgcagttcgagggccatagaaacatcaacaaactcattgcagagcacataacgactaaaactaataagcagataagcgacaaaaggagattgctgcccaggaaatcagataaggaggtggaggaggaacctgctgtgtgtactcgcaccaggagagcagctgcgggcctaagaaaggaacctgagatgagtcatcatgatcaggctgtaactgaggacaatggacctgggaagagccacctgccaggaaagccagctgccggtaagaaaacaagggacgagataagccagcgcccagataagggtaacggtcggaggggagccatcaagcaccagggggcggggcaactgcaggcccattatcaccagactctcggggaacggctatcagctgggacaattaacaccttcccccacgcgttcaagcagctaatggagggccaggagatgcagttaaccatcaataagacagcgcaggactgcttcggatgcttggaatcgataagccagataagaacagcaacccgagataacaacaacaaaggggcccgggagaaacggccaaagagaccttttcaaaagtggatgaaggacagagcaattaagaagggtaattaccttcgcttccagcgattattccatctggacagggggaaacttgcaaggattattttagaggatatcgaggcattgtcctgtgatattccacccagcgacatttattcggtctttaaggacagatgggaaacacctggaaactttaagtgccttggggaatttcaaattaacgggaaagccgacaatagtgctttcaaggacttaattacggccaaagaaattgaaaagaatgtgcaggagatgagcaagggctcggcccccggcccggacgggattactcttggggacatcataaagatggatcccgagttttccctgacggccgagatcttcaatttgtggttaacatctgggaaaatcccggacatggtgaggggctgcaggaccgtgctgattcctaaatcaacagacccagaacgtctgaaggacatcaacaactggagacctatcacgattggttccatcttgctgagactgttctcaaggattgtaacagctaggctgagcaaggcctgccccctcaacccaaggcaaagaggcttcatcagagcaccgggatgctctgagaacctgaaactcctgcagtctataattcggactgctaaaaaagaacacaggccactgggtgttgtattcgtggacattgccaaggcttttgacaccgtaagccaccaacacatcatacacgctttgcagcaaagaggagtggatccccacatcattggactggtgagtaatatgtacaaagacatcagtacgcatatcaccgtgaagaaaaacacacacacagacaaaatccatttccgggttggagtaaaacagggtgacccgatgtcaccccttttatttaatctggctatggaccccctgttgtgtaagctggaagaatgcggcaaagggtaccatcgaggcgggaacagcatcacggccatggcattcgctgacgacttggtcttgctgagcgactcctgggaaaatatgaaaacgaacatcaagatattagagaccttctgcaatctcaccggtctcaaaacacagggagtaaagtgccacggcttctacatcaagccgactaaggactcttacaccgttaatgactgcgctgcatggaccatctacggcacacccctgaacatgatcaaccccggcgaatccgagaaatacctgggcctgcagattgacccctggactgggattgcaaaatccaatctctccacaaaactggactattggctccaaagaattaatcaggccccacttaaacctctgcagaaagttgacatcctcaaaacatacaccatcccgcgactgacgtatctggccgaccattcggagctgaaagctgggttcctggaaagccttgaccagaaaattcggacgacggtcaaggactggctgcacttaccttcgtgcacgtgcgatgccatcctgtactcgagcacgagggacggtggtttgggcatcaccaaattggcgggactgatccccagcgtgcaggcccggagactgcatcgtattgctcagtcttccgatgaaacgatgaaaatgttcctggagaaagatcaaatggaacaattgcatgagaaactgtgggttcaagctggaggggacagggagaaaatcccttcaatttgggaggcaccaccggtgagtaatccatctaacagtgcaggcacatcctcggagtgggaagcaccgaccctgaaaaccaaatttccaaaaccttgtaattggagaaaaaatgaattcaaaaattggactaaattagtgtcccagggccggggcatcataaattttgaaggcgataaaatcagtaacaattggctacaacattatcgatccatacctcacaggaagctccttacagcactacaactcagggccaatgtctaccccacaagagaattcttggctagggggaggcatgataaatacagcaaatcatgcaggcactgtgatgcggacactgaaagctgcgcccacatcatcggcaactgcccagtaacgcaggacgcccggatcaagaggcacaatcacatctgcaaagtgcttcttgaggaggcgaaaaagaaggactgggtagtgttcaaagaaccgcatataagggataccaacaaagaactttttaagcctgacttgatttttgtaaaggatacccgtgcaattgtagtggacgtgacagtccgctatgaatcagccaaaacatcgcttgaagacgctgctgctgagaaagttgacaagtacaaacatctagagactgaggtacggagcctcactaacgctaaggacgtggactttatgggctttccccttggagcgcgggggaaatggtacccaaagaactttgaactgctgacagctcttggcctctccaagtcgaggcaggagaaaattgcaaggactctatccacgacggcgctcctttcgtctgtggatattgtacatatgtttgccagtagggctaggaaattttagtttgtaattaggagtagtttatttatgtttttctctttttttgcaatttctctcttgcttattgttttgtatttttgcatttctctgtattgcttttgtatgtttttaaaaaatttaaaatttttcaataaaaagacagtagctggggcgtagggcagccacaagccaggtaggtagctcatagtaagtagggacaagtatcttttttcataacgcgtcaattaccaaccggactggactaaattacctaatttgtccaaggtggacgggccacctttacttaacccggaaaaggaacatatattatttatatgtgttcgaaaaa

SEQ ID NO: 518 - DNA, 4025 bp, Pseudolycoriella hygida
  source 1..4025: mol_type = genomic DNA
tggaaaggataagcgcaacacatctatacttccaaagaagattgacttagcctctacctttcaagtcctacttccgcgttctcgtcgtgagagttgttaacgttaacacggaccaagttgaagagggcggacgccacattcttagaatgacgcatcacgccctatccctataggggagacactgtgaattcaatgcaaaccagcgagaatggtagcgaaagcgccattcgctgagctgcttgcaataagaattcgaaaaacagtgtggtcaacaaagtcatgataggaagggtctatcatgcaaaagagctgaattgttgtaggtgtaaggtcagctgccatacttaccccactgaaacttatattcggctcgaaagttgcggccagtagattttgacgcggacaccagcatattgagttatgctttgtgtgtacgccgaaagatcgaaaggccaagcccatagctccccgacggttcctactgaggggatagggcattttcattttaattatattatttttttaatatatatgagtcattcaagtggcaatggcaatgataccaagatcgagtgcatgatacggtggagccttttaaggcggagttatctgtaagatccctcctaaagggttacatagggcttttgccgggaggtaagtcttgcagataattatgatgcaaatcccaaaacctatggattttggtactatgtaaccaacgggttctaggcctaaatggcctccaacctgaattatgttgttaacgattcagacaacgaaacctctagtggtgatttggctggtgaaaaccagtttcggatggccactaacaccactggaccacagtctagtgaacaacgaagcgtgaacgaagctgcatctaatgtttgcttggaatgtgggatgaactttccaacgaaacgcggtttgggcgttcaccggcagaggaaacatccggcggcggcaaatgcggaaattaacgttgaaaggaaaaagctccgctggagcgatgaagagatcagagtgatggctggctatgaggctcaggccacaatagccaagaccacttatatgaatcaacacttgcttaccctaatgccaaacagaacccttgatggagtgaaaggagttagaaagagagaagtgtataagcaaatggtgaaggaccgaattgaaatactgagaaggaatgataacgatgtgactgatgatatcctacaacctaataacgatagtctagaacccgaagtggattcatctaatcgtaaccttgacctcgcaataaaacaagcccttgaggcagcaactgctgaggtcggtaagattagatcagaatctgctagggaaatagtagaaatatcgagagcggctctactaaataatgatctggacgaaaacagattaatgagatggttatcaactcggtttaccaacattagacggccaagggggcctagatacagcaaaacaacagagtaccgaggtacagcgaaagagaaaaggaggcagagatatgcagttgtgcagtctttgtataagaaagacatcggggccgctgcccgcgtcgttctaaccaataatgacttgataccgactaagataccgcagattcaacatatgtttgaatactggaaaaatgtcttcgctaccgacaatgaggggcaacgaactagctcgatcgaaaccgctcaggagcaacatatatatcccatatggagcccggtaacgatggatgaaatcaagtcagctagagctgcgaacgacaaaggcgcaggtccagatggaatagtaccgaagtcatggaatagattggatgatagatataaatgtctgttatataatctgtttatgaacttcggtaaggtaccaaggcaaatcaaggaatcacgaacagtattcacacctaagatagacggcggctcatctgatccaggtgagttccgcccattgacaatttgctcagtgatcttaagagagttcaataagatcctagcaagaagagtagtgaagtgtcatgactatgacactaggcaaacagcatacttgccggtggatggagtatgcataaatgttagtctattaacctcgattattgcggaggcaaagcaaatgagaaaggagttgcatattgcaatacttgacctagtcaaggcattcaactctgtgtatcattctgccttgattgatgcgataaaagaggtagggtgtccgaatgggttcgttgattatgtgaaggacatgtatcataatgttgagactgagatgcagtttgaagggtgtagtgagaaagcaaggatcatggcgggggtctaccaaggtgaccccttaagtggtccgcttttcactatagcttacgaaaaagcactaaagtcacttagcgatgacataggatatgaactgaagaatgtaagaataaacgctagtgcgtacgccgacgatgggatgttgttagcaatgtctgtcataggtctacgacacaaccttgcgaaattcaatgatacactggccaaaatagggctaaagataaatcctaggaagtcgaaaacgttatctcttgtgccttcgggcagagacaagaagttgaaggtagtttcagacaggaaattcactattggcgatacagagattgagaccctaagtattaccgatttatggaaatacttaggagtgaatttcaaagtgagtggaccagaggtggtcaaggtagacctgcaggatcacctaaataaattaaccaaggctccattaaaaccacagcagagaatacatctgttgaaaaccgttgtgctagcacaacaccaacaccggctcatattatccagaacaacaggagtcggtttaaggaaaatggacatagtgattcgaagatatgtaaggcaatggctacatttacccaaagatgtgccaatagcctatatacatgctccggttaaacagggtggcctcgggataccttgcttacagctttggatcccactcatgagattcacgcgattgacgaaggcgaagggttctggcggcatgaaaatggaagttgtattaaacagtaatgtttacaaaagtataattcacggggcgaagcaagctctctcagtaatgaactgcggagacaagccaaccctagtggattacaatacttattggaaaaaacaactaaataggatggtggatgggaaggatctaaaaatggcacaaaaccatacatcatcaacagctttcaatggggcacgaaactgtgaagtatctggtgaagactatattcattacaaccagatacggacaaatagcctaccaacgagaaagcgatgtgctcgtggcagaccaggaaggtcaacaacttgcagagcgggatgtctgcaagttgaaacgctacaacacgtgatacaagcttgtatgagaaccaatgcaggaagaatacagcggcatgaccgagtagtagaactgttactaaatgagtttagaaggaaaggttatgtcggtgagaaagaggtccatatggaggcctcagaagaactgctgaaaccagatttggttttagttaaaaatggcattgggtacgtagtggatgctcagatagttcaatgtggcaatcttgagaatgaccatcgtgcaaaggttgccaaataccgagaccaccctgaactcacagaactgattaagaataaatatgaagttcaggaggtggcatatggagcatgcactatctcatacaagggtatctggtgcaaaagcagtgttgattctctgatatcaatgaaagtgagtagctattgcctattccagattgtgacttctgtcttgagaggaacgtggttaaactggcgaagatttaacaaaactacaagcgtggtgcattagatgaagctagcgttcaagcttaacttagggacaggtttgctaggaatttccaatttatgcgcgtaatggcgttaaaaactgattataaaggccaaaattcctataatatatggtgatgttcaagtgatgatgaggcataacctcattctgatgacatcaccggctaa

SEQ ID NO: 519 - DNA, 5126 bp, Andrena bucephala
  source 1..5126: mol_type = genomic DNA
ggcgttagcgcccggctcagggctcaagtggcgcggctacactcccccttaagaggtgcggccctacggcccccttaggcgtgaggcagtgggcccccttgaagctttgagttgcgtggcggggcactccttaaggcagccgaaatactggctgtcccaagaaacctgcggacttgggtgaggtctctagcatgtcctataggcgtggttggccttgagccaagccgcggggtgctagggcgtagttacaagggacgtatgcgaatacatagcctctggcgtccttagtcgtgggaggtacctccaagttgggactacgccgggatacccagacgtgggtatgcagaatccttacacgacgggaggtggcgttcgaaacccgcaaaaaatttgtggatagaacgcgcctcttttgagttcccaacgcgctcgctttgcgaggtagataatagtaagagatacatacgtgtctctccaagaacaatacctggtggtgcatggcaaaacaatcgtagccaatatagtcggcacgaagaaacagctctctgagcaaaaactgtagtaagaggtgcaacagaagtatagaacaacaagacgaagtcttgcataatcaaagacgattgcatgggggccctaacctgcttggcaggagaggcccccaaatttgcgttaatcgatcttgagcaaaccggctataaagccgtctggggcggtattatccaccatggcaaagcaacacgccgccaatactctataatatcggttggcaaagcaatacgcagccagtacttgcaaaacctagcgtggcggcaacgtccggggtggagcaggaaactggcagggcgatagtaaggcaagaggaaggcctcgcagagcatagcgtgttgggtgaatctatgacgaataggcatgcacttggaaatgagaaggaatgaattggactaatgtacccggcaaatacaaaattgttacttaccaatgtataatagtgacgaagatgaagtagcctcggacgctggagcccacggtcccgggtctccagtggcggacttgtccgctagccgtcaggggacctcagacgaaactggcactgtccaaggacaagcgaatgagcaagtagtggtgctgccactgggtagccccatacgatgcgcaggatgcctgagcgatcatcgagactgccaattcttgagcgaaagcgattttgcaaaacatgccagcaaacagcacagtcaaatggcaatcttatggacatgtaaaaaatgccacaaggcatataagaaagtgcatgccttggcatgtcacatccctaaatgcaagggcccggtaatggcccaagaaaaagaatttaagtgcagcgaatgtgcagactcatttaactcgcaaagggggctttccacccatgaacgtcacaggcacccagcagtgagaaattccaaacgcaaaggcactgatggggcagccccagtggtagccaggagaggagccaaggcctccgtctggtcggaggaggaaactctcctgttaagagagctgaatcaacgattccagggcagctctcaaatgaatgcccgaatgagggaattctttcccgataagacgctaaagcaaattagcgacaagcgtcggcaaattaggcctcagccagaggaggtactaataaccgatactgactctgaaccagaatgccaggtggaagtggtggcagacacacctcctcgagccgacgaaatacggcgaacatcagtcgaagacagtgactggcgggaggcacttaagattgcggtggtcacagagcaaactgacgccgccgaatggttatccatccaggatcggctaagggaggtagcgatgagtgagacccttgacgatgctgtaatggatgaaataataaaagacttggtgcatattctggttggtgacaagattgtagagcctgtaaggactaaaaagaagggcaataaagacaacgagggccctacgggagtcagaagagagaaggatagaacaaggaaggccaagtacagatacgcaaaatatcaagaagcgtataacaaatgtccggggaagttggctaaccttgcaatggcagggaaggatttggtagatggtgaagagggcaccgcctacccagaaacggaggagatcagagaactgtacaccagtctctgggggaccgagggaccccagtggaaggaagtgactcgggccaaagaccctgacacggaagttgcaatgggcgatctatggtcgcccataacagctagcgaaataataaagaaaatggcaaaaataaagtcaaacacggcggcaggcaccgatggtgtcaaaaaagctgacctaagaggaaaagggacagtacaaatactgtcccaactttttaacacactcctcctcagggaatccttcccggcacattttagacaaaacagaacaaccttgatccccaagccaggcaaggacacaagagtctctggcaactggagaccgatcacaatcggctctctgcttggaagattgttctcaggcgcaatagatagcaggttgcgccagtcggttaccttatctgaacgacaaaaaggctttaagtacgaaaacggttgccggcacaacatcgcgattctgggctctaccctggcctcgatgaagagcggcagaggtggagtactcacaatcgtggatgtctcgaaagctttcgatacggtaccccacgcagcgcttggcccaacgctagctaagaaggggataccgaggaaggcaagagagtacattggtaaaatgtacgaaaattgcaatacctccataagaacaaaggagggaggggcaatgcaaataaccctcaagcgtggagtgaagcagggagacccgctatccccaatgctttttaatataataatggacccaataattgaggccattaatgacacctcgcagggtgtcgacctggatggcacaaatgtggccgtattggcgtttgcagacgacattgttctcgtcggcaaggaccggaaggaagctagcaaacaactggctttgctagccaattatctgaataacctggggatggagctgtccatccccaagtgcgcagctgtagaggtggtggtgaaggggaaaacatggtacctgcaagaccccggaatgaaactgggctcagaggaaatccccacgatcaaagcggaggagacctctgaatacctgggagcgacgctggacccttggattgggttcagagtcagcaaaagcaagattgaaaaggtagtgaatgcagccaacgcagtaaagaggatggggctcaaaccgcatcagaaaatagagttagtcagaacctatctgataccaaaaatcatatatgcgttggtggtgaacccaccgccaattggtacactgaaagagctggatcacgaaattaagcaagtgattaagagcatcctgaaactccacccgtcaacaacggacgggattatatacgccgataggagccatggaggcattggcctccagagaattgcaaatattgtcaagatggccgtccttaggagtggcataaaaatgcaggcgtccacagacgacgcagtgaaaagcgcactgcaagaccaagtgagcgtgttggacaaatacgctcaatcactgggtataaaatggcctgccaccatgaaccaagtggaggaggcccggaagcgggccaaacggttagaaaccgaaaagtggagacagctaatctcccagggtcaaggagttacagacttttgtcacgataaagtggggaacgcctggctctacaaccctaagctattaaaggcgtccagatacttggacgccctaaagttacgaactaatacgttcggcactaaagttgcattaaggcgagctaataaagacgtcgatgcaacttgcagaagatgcagggcacagatcgagaccctaggacacgtattaggcaactgcctacacaccaagccaatgcgtatcagaagacacgatgaaatcaagaactttatcaaggaccaggtagcgttgcgctgcacggtgtttgatgagcctaccgtgaacgtagtcggagaattaaagaagccggatctggtcattaaagaccaggataggctgataattgtagacgtcacggtaaggtatgaggacaaggacaacctaaggaaggcattcttggacaaaacatctaagtataaagatacgctggagttcataagaattaggactaacagcctccaggcttgtataatgccaatagtggttggcactagaggggctatgcccaccaaaacgcaggaacatctaaaagccctaggaatgaaaaagaaggacatgattaccatctccttaattgccctgcggtcgtcgcttgaaatatcgaatgcgtttctcgactacgaccggataaggtaagaacaagttttctcctttttttttttttttttttttttttttttttacgtatgtgaccaggtgggctgacctaccgggaagccaaatgtgattgtccatatatgtggaccaggccccggagcggaagagcaccatgcgtacgtacatggtgaccgcccgggccggtaaattataatgttaatgtcccacttgacaaacggaggagcggagtagcaccgtgcgtacgtacacggtgaccgcccgagcccgaatgcatatatgttcgaccaggcttggagcggactagcaccatgcgtgggtacatggtgaccgcccgagccagtaaattatgcatgatgttttataacgaagcagctgccgctgatttatgtagagtagcccgcctggcctttacaccagacggtgcgagtcatgaccactattgtgggacatggcgcggagcgggcgactacgagcagtagaagcccgggcgacgccttcgcgtggctttccctgaacacgattatcgtgaccaagttcgcttcccccaagggggactccgttcctagtttttccaggctcgtgtggcagagccctgggtagtgagcgctagaaagtggaatttgttaaagttaaatagaattgttattggcctcaacttgagaccaacttgacgcctcacgaggtggcgattgaaaccctcggaagtatccggccgccctcgggcgcatccggacagattt

SEQ ID NO: 520 - DNA, 4197 bp, Brachypalpus laphriformis
  source 1..4197: mol_type = genomic DNA
gacgtgttttccaagagtccctgaaatcggttttttttgtcgggaaatcgcaagtttcggtgctttgagtataagtattctcaagtataagcaaacgggcttcagtttgacaccaatttcgcttcttcatcggcaatatttaccgaaatatctgcaaaagaaatttgtgaacaatttacctccacaccccatagtgaaaaagaacaaaaaaccacggcagttctttatataattcccaggtgtcgatcagtgcccgggtctatatctatagcgataaatatacctgaagttaccacctatcttttaatatataaaacgcttctgtgctgtgcggggtttcgcggatattttgtgtcaaagaaactagaaattgcagttcactaccacgccccatagagaaagtgaacaaaaagcaggccagacttatatataattcgcacatgtccatcagcgcccgggattatatatatggtgaaaaatattcgtgaaattaccacctttcatttgatatatgaaacacttctgtgctgtgcggggttttgtgaatatttcgtgtcgaaaaactgcaaataattctacaaatttatcggaattctgttccattccacctactggaacagctgatttaaattacacttcagttagataagccaaaaatagtccgaattccatctcggtccgataactttaaatcgagtgcgaatataatcgataacacacgaaagtgtcagataattcgaaaaaaatatttctgatcgtcgcggaactacttttcgggatttttgttaaccgcgtctgaggaattcactcccgtaggtcagcgtggtttaaaactaatatataaactccggccaaagcgaaatttaacgctatggcttcaccacgcagtggaagtgttgtggaaaattcacggtggccctgtgtttgcggcaaagactacgtaacccagaagagtcttctgcagcatcaacgcagatactgccgtggggcactaagtgcatcaataacgaacaattgctccatatgcaacaggacgtttgctacattttcgggtcttcgtcaacaccaaaagagagcgcatgctgaggaatacaatgctagtttaatggcggaggcgtcaaatgccagaagaggttggaccgaggacgaggaggtggagctggccatgagggaggcagatctgaggttgtctgatccaactcaaattatcgacgctcttgccaggtcttcgaccagatccagagatgcgattaaaaaaaggagacaattacagtcatacaaaaggctggtctcccaattcagtgcatcttctacggctcctgagaacgagccgtacagcgacgaagatctggtccggactaattcggacatcatttcgacaatatcatcattcccaactgccaacatggacgcgattgacctggcattgcggaatgcatgcatcagcggcatagatatttgccaggcgacctcagattcctacacaacgctacgaaatctgtatgtaacatcaggacggactacaaactcgtccagttcaagacacagccaactgttgcaagcgctatccagtgcaaccagcaataggaagaaaaagcgcatactatacgccctcgctcaaaatggctttaaacaccggaaagctgactacgccaatcgtcttatcgatgacatctcgtgggaaggcgaaacaatttctccaccggcagcagagatatttgagcactacaaaaacatcttcggacgtccgtcaacatgcagtctacccgccagctcctgcgatcgcttcaatgggacgaccgtcaccggtcccatttcggtagaagaaatcgtgttgacgataaaacaacttaagtcaagtgcatgcggacccgacggaattgggaaaaaggaactgtgcaagatcccgcctataaaacttgccctcctttttaacgctatcttgctcagcgagtccaccccggatgagatgaagaggaacaagaccacccttattcctaaagcaaaagagggacttgggaatgtcaaaaactggaggcccattaccatctcgtcaatccttttaagatgcctcaacaagatcttagcgcacagattatcgcaagtcgagctaatgagctgccagagaggtttcaccaacatcgacggctgcttcgctaacacgtggaccgtccaaaatcttattaagcaccaccgtctgcttggcagcccaatagtcatcttatcgctcgacctcaaaagcgctttcgattcggttccccacgacgccatcacgagggctctcaggagatcaaaggtggatggtaagtttaccaggctcatcgaggagagctacagaagagggagtaccaccatagcctgcaacggcaatccaatcggtgagatcggaataaacaggggcgtcaaacaaggagatcccctctccccggtccttttcaacatcttcctcgatgaacttgtaaccatcatgcatgcagagttctccggcattaacatcggtacggagaaaatctgctgcctcgcgtacgctgacgacctcatactgatcgccaaaacccctgaggatgggaaacgtatgctcgctagggcacatatattcctcaacagtatgagcatggaactcaatgccaacaagtgttctgctctcgttttgcgtaccgtaccgtcaaaaaagaagctcttcgtggacaaggctgaagtttttcccattggcgaacaagtcatctcatcgatgggtactgatcgcaaatttaagtacctgggctcagactttgcatatgctggcatattgtcgtctagtttgtccagcctcttcgaacaactcaagagaataaaacgagcccccctgaaaccttttcaaaagctgctgatcgtgaaggaatttctaatcccgcgttacattgccagcctgcagagccccaacatcacggccggaagactaaaggaagcagataggaaaatacgcgtgtgtttgcgttctatcttgcacttaaatgctcactgccactcgagcatcttctacgcgcccgtaaaagctggtggattgggaattttcaacttcaccgacaacatcccggtcatagtgaaaactcgaatcagcaaactccgtaacgcaagctcattactaaattccaccttcgagctaaattcagggggagtcggggcaattgaccgccttataaaacaggacgccgctaataaagcaaccatcgccctcaagcacgccgccgcactggaaagctcattctccggtaatggactcgcacaagcgcgaaaccaccccgccagtaacaaacatttaatcaatccaccgaaatgctggagcggcgaggactacatcaggagcgtccagttgagatacaacctccttcccagtgccggcatcccttccaatccaccggaagcgcgcaactgcagagccggctgtcagaagaaggaatcactatcgcacatcctacagcagtgccccatcactcactggcaacgtatccagcgccacgatcatgtcctccgccgtctcaccaaaatcgccagcaggaagggctggtctcatgttactgagccccaaatacgtggttctgatggcctcctaaagaaacccgacgtgttgctgagaaagggtagcacactaatcgtttgcgatgtcggtgtacattgggagggccccagcaagctcggcacacagtatgcccacaaggtggccacgtatagcacagcgccctttttggagaggctgcgatccatgttcccggaaactacagtattcgtgctgcctctgattttgggagcaagaggtatttggtgcgaacagaataaattcctggcccatcacctaaggctcggcaattttgatgttcatgacctcataaccacatcagtgaggggaagctgctccatacacagggacttcatgaagtttgtctggagaagacgaactccaataccaccaggcgaacatccacaacacttccaagaagaaatcatatagcatgggttcaacgctgaatctatgctgcgcaaagggtaccacctccatataagtggaaatacagcggaagatccagaatcaacaacttgccttaagcaaaaaaaaaaaaaaaaaacaaacaacaaaaatcatttgtattcatttgtataatgtatataaaaatattgcttaataaactggccgactggctgactggccgcttaatgttc

SEQ ID NO: 521 - DNA, 4112 bp, Acrocera orbiculus
  source 1..4112: mol_type = genomic DNA
cttttgacgtgtacggacgtgtttttaaatagctgcctgtaaatatagtgtcttttgtatgtaactttcacagttcttgtgatacaaacttagaattttgtaaatagactatacagtgtattttgtgcaaacattttaattttctttaaattcgaacggtaaatacgcgagttacggtttttctgcaataactccagttacattaacggtacagacttaaaattcaaaataaagcggtattattatttagttaatatttctggaaagtttggtgcaaatcgcgccagtagtttttgagttagtgcgattttaatattttcttttcaattattaccgctacaagcatataccagccgtgtgctttaaccaacatctgctgcatatcatacagagtgcacgtgataaaattgtacctagcattgcttgataacttgttttgtaggttatctgacctcgaaagtttcctgaacttgtgtatatcgcttgatacatcttccgtgatataaatctaatatcaccacagtaaaatcgcacgacagaaatagcatacgatttatatcatgagagctggtaacacattaattgcaatttaacctactttaacagcctgcgtgatagatataaactcgcgtgatataaatatcatgagagtcactactaattcaactaattgcctgtaactttgaatatattgatacttttaaacacgtgtttcgtatttttgtcttcagtctgggagtttgttaacacctcaagtgttatagtaaagtgcgtagccaacaatctttattttcttacttatagcgagaattcccgctatgagcgcactcgaattaaattcgttcgactgcccttgtggcagatccttcgaatccaataggagcctcgctaaccacagacgtttctgtcgtcttcgaccatcaacttcaacaacatcaacagccaaccctacgacattgcttcccgaagaatgcacatattgttctagccgcttcgggacttatgctggactacgtcaacatataagacgagcgcatcctgtcgaatacaatgatcttcttactagagaggccgagggacgtcaaatccatggatggactgatgacgaggaaaatcgcctcgctctggccgaatccacatatactggccgtaatattaatatttatttacattccatttttccaggacgatccatcgatgcgattaaaaagaggagacaaactccatcatacagggaaaagattaataacctaagacgccccactgaacaaggcaacagtttacctcatatatcaaccgataatatcctacctagcagcagcgaccctcaacaaattgatgatggcaatctctattcgcggttatacctacatattcacggaattgaggacgcgtcaaattgcgaaaacttttacattttaaagaacactgtacttaattgcaacgacgacgtcatacacgaggctattgaccgcttctacgaatacttaatcaaaacatacgcatctaaaaagaaagccgataggagtaaaccacgaacaacaataaccaataaactattaaataaaaacaaccatcgaaacaggagggttcaaagctataaaattgcccaagctagttttgccaccaataggaaacaatacgctaatacattactagacgacatcattattgacaagggtcttcacccaacatctgagcagattcacgcttctttcagtgctatatttggaacagagtcttgcaacgataatgaaccagtgctcaactgcaattccaacatcattacgtctagcataccaataacacctctggaaatttctgacactatccagtcttccaaatctaactccccaggattagatggaatcaatttaaaggacgcaaagagaattcctttgcagttcctcaatttattattcaacagcattctctatacacgttactctccactggcttgtaaaagcagtcggactgtactaatccccaaatccggggacttaagggaaacaaagaactggagacccataacaatcaccggggttcttcagagactactacataaagcgctgtttaaaagactatctgctagcgtaatccttcacgagagccaaagaggttttgcaccaatcgacggctgttttaccaacatcgctatactacattctttgatcaaagataagagaaagaatggcaaacctttatgcatcatttcattagatattgctaaggcttttgacacaatttcccatcacagcatcatccgagcactgaccagattgaacattgaccaaatgaccaaagaatacattaaaaacgcatataccgattgcaacaccaccatcttttgcgacgagaaacaaacccctgaaattcaggttaaaagaggagttaagcaaggagatcccctttctcccatcttgttcaattttgttatcgatgaactcctaactgctctacacgaatttcaaggagtatctttgggacaagcaaaaatctgtgcgcaagccttcgcagacgatcttatactcatcgcggaatcggaagaagacgccaagcatatgctaaattttaccatcaattttttcagcagaagggggcttgaatgcaactccgataaaagctgttctttggttctcaaaacagtacctaggaaaaagaaagtttacgtcgcaaccgaacccagcttccagattaatggcaaagacctacaaagtataacgatcgaaggagtttttaaatacctagggaaaaaatttatgcgcgacggtattattccatgcaacatcgaaaatctccaaaaacaactcaagagcattacgaaggctcccttgaaaccctatcaaaaaatggtcatcgtccgggaacatctaataccaagatatatcgccaacctgcagcagcccaagatctttgctagcacacttaaaaacgccgacaaattattaagaggagctattcgacgcatattgcacctgcctgaacattttacgaagtcatctttttacgcccccattaagagcggcggattgggattatttagcttcaataaccaaatacccgctataatcctgagtcgttggggtaaattggctaatggctcgatacttttaaaggaaatatgcaactcttgcaaaccctggatcgatagcattactaaaatgatcaaacccgagcaaataaacaaggatatttttcacaaatacatgtccgacgagcttcaatcgtcgagatccgggaacggaatcaatcaagtcgggaacaataaagcatgtagtctatacgttaaagacccgcctagatgctggtccggtgaagattttataagggctattcatcttcgcctcaacatgttaccctccaagaaccaaccatggcttcccaggtctgaacggctttgcagagcaggttgcccgcaccgaatcgaatctatttgccacattttacaacactgtaacataggacacagtcttcgaataaagcgacatgatttcgcctgtcatcgtattattcaggcagttaaacagcactacaactatgaatgtatcctcgaacctcgcattagagcgacgagcggattactgtttaaacccgatatttttatttttaaagaagacaaagtcatcatatgcgaagttggtatccactgggaaggccctgaaccccttcaggtgcaattcgatcacaaagtggctaaatattccaatcccgacttcactacaaaaatgatagaaaaatatcccaacaaaattatattgcttctaccagttattattggtgctagaggtggatggtgtatctctaacgacggctttttcaatgaaatttttaaaactaacgaaagaacatctgtgatccgagatattattgaaacaactctgcgaggaggatggtacatccataaagaatttatgaaggttgtttggacgaaaaggagacgaacttattaaattctgaggtgggtagcgttgccgaacacctcaacgcaaacagagctcatggtttcaatgacttattatatttttattaatattaaattataaattttgtttagttaagtctttattgtaaccaacatttttcaataaattattatatgggcgcagccttac

SEQ ID NO: 522 - DNA, 4322 bp, Acrocera orbiculus
  source 1..4322: mol_type = genomic DNA
gtctcatgactctcttagtctttcgtagtgaacggacgtgttttatttggtgctacgtgaaatacaagttttttcttactaagttccacgttttatatcctaggaacttaagactttatatttacattaaataattgttatttaaaataactttttaatttcaacgaaatcgaacggtaatttcgcgagtttccgcgaagtgtcaataactcccgttatattaacggtacaagcttgaaatttcaaagaaagtgggcacagtaattaactaatactatatcaaagtttggtgcaattcgcgccataagaacaaaagttatcgcgagttgaatattattctagcgcaagtcccgctataagcatctattggtcgtgcacaacaaacaacatatgctgcttgttaattgttgatcatcacaagggcacgtgaaaatacttgttttctcattggcatttagtattatagccagcaggctgacctcgaaagttttttgaactctcatctgtaacttctcgcatgacacttgtgtcatcgcttacataaatatcatgatacattatatatcatgacacaaatatcatgagagcaggaaattttttttgatttgaatatatagaggaaaaaaaaaaaaaaaaaaattaaaattaaataaaaactgtttacttcgaaaattatgactacctcagcaggtttttgaacctgcatttatatttgctgaaattaatatcatcaagttgagtcaaggacacgtgacgtgttattgttggaggcctatctaaatccatataattgtaagtactacatccgtctgaatatatatatatatatatatatatgtatttttatatatatgtgtgtatgtgtatatattttgtatgagtgtttcgtgcttgcacttcaccggctagtgagattcttttttataccacaatgccaagacctccggaagatttcatttgcgattgcggcaaaatattttataccaacaagagcttcaggcagcatagaaaaagggtacataacatatcagaacctgacactaatttatgcccaatatgcaagagaagcttcagaaattactcaggtatgcgacggcatttaacattaagccattcatcgtccgacatcgtagaagctgaaacatcatcttcaactctccataggtgcgtttgtgggtccgcttatgactcacttactaaattgaagtctcatcagagacgcttttgcaaaggctcggatatcaataatttaacctgtcaagtttgtaatagacttttcactacctcagctggtctaactttacatcttaaaagtgctcatcccaccgttcataacgaagcattgaaatctactagtacatcagcaagggctccctggtcatgcgatgaggaaaattctctagccaaagaagaagccaggttagatcctaaattacctaataaggtaattatagagtttctgtcttccttttcatcgagatctatagaagccattaggagccgcagaaggctgccctcctatatgaataaagtggaagcttttcgaaactatgcatcacagcaatgttttcaagagcagcgtctctccttgcttcaagacaacgccgaagtttcaaacatcaatctgataaacttcatacaaaatattaaacttccgacacaagccgataaagattttgcggattgcgttgtcaataactttaaggacttcgatcccgtagtactgaccaaatgggttgatacactttacaatgcccgcagaactgcaaacaaagtaatgaacgacaaaaagaaaataaatctattaaaggcaattgaacaatgcccctctaaaaggaaaaaaagaatgcttttatacaaattggcgcaatacgaatacgcttcagatactagaaagtatgcaaacaatttactagatgctaccatcgacccaggtagtgaaatctcacctgataagagtgaaacaaataagatatacgaggaagtcttctctacggaaggaattttggacctcgaatatatcagagatgatgaaaacatcatatctgtaagccagccgattactgaggaagagattttaacagccattaaaacaagcaaatctaatacctcaggacctgatggcattacgaaaaaaattatatttaaaattgggcatgcccgactatctcttctgttcaattccatgattttattaggtttgatcccggataaatttagacagttcaaaactataatgatctcgaagcaaagtaaaggtcttgaaaatcctaataattggcgaccgataacgatagggtcaatggtcatgagaattctacataaaattcttgctgcgagaataagtgattcaataaacttacatcagtctcagagaggattcagcaaactagatggctgccttgctaatattatcaccctagagagcgtaataaaagaaaaaagaagaaagggtcaacctctttttttaattaaccttgacatctccaaggcgttcgataaggtctcacaccatagcatattaagggctttaaaaaagtttaaaatagatgacctcaccaggagatatatcaagaatacctacctggataataaaacgattgtcacgtgcaggaatgaaaatttcggtgaatttcgcattaaaagaggcgttaaacaaggggaccccttgtcacctatattgtttaacatgatacttgacgagctactaaaaaatttaaatgccaattccggtacgaagctcggcgatgaaaatctgagtgctcttgcttacgcagacgatctagtcctcctagcagaaaataagcattctgcacaaaaccttttaaacataacttcaaaatttctcaagtccagaggcctagaaataaattccagtaaaagtggatctctcgctctctgcagtgttccgagcaagaaagccatttacgttgacaatagaatatcttttaaatatgataacgaaactcttcccgctttcaacgtagacaacgaatttaaatatctaggaagaatgttccgatcgacaggcctaaagaaatgcaatctattcaatttactcgaacaacttaaaactataaaaaaacagcctttaaaaccgcaacagaaattcaacatacttaatacgtatcttattccaaggtacattgcggagcttcagacgcccaacatcgacgcatgtaagcttaagcaggctgatcgaaaaatacgacagttcgttcgctcaattttacatattccaagtcattgctctaacaccattttttatgcgccttccgataaaggaggactaggtatctttcacttccaaatggcgataccaatcataatgttgagcagattgaataacctagaagatcattcagatttaatgaagtatactctagagatggctaagcccattatcaatcgtctaaaaaaaatgaatcctgcagctatcaacactaaagatcaattaagaactcatctaagtaatcaactctattcgagcaactctggcaggggtcttcagaattcaacaataactgggttttgtacagattttatcaaaaatccaccccggtactggaaaaattcagattacattaaagccatccatctgacattcaacttgctgccgtgcctagggcttccatacaatccacccgagttccagaagtgtcgctccccaggatgtctgcataaagagaccgtgtgtcatatattacagcactgccctatcacgcatagagcacgtattgagagacacaacaacattgtcagcaaaattgttacaactgcacagaaaaaaaaagatttaacgacgtatattgaaccaactatcagaagccgggatggtgtattaaaaaaaccggacatcattattgagaataaatcctcagtaattgtctgtgatgtcggcataaattgggaaggatcaatatctctcactcaacaatggctgaataaacaggctatttatagctccccattattcattgaaaaaataaaggaaaaatttcctaataaagacatcttcatactccccttcattcttggagcaagaggaacttggtgtgctaccaatcgattcttctgtgaaaaactgcaattaacaaggtctacgaagaaagaaatcatccactcaactttaaggggtgggtggaccgctcacagagaattcatgaaacaagtttggcgtggacgtaatcgtagatgaaatattatgtgaggtactactgcctgggtccatcacagtagaaatgcatccttaattttatattttaattcttgtaaaaatttgtaaacatttttatttttgaaagttaataaaggaaattgta

SEQ ID NO: 523 - DNA, 4019 bp, Brachypalpus laphriformis
  source 1..4019: mol_type = genomic DNA
gtggactctcgatcgagacggacgtgtttcctcgtcgcgcaacaagaaagagtttagtccgggaaaaacgcaagctagaacttaaaggttatatttgtcttaaagcggcgcgtctcttcttcactttaacgcaaagttcgcgaaaatccgcagccggattgccgagatatcgtcggataaaaacgcgaagtggagaattgagatttggtgcaaaacacgtgtccatcagcggatataccatcgcggcgtggagttccatcggcggtaaacagcagaactacgggtttgtgcatgcactacgacaccttccttgtatcacaaccaccggagtgcgcacgtcaaactgtgatttgtgctcctgctggaatcatctagtacaacaacccgcttccagcagcagcgccatcggtggtaacactagaagcacgggtttgtgcatgcactttgggttaccctacatcacaaccaccggaaaagcacctcaaacagtggtttgtgctaatgctgctagaatcatctaatgcgggaaccatcgtggaaaaatagtacaacgaagggcttgtgcatctacttcgggacctacccaacatcacaacccccgaagagaccactttaagctgtgccctgtgcttctgctataaccatctcaggcaggagcccgtattcaagaacaccacctaatcgatcgaccgagagaggagcttcggaagaaaacaaatacgaagtatagacagcgatgccatcatacaatctcagaaacaggcaagccagcagttcggtaatgccagcatcgccagaagtcgggggaaactccccaccccgttacccgcacatctgtaatggatgtggtaattcgtatcgcacagagaaagggaagctgcagcaccaaaggcgttactgtcgaggaccagcgagggatgaaacaaatacctgccccacctgcagccggcaatttaacacatttgctggtctacgacagcatatcaggagagcacacgcaacagtctacaatgcagagatgaaggcagagagcacgtcctctagacgcctctggtccgaggatgagcaaaatcaactggcaaaggcagaggcgcaactcgactcgctcgacccaacagccataattgaccacttggctactctctccaccagaacaagggaggctattaagagaaggcgccagaggccttcctttggggcgagagtacaacaattccgacagaccctggctgccgtgaacgccgcaccgagtgggtcggatgagtcagagtacgaatctgccacggaggatatacacgaagctgcacagtcggaggattcagcgctcatggaccacatcaggagccttgacttgagggagcaagaagacgtcgccctgcagcgcgccgtggtctccactaacgtgtccagcaaggatgctctggacgaatgggcacggaatcttgtggagagatacggccagagcagcaccactacccagcacggcacggcgcgacaacacaacaacgctacatccggtagaaggcggcggatacaggagtaccgccttgcacagatggagtacgtcaagaacccgaggaggctggcggagcggattatttcaggaagaggatggaccgacgaagatcttcgcctccctgcagcagaggacatcggtctccactttcgccagaccctatctgcaccatcgcaggaggacaacgcagcgattatagacggatttcggcaaagaacgtgcatatcaacaccagtgtcgtcagacgaaatctgcttggttctgaagaggatgaagtctgactgccccggcgccgacggcattactctgcgccgactccgtaacatccccgcagcaagactctgtctgctcttcaactctatgttgctgacggaatacacgccggcagttctcaagaaatgcagaaccacactggtccctaaaaccgaacgcccacagggtgcaggtgattggcgcccaataacagtgtcggcaacaatcatgcgcctcttccacaaagtcctcactgggagactggagttggtacgactacaccggaaccaacgggggttcagcaggatagatggctgctttgccaacgccctaacattgcacagcctgatcaagcaccatcgaaggaaagcaacaccactatgcgtcatttcgttggatgtgcgcaaggccttcgacacagtgtcgcacaatagcttggtcagagctttgcaacgtgctaacgtggacaataagttcataaaatacatccgccaaaacctgaaggacgttgaaacggaaatacgaacatctaccggcccggtgacaataccgatgaataggggagtaaagcaaggcgaccctatttcccctattttgttcaacgtcctactagatgagcttatctgttcactcgagggattctccggagtggaaatcagcgactcacggaacctgcgctgcttagcgtacgcggacgacatacttttgtttgcccaatctaaggaggacggcgaaagaatgctgggagccgcgtattctttctttctggaaagagggatggagataaacgccagtaaaagccaaatgattagcctccgaacggtccccagcaaaaagaaactctacgctgacgacaccccagcacgctacggggacctaagcatccaagccctgggaattgaggaacaattcaggtacctaggcgacatcttctcgcccttcggagagaccccctgcagatctgatactctgctgaccgacctgcagaggataaggcgtgcgcctcttaagccacagcagaagctacggatcctgaagcagttcctcctgcctagatacatcccctactttcaacgccccacagtaacccgcaaggccctaaaggatgctgacaagaaaattagggcctgcgtgaaaacgatgctccacctaacgcaacactgccacaactccgtgttgtatgcggcaacgaaacacggcggcctgggcgtgttccaatttaccagccgcatcccagccatcatctccgaaaggattgagaagctgaaatgggcagacgacctcttcgaggacgtatcgcgaatcggccagccttggattggccgaattaatgggatggttcttgttaaccaggcaacaagaacccagcaccagcagttccatgcccaggccctggaagcttccttttctggaaatggcacctgtcaagtggccagccatagagcgtgctataagttcgtcgaccatccacctgcattctggaacggccaggattatattaaaagcatacatctacgcttcaacctactaccaaccgtaggagtcccatctaacccgccggaagcaagaaggtgccgagcccactgtgggaaagtggaaagcctaagccacgtcctccaaggctgtccactctcgcattgggagaggattaacaggcataatttcgtccagaaacgccttgcctccgctgcgcgtcacaaagggtgggacgcagtactggagccccgtttgcgaggacaggacgggttgttgaagaagccggacttattattgaataaagcgaacaccgtcatcgtttgtgatgttggggtacattgggaggggcccgaaggccttaccacccaataccaacaaaaagttgcctcctacagtacgcccgctttcatccaagagctgcagaggagataccccgacaaggaaatatatatacttcctcttatcttgggagcccgtggcatatggtgccacctcaataagttcattgtggcacacctccagcttgctgcaaaagacatcgaggacctcatactaacaacaatgaggggaagtgttttaatccaccaacgatttatgcggacgatatgggcctaacggaaaccacatataggtacggctgccaacattcagccgaaaacagcaacagaagccagcacttttattaaataccttgtcatttatattgtactcactaaactgtatatattcaataaggttcaataaaaatgcactcagcgattgttgctgcagtgaa

SEQ ID NO: 524 - DNA, 4039 bp, Andrena bucephala
  source 1..4039: mol_type = genomic DNA
agggatgcggaatcgcgtccctgccaaatgggggtgtggggtcagggggcagaggtttacgtccatcttacctctgtctcgtctggaaacccacctcaaggccaacctccacgtccagcccttaggcaaggctacgtggcgccggataagggaccattatatatgcccggtcctagatgacggaggtggccgaactgggcgcaagcccacgacattatgtcagaggctccacgggtcagcaccccttggaagtctcggagctctgctccactcttattgctacgaagaacttaaagaagcctcggaaccccgattgtccttctgttgacgactcggcgatgtctcctggatattccgtcggtttatactcggatttagatgtagatatagatgtagattatttgttgtgtccgtcttgtcatatagatttgtcctcgaggatcctaacacaaaggaagcagcacgtccggcgttgtaaccagccgcctccgaatagcgacggagcatactcttgcgagcaatgcccctcaatttataaaacttatgctggtcttcgacagcacataaaacgctcacatccggtggagttcaacgctggcgatgctgcacttactgaaagaagggctccagccaccagagccaaatggtctacggcggaagaaaaacaactttctcgtctggaggttcaactccctattggtttgccgcagaaagaaataaatagtcgcctagctagcctgcattctggtcgttccgccgaagggattaagaagcagcgccaaaaattgtcatacaaaaccatctatcgggcaatagtagctgaaactatgccagctaatccagtagcttcagtttctcttttttcgtcttctacttcagaagcaatggtacctgaaactatttcaggaataccattctctcaggtttcttctcctcctttggcctcaacctccatgtataataacctaggtttgcgttctccaaggctttgccttgaacgtattgattcaatagccccctggaattgcttgttcactcagccttcgagttctatgcctagcagtggtactgctcctcctgacgtcggaaccagtgaatgtgccctcatacagaatttagagatctgcacatatcttagagaactaattctatcttgttccgacagtgttcagactctcatctacggtctatttaacaataatagttttgaagaaattgatgccgcaatattttcaatagtttatagcctagccgtgtcccgccagatatctggacctacagaacgtaaccgtaataataacaaaaataggaagaattttaaactcaataacaatagaaataaaaagcgcaagcagaatagagcagcggttagatcagccacctttagtagctaccaacgtctatatacttataaccctacacaactggcgcatgcgattttagacgagagggaattaaattccacccaattccccaaaatggaggagatcgagaaggaataccactctatatttgaggattgtccggtgtattctggtccagcccctcggtcttctgacgtgcatatagatctagattatccgatatcctttagagaaaccgaaattgcacttcgccgtctgaagcaatctgcttgcggcccagatggtattaagagggaagatctaaggaaggctaatatggctgacctcgtagggttactgaatatagtgtttggcttatgtcgtactccaactatttttaaacgtaatagaaccgttttaattccaaaaaggggtgacctttccaaggtctccaattggcgtccgattactatttcctcgcttttcacccgccttttacataaaattttggcttctcgactctccgaaaatattaaactccatcatgcgcagagagggtttacgccgggcgatggtgtgatgaccagcttcactattttcgacacaattgtgcgtgaacatcgtaataatggcaaacctcttttcgtactctcaatagatttatctaaagcattcgacaaaatacatccttccgcgatagaaaatgctctgatatcaaagggtgttgataatcataccgtcaaatatataatgtcaacctatagcgacgtggataccatcattgaatgccacgggcaaagaagtgtaccaataagcatgcgtcgtggtgtgcgtcagggcgatacggacagtccgatactttttaacatcgcgatggatgactttgtttcttccatcgaccccgccgatggcgttagtttaggccaggcgatgatcggatgcctgttattcgccgacgatattgtgctccttagtaacaccacacatggaatgggagaacatctgcacaggttacacgcctttttggctaacactcacatggaggttaactcctctaaatgtcaagccttacaactcatgcgcgtcccaagcaccaaacgtgtcgcggttgacacggtttctcgttttaagatcagtggtaaagcgatcccaacactgaaggtgcaggaacaactaaagtacctgggtcataattataatcagcatggtatgatcgccccttctgcttccaatctaaaggcaatgttggagcgtttacgtcgcgctgccctacgtccatggcaaaaattgcagatattaaaccgatatcttatccccaggctgctacactgcaaccagtcgtccgatgttacagtgggtaaactagttcacattgaccgtctaattagacagtttgtgaaggctactttacatcttccggtcacaacgcccactgctttcttttatgccaaaatacgcgatggaggattatctatcccgtgtcttcggcaccaaattgggacaatataccgtcgacggttgcagcgtattagtactcaaggggacctcgatttcgatgcggcttttcaaactccatcatttaagcgcctgttgcagaagttggatggaatatgccagaaaattccatctacgcgttcggccgttgcccgtcactgggcgacaagtttgcatcagtccgcccttggtaatggtctgcaatatggttcgcgagcagccaatagttggattttagaccctcctccgttttggaccggccgggattacatacgggccatccaattacgcatcggccttctacccacgggtggagctccatacgtaaatgcagaagctgcacaatgcagaaatccaacttgcacgggtaggagagaaactctgtcccatattctacagtggtgtccggtgacacactatcaacgtatccagcgtcacgacaaggtcacccaagatctagtatctaatcttaggaaattaggatatagtattcaggaggctcctagagttcatactagggataatagatatattccggacctcctcgtgatcgacacaaatagtcacatcggtaatattattgaaactactgtggtgtgggaatatagaagtagcctactggaagcagctaggataaaacgcgataaatacagtcttcctgaaatattggataatgtccaaataaagtatcaccttttagaaaggcctcgggtacttccattcgttgttggtgctagaggagggtggcctccctccaacgatgttatctggcgaacttacaagcttcccagtttcctccaaagaaccattgtttgtaatgtcctgcgttacgggtcctcaatccatagatatttcatggcacatgtatggcgttcgaggaaaaagaggggaaaccctctaggtttgagtgtggtgcgagtttgagtgcaagtgtgcgtgagtcagtgtgcgaatgtgccatgtatctttgtattattttgttcgtcttgtttgtatgttaatcgcgttttcacattaattttccatcgtattctttctctttattagcttattcatatatatagattctatagtattgaaatccagatttagttatatctgcaatataaatcctttaatagcctaccagttgggccttctagtaaaatagtcgattaatacactggacaaatgttgtattttccaaaatataatatgtttca

SEQ ID NO: 525 - DNA, 3844 bp, Acrocera orbiculus
  source 1..3844: mol_type = genomic DNA
gttattagagggtcaatgtaccatatcgtcctggcaagtacaaaagggatatcccggaaagccagggtgttagacttacttataattattgaaagtaatcctgttgtgaaagggaagccaacatacttggtttatccagtatggaggcctactgtatcaggcggatgaaatcaaggcaattatacggcaatcacatcctaccaaccagacatatcagtcagggcggtcaggttaatgattagctgaaacgcattaggtattataccttttgccataacaaataattaagtaaactttacctaacttctttgaagttttgtaaattaaatattaaatacttaaaaactaaacaacttataagtccttgaaatgtaagtcaaacatagatatttcttaaacttagtacttataaatgcttcggtgtttataggggacagattaaggataagtacaaccaaataacatagagatcatggaagtaccgagtcttcaacctcctcgtggttcctgctggtaacttgtgtatttattttaaaatacataaggctaatgaagacagggcttaggtttctagggttaccagcccttttaacctataaatgattggtcaagacactgaaaatagcctcggatataatgatggacccactggttcctcaaatccagtaacaagttcagctgcaaattcagcaagtggtattgacaccttcgtgtgtgaatatcctggttgtaaccgctcctttaccacaagtaatggcagaggtgtgcatcaccgaagagctcacgctctctggtatgatgctcgtacgctaaacaatgtaaacaatgcaaaaagacgttggactgaggaagaaagcaacattttggctaggaaagaggctgaattgacaatgaatgggtgtcgttttattaacatggctctcgagggaatctgtgtaaatagaactattgaatctattaagggccacagaagggggactgcttataagaacttggttcagttctatttagacaccctcagaaacgcacccattatagttgaagaacctgaatctaatgaccctgttaatgacacaatccttgaatttttgaaagatctgccacgattgacatcaactgattctgtcagtctgatgcttaatcggttggttgaaaatgtccacacattttccaaagaggacattagaaatcaggtttcagttttaataaatgatttgttccctgaagtccccagggtaaacaatcagcaatttcctagaccgaattgccaaaaaagccttagtgccagagatagaagacgtagggaatataggttgactcaagccaaatgggacagaaatcgcactagttgcattaagtcactatttaatgataacagcccaaacagctcattcccacccaaggaggtcttagtaccatattgggagagggtaatgacaagaaatgtgacttgttttccgcaaaatttggtgagaggaaatcttattccgaatctttggtctcctatcactgttcaggaaatagagacctgcttccctagggggaggtcttcaccaggccctgataatgtttcggttaagcaactcaagagtatatccaaggatatacttttgcggatattcaacgtcctgttgctttgcgatagactgcccgagacattgttagagtcgaagactattttgatcccgaaggttgcaaacgcttctcaaccagacgagttcaggccaatcaccatatcctccaccatcgtgaggtgccttcataaagttcttgctggtcgtatcatccaggaggttcctccagatgatcgtcagcgggcttttaggcaggttgatggttgtgctgaaaatatacatttactcgatttggtcctgcatcagtgtaaaaagaaatactcttctgtttatctggcctcccttgacatttccaaggcttttgatagtgtatctcatgactgtattgaagaggtcttaaaagctaaaggtattcctcaagaaatggtcgcatatattatgtctggttataaatatagcaaaacaaggattaccacaaaaagctggatttcgcactctattgcgcctagagtcggagtcaaacaaggagaccctttgtcacctctcatcttcaatatggtcatagatgctcttctaagtacacttcccaaccaggttggtgtacaaattggaaatgcgaagatgaacgctatggcttttgcggatgatataattcttatggctagtacagtggaaggcctccagatgttattggacactacgtctaattttctggaccagtgcggactgaaggtgaatgttgctaaaagcgtgacaatttcggtcaggggtttaccccatgacaagaaatctgtccctgatgcgaatcagacatttatgtttgatggtagaaggttagcggcactatctcgcatacagcagtggagataccttggtatttctttttcacctgagggaagcctggtggccgcaccactaaatgaatatctggctcaactagccattctaaccaaagcaccactcaagccccaacaacggctttttgctttaagaacagtagtacttccacactactatcacaaactttctttagctcgatgccatctgagcactttaaaggagtttgataagaaaaccagaaattttgtacgaaaatgtcttaacctgccaaatgacacaccaacggcttacttccatgcaagcgtccacgacggcggcctttccataccgtcagtgagatggctgatgcctctttttaggagcaaaagactcaggaacttatcactccttcctgaaggaaatgatattttcttgagagaacagcttgctgcctgtatgagaaggctgagtgatggcaacactgtcctcgacacgaaaaaagcaattatgcaaagatgggcgaatctgttgtattcatcagttgatggtgcagcatttgaaggttcgacccgtaacccacaacaacatcagtgggttactgatggtactcgactcctatccggaaaagattacctgaatctttgcaaattgcgaataaatgctttacccacaagatcacgatgtgcacgtggtagaacgacagatcgtagctgtcgaggtgggtgcggtgttgccgaaactcaaaatcatatccaacaaaattgtcacaggacccatgcttcaagaattaaaaggcacaatgctatagtgacttacgccactaagcaattacgaaagcgaggctattatgtggttgaagagcctaggctcaaaacaaatgatggtattcgcaagccagacatcgtcgcatggaacgatgatgaagcattggtccttgacgcccaagtcgttggcgagcaaatcgatagtgatagagcgcatgatgctaaatgtacctactacggtaggtacaaagaatatatagcaaaatggaccaacatcaacaaccatgtttattttagctctatcactttaaactggcgcggtatttggtccgccaaatcagctaatgacctgatagcgaggaagatattatcgccaggcgacctgaagattttatctacaagggcgcttatcggcggattgaacagctatcatatcttccaagctactacatcggtcacgagattccatcctcgagctggtgtaggctgaagatgtagctggtcatctataacaagggggtgctgccgccccggtaaaagtggcataaagagagtgaagtttttagttggtgagagtccaacagtatcattgttcgttgtctacgttgtgaacaatggtctgcataatgcattttcttcacttggattaaaaaaaaaaaaaaaaaaaaaaaaaaaaaaaaaaaaaaa

SEQ ID NO: 526 - DNA, 3968 bp, Acrocera orbiculus
  source 1..3968: mol_type = genomic DNA
gtcgttagatggtcaatgtaccatatcgtcctggttagtaccaatagggaaagccagggtgttagacttactaaaaattaaataaaagtaatccgttgtgaaagggaagccaacatacttggtttatccagtatggaggcctactgtatcaggcggatgaaatcaaggcgattatatggcaatcacaccctaccaaccaggcgtattagtcagggcggtcagggtaatgattagccgaaacgcattaggtattataccttttgccctaacaaataattaagtaaactttacctaacttctttgaagttttgtaaattaaatattaaatacttaaaaactaaacaacttataagtccttgaaatgtaagtcaaacatagatatttcttaaacttagtacttataaatgcttcggtgtttataggggacagattaaggataagtacaaccaaatgactaagaagacatagaagtgccaagtctccacctcctagtggttcctgctggaaacttttttcttaccaaggtattaaaaaaggcaaacggagcgggcttagcggtctagggggttaccagccctctagactttaaactaattggtatgaatgtcactgaactgagcctcggatacctagatagtgctgagtccactgacttagtattaccaacgagtggaggcggacaggtcattcaattccattgtgaatttcctggctgtggcaggatcttcaaaaatattagaggtagaggtgtgcattacaccagagcgcacaaaaaatggcgcgatgaaaacatagagcggttagatactgaaaagaaacaatcaagaaacgatgcaaataaaaaatccaaagatagatggactcttgaagaaaaaagaatgttggcacgcaaagaggctaacattattcttaaaaataggaatgataacacaaagacttttatgaacatggctctgagcaaacttatacaaactcgtaccttagaaagtataaaaggtatacgaagacgtgtaagtcataaatttcgcgtcgaagacgcattgggagaaggcagctcttccataggtggtgaaggtgaaagtgaaagtggattgcaatcattgcccgaagcccccgggtttgaacgaaatctaagagatttcattaataatcttgatcccctcgctggcgagggtttcaattatgatgccttacagttgatctgtatggacatcagtattttaactattgacgctttaaaagaaatgattgcagtctacctaatggaaaccttccctccaaaattaaataaacgcaaaatagtgcaatcaaataatacaaggctcgaacaaaaacaaaatctttccaacaaaagaaaacggcgaatagtatatgccaaaacacaaaacttatggacaaaggatagaagtcgatgttggaaagctataatggctggacatctcgaagcagactatccgcaaattgaaaaggaaagaatggtaccatattggaccaaagttatgactagagatacaaaacgttctccagatttgccagaagccgatgctcatgaagttggattgtgggatcctataaattttgaagagctcaaagactcctacccacccacaaattcagctactggacctgatgggatgaatgtgaggctattgaaatcaatacccacagaaatcttaatcagaatttttaacatttttatgatttgtggaggagtgcccaactatcttttaaaatcaagaactgttttcattccaaaaagccggacggcaaaagatccaaatgagttccgtcctataaccatctcttctgttttggtaaggatgtttcataagatcctagccaaaaggctgaataatatcaagctcgatgacaggcaaagagcctttcgtaaaactgatggttgtagtgacaacatctttttacttgatctggtgctcaggcatcacaggaaagtgaaaaaggatgtatttattgcatctacggacattgcgaaagcttttgattcagtcacttttgaagcattggaaaaagtaatgaaaaataaaggtctaccaactccaatggtggaatatattatatcaatgtacaaaaatagtacaacaatattgcaatacaataattgggaatctgaccctattaaccccacttgtggggttaaacagggggacccaatgtcaccaataattttcaatatggtgattgatactatgataaagaatacatcaaatgatattggagtgaatattgggtctatgcacgtcaatttaatggcgtttgcagatgaccttatattggtagcagccactgagaccgggctacaggaattattggataataccatgaaattcttacattcaacaggtcttgagaccaatgcttcgaagtgctgttcaattgctgtaaagtccctaggcaaggaaaaattaacctatgttagtgcaaaaactacctttaaaataggtggcaaagatatcccaaatcttaagagtgctgagcagatgaaatatttaggtgttccatttacacccgaaggtagaattactaccaatataagagagctgcttaaaaacaagcttgaaatactaaacaaagctgcactaaaaccgcagcaaagattgtggatcttgacggtagcagtaataccatcactgttctaccacttgaccacaggtgcgataaaaataggcttgctaaaaacactagactctgatattcggaaatatatacgcaaatggctggatctacccaaagactgccctttgggttacttctatgccactgtgaaagatggaggattgggattggcatctctaagatggttaatcccgctccatagaaaagaaaggctaatcaagatatcaagatcttcctatataataggaactaaaactaacgaatatctagcaagcgaaattgaagcatgcaccaaaagacttgtctataatgatagctcgggtacaagtaaatctctgcaaagcctctcacagataaaggataaatgggccaaagcactccatagttcagttgatggtggagcgttaaaagactctgcaaaagtgaaaaatcaaaatgcttgggtgaaggaaggcacccgttttctcacgggaaacgatttcattaagtcagtaaaattaagaatcaatgcaatgcctactctatctaggaccaaaaggggccgatgtcaaagtagagcatgccgggcgggatgtggtgtgagtgaaacattcaaccacatctcccaagaatgccatagagccagtggcatgcgaataaaacggcataataacatagtaaaatatgttgctaaaattatgtcaaaacatgaatacaatatctgtctagagccaaggcttgatactattgaaggcttgaaaaagcctgatttagttgcctacaataacaaggaatgtttcattctagatgctcagatagtaggtgagcaagttaaccttgattatgcatatgatctcaaatcaaggaagtattctgacaaaagcacaactgatatcgtaaagcagaagtttaaattaccttccgatatgcctataacatcaatgggtataactatcaactgtcgaggaatatggagcagaagatctgccgaacaccttttgaatagtagaattctacaaaaagataatatcaaagtactatcaagccgtgcaataattggtggaatagctatattcaaccaattttcaaacgccactactataaaaagaactggagttggatgatggtcaacgctggccacattattaagggactccagccctacaacatcttaagtccgcactggataataaagcggccgcctagttccgaactgccatgaggccagggctaggtgagagttgggtttaggtttagtgggtgcaagccccacacttacctcagatgaggtgtgcgttaggcattccccccaactataaaaaaaaaaaaaaaaaaaaaaaaaaaaaaaaaaaaaa

SEQ ID NO: 527 - DNA, 3987 bp, Acrocera orbiculus
  source 1..3987: mol_type = genomic DNA
gtcgttagatggtcaatgtaccatatcgtcctggttagtaccaatagggaaagccagggtgttagacttactaaaaattaaataaaagtaatccgttgtgaaagggaagccaacatacttggtttatccagtatggaggcctactgtatcaggcggatgaaaatcaaggcaactaaatggcaatcacaccctaccaaccaggcgtattagtcagggcggtcagggtaaagattagctacaacgcattaggtattttataccttttgcccaaacaaataattaagtaaactttacctaacttctttgaagttttgtaaattaaatattaaatacttaaaaactaaacaacttataagtccttgaaatgtaagtcaaacatagatatttcttaaacttagtacttataaatgcttcggtgtttataggggacagattaaggataagtacaaccaaatgactaagaagacatagaagtgccaagtctccacctcctagtggttcctgctggaaacttttttcttaccaaggtattaaaaaaggcaaacggagcgggctataatagtcttgggggttaccagccctctcgaccgtataaatgtttggtacaactgagcatagcaaccgcctcggattcgttcatgcgtctacttctggccatgaaccaccgaataatacagttggacaaagtccggaaacattcctttgtgaatttcccggctgtggtagatcatttaccacattaagaggaagaggtgtgcactatgtgcgtgcacataagaactggcgagatgaaaatctcgaacagtctgaaatacaaaaacggttagatactaataaaatatccaaagatagatggtcgatggaagaaaagaaaatattagctcgtaaagaagctgatattgaaataaaggcaaggaatgacggaaaaagagtttttataaatcaagctctttgcaaggtctttggcaatagaacgatagaaagtattaaaggcattaggaaaagactaagtcataaattccgagtaaatgacgctcttatggaagaaagtggcgactcttccagtgaaggtgaaacatactatgatgcgatccctgaagaatcagaggatcaaaaactaaaagattttgtacatacattgtcccaagacgcatacaaatgtaaggactttaactttgacacactacatcaaatttgtagtaaaattaaagaatatagtactgaaacaatcagtacaaaactagctacatatcttttagaaaccttcacttccaagacgtcaaaaacgaggaaaatgaaaaatatgaatggacacaccagttggacaaacatatcaaatagacgaaggcgtaaagtcatttacgccatcacacaaaaactatggtctaaagataggactcgctgttggaaagccattgaggcagaacaaattggcactgaagtcccccaactggaaaaaaataaaatggtgtcttactggaccaacctaatgacccgaaatacaaatcgctcatctcaaccaatgcaaataaatacacacacaacaaatagttctaatgaactttttcaaaatatgtggaaaccaatcacagtcgatgagcttaaagaggcatacccaccaaagaacactgctagagggcctgatgggatgagcgctaggatattaagatccattcctgagcaaatccttatcagactctttaacatctttatgatatgtggggaagtgccaaaacacttgctaaaatctaggaccgtcttaattccaaaaaccaccaaagcgaatgatccaagtgaattcagaccaattacaatatcatcagtaatggttagaatgtttcacaaaattttggcaaggagattgaaaattattgaacttgatgagagacaacgggctttcagagacacggatggatgtagtgataatatattccttttggatctggtgctgagacatcagcatcggatgaagagagaagtatacattgcatccactgatgtcgctaaagcattcgattctgtgtcctttgaggcattagaagttgtaatgaggaataaaggtttgcctaacccaatgattaattacataatgaaaatgtataaaaatagtaccactcagattgagcatgacgactgggtatcggaccctattaatcccacttgtggagttaaacagggcgatcccatgtctccaacacttttcaatttaataattgatggaatgctccaaaaagtaacaaaagacattggtgttagcattggaacaaaacatataaatgtaatggccttcgctgacgacctaatattggttgcatcaacggaaaaaggcttgcaaaccttgatcgactcaacaacgtcatatctacaaaaaactggactaaacgttaatgcctccaaatgctgttcaatagcaattaaatccctggccaaacagaaaaaaacattcgttagcaacagaacaatattcaaaatacaaggcagaaatataccagccttgagccgagctgaccagatgaaatacctaggcatcccattttccccggaaggtaggatgacgggtaatctgagagaaatgctcgtaacgaaattaacaaaaatagataaggcagctttgaaaccacaacaaagaatgtggataatgacggtgtcagtgatacccacactgatgtaccgtcttaactcaggtgcaattaaaataggtctactaaaaacactagataaagatgtacgaagatacgtcagaaaatggcttgatctgcccaaggactgcccgactgcatatttttatgcacgggtagcagatggtggactcggagtaccatcacttagatggtgggctcctatacaaagaagagataaattaaagattttatcagagtccacctacactggtgattcaacctcaaatgaatacataaacaaagaaattgagggttgtaacagaagacttacatattatgatcatattacttgcactcaaaaactcattaggaatactaatgacttaaaccaaaagtatgcaaagctgttatatagttctgttgacggtggagccttaaaagactcttcaaaaaccaaagggcaacatgtatgggtaaatgatggcacccggttcctaagaggcaacgattttgtgaaatcaatcaaacttcgtataaatgctctgccaacactttcaagaaccaaaagagggatagctcagaacagagcatgcagagctggttgtggagtgagtgaaacatacaaccacatatcccaagaatgccatagaacacatggtattcgaatcaaaaggcatgaaagtgttgtaaactatgtaacaagaagtttgaaaaacaaagaatttaaagttactctagaaccaaaacttaaaacaacagacggacttaaaaagcccgatattatagctatcaagggaaatgattgtctgattcttgacgcccagatagtaggcgagcagacaaaacttgatgaagcttacgcccttaaatctaataaatatgcaactgaggctgtacggaaatcaattattgaaaatttcaatttggaaggaaaaaccaatataaaatcgattggcataaccctcaattgtagaggtgtttggagtgcagcctcagctaaccaacttgcaattgaaagagtcatttccagaaaagacattaaagtaatatctagtcgtgtaataataggaggaacaacactcttccgaatatttaacaaatcaaccatgatgaagccgaaaacaggaataggatagcgtctgactgtacgtattctagacaggagactccagctcctagcatctaagtccgcactggataaagaagcggccgcttagttcgaactgccatgagggccagaactaagagagagttgggtttaggtttagtgggtgcaagccccacacttacctcggacgaggtgtgcgttcaggcattccccccaactataaaaaaaaaaaaaaaaaaaaaaaaaaaaaaaaaaaaa

SEQ ID NO: 528 - DNA, 3992 bp, Meliscaeva auricollis
  source 1..3992: mol_type = genomic DNA
tgttttggtgtgcggacgtgtatcaaatcgctccgtcaaaaagtgaaattaataatagttacagctcgtattcaaaaagtaaaaactcggaaaagtttaaataaggtcactcccgtcattttaaaacaaaaatcaagcaataagaccaccgcgtttgctcacaatttgtgtttaaattttttgaattgcatttgtggaaaaaaaaaataaattgattcgggagagaatttcggaaaaaaaatataaagagacgatatcgtccacatagcacccacagaaaatcccattgaaaacgacatcacgccatctggtaagaaatagccggaaactccaacttccccggtttgtgtatctgatacataactttaccaatcaacatctggttgtaattttcgctaaatatttgcgccatctagcaataagagctcacaccttcaaaataacacctagtgaagacaccttccactattttaataattccgaagaacagaaccgagcataatcaccagcttttgacacaaaggggaatttcaccataaatatttcctggctaaatattcacatttaatatacatcaattgatgaagagagttttgctaggattttatattctagtttgtattgtggtttaatatccaaaaactataccggtcttgtgaaatttccacaatggccacgccacaaagtataaatgatgctggtatcaatagtcactggccatgcagctactgcggtaaggtatttaccaccaatgccaaggttaaacagcatgaaagaagggtatgctccatcaaagcaacaatgcctgaaaaccccaacaaccaatgtcttgtgtgcaatacatcatacactacatatgctggccttcgtatccatcaatcgaaggcccatgcagaagaatataacgcagaaatggaggctcaatcatcaaatgctagaaaactctggactttagatgaagaaaaagagctagcgaagatggaatccaacatgataggtctcaatccaactgagataatcaatgaactagctaagaattctaaaagaacgagagatgctataaaaaaaaggagacaactggcgtcctaccaagcgctggtctcctcttacttagcaattcctacggagccaataacaccaccgcctccgtatggtacaagcgacacatcaacactaaaccttgatataatgtcgtacttaaatagtttacccattaacaccatggacgtagatgaccacgagacctacaactgtctcgtaactggttcaggcatgttagattccataaaccgactccatcagaacatcatcaccaaatatggaaaagaacgaacaagccgtcacagctcctattctggtttgataaatgccctaaacaacgccacaagcaatcgcaaaaagaaatcactcttgtatactctggcccaaaaggagtacaaatcaaataaatcggcatatgctgagcgcctactcgacaacaaaccttggtgctcgcaaaatacatcaccacctgccacagaacttatcaatcaatttcgttccaccttcgggttatatgcgaattgtggtttgccgaagtgtgcttctactaattacgtgcccatcaccatcgcacgtccaattacaactgaagagattaccgatactatcaaagccttaaaatcgaaagcttctggacctgatggtattggaaaagcagagttttgcaaaattccagcaataaaactaaccatcctctttaatgcgtttcttctggccgaggatattcctgaagaattaaaatcaaatataacaacccttatacctaaaacgtcaaacaacctcgaaaatccaaagaactggagacccatcaccatctcctcaatcatcctaagatgcttcaacaagatcatggcatcaagactaagtaaaattaatcttatggattgtcaaaggggtttcacgaaaatagatggctgcttcgcaaacacttggtctatagaaacccttattaaacaccatagggccaaaggaatccccttgacaataatctctttggatttgactgctgctttcgactctgttccccatgacgccacagcccgcgcacttcgtagagtgaacgtggacgaaaaatacatcaaccttgtaaacgcttgtaatgcaggcagcagcaccaacatctcctgcaacggaacggaagtcggaacagtacctatgctgaggggcgtcaggcaaggcgaccctgcatcacccgtccactttaacatcttcatggacgaactcatctgtcttctgaataaggaattttctggaatcaagattgatggggagaaactatgctgccttgcctatgccgatgacttcatattgacggccaaaacaccagaggacgctcaacggatgcttaccaaaactacatcctttttaacaagcatgtgcatgagcatcaatgcaaagaaatgctcagccatagttctcaaaaccgtcccatctatgaaaaaggtttatatcgacacctcaactgtcttctctgtcggaaacgaggtaattccattaataaataccaataacaacttaaggtacctagggcgatactttcactatcgcgggttgacccctagtaacaatggcgaactatacgaacaactgaatagagttagaagggcacctttaaaaccagcccaaaaattatctatcattaaagaatatctaatacctcgatacatagaccactttcagcagccaaatatcaccaaaaaaacactgacagaggctgacaggaaaataagggtaacactcaggaagatattacatcttaatcctcactcgcacagcagcatgttctatgctccgatcaaagacggcggcctgggcatattctgtctagcggacagtataccaccaatcatcataaaaagaattgacagattatgtgcagccaataatttactgaatgcgacgttccatctatcacaagccagaattacttccatcaaaaccatgatcaagccaggatctgaaggaaaaatagaaatccaagccaaacacaccagacttctgcaagaatccttctccggcaacggtctttggcaggctaagcattcaacgtctagttccgcctatataacaaatccgccaaaatgttggtcaggcgaggactatgtacgtgccatcttattgagatacaatctactgccctgtgctggcatcccgtcaaacccacccgatgcccgcttctgcagagctggatgtccacgacgtgagacagtgagccacattcttcaaaaatgcccaattacgcattccaccagaatcgctcgccataactacgtcattaaacgaatcaccaccttcgtcgctcgccgtggatggacatatatgctcgaacccaatatccgctgtagtgacggcattttaaagaaacccgacttaatactgatgaaaaacaacaccctcatcatctcagatatcggtgtaaactgggaaggcccactaacactcgacttccagtggaataacaaagttgccatctacagcactcctgctttcatcgaaaccatccagcagcgattcccaaactataatatccacatactgcctttaattgtaggcgcacgaggcatctggtgtaagcaaaacaattttctaaaacatcacctccgtctaccaaaaataaccacaaatgacatcataacaacaactatccgtggtagctgtatctgtcataaagacttcatgagatatgcatggagaacaaggcctccacaacaacaacgtctaatataataccaacatcatctatacgataatcaaattgaacgaatcatccgacgagttccaactttgagggtactactgccgccacccagtagaaagaggatatcagcgttaacacctatcagtttagatttaatatttgtaatttatttttgtactagtatttaagtattttttaatgtatagatctgaaaataaatgactgtcctggctgaccagtccgcactttattc

SEQ ID NO: 529 - DNA, 4326 bp, Meliscaeva auricollis
  source 1..4326: mol_type = genomic DNA
tagtattggtgtgcggacgtgtatcaaatcgctccgtcaaaaagtgaaattaatattagttctagctcgtattggaaaaataaaaactcggaaaagtttacataaggtcacccccgtcattttaaaacaaaaatcaagcaataagaccaccgcgtttgctcacaatttgtgttttaattttttgaattgcatttgtgaaataaaaaaaataaattgattcgggagagaatttcggaaaaaaaagcataagagacgacatcgtccacatacgatccacataaaattccatctcaaaattgtttttgttgtaataatttcccttgattctgtgaagaatccacctaattcaccacctttttcacctttttcaccaccaaagtttaaagccattttccatagcccccagccatctgtcacccgaaatactaaaagtgccccctagtctgacatttcatctgtcattttccatcaaaaaattgtgaaatcactcgaggattgctctagaactttcggattacttttggtattcaattttctcaaaatctgtaaatttcccctcgaaaataaaataataagtgaagctccgaaccccaacctcttcggttacagtcttgaatacgacatcacgccatctggtaaaaaacagcaggaaactccaacttctccggtttgtgtatctgatacataattttactaatcaacatctggttgtaattttcgataaatacttgcgccatctagcaaaaagagctcacaccctgaaaataacacctagtgaagacactttccataattttaataattccgaagaacagaaccgaacaaaatcaccagctttcgacacaaaggggtatttcagcattaatacttcatggctaattattcacatagcaaagcacattcaaacaatagaaagagagtattgcgaatttaaattattcgtatagaagtgtggtttaattaccaaaaataaactaaccggtcttgtgaaatatccacaatggccacgccacacgaagagccagttgttgctgtcaacgaatggccatgcaacatctgtgggaagtgttacatttctaaagcatcactacaacaacaccttcgtcgagtctgcaatgttaaagcacaacagcctaataacccaaataatgaatgcataacgtgcaacagacgatttcaaacatatcaaggccttagactacatcaatctaagaaacatccagcagaatataacagcgaactgcaggctcaatcgtcaaacgcacgaagaggttggactgaagacgaagaaaaagaattagcaaaaattgaagcaggactagagggattaggttccagagacatcattaaccacctcttaaatcattccgaccgaacttttgatgctattaaaaaaaggagacaactggcgtcataccaagcgctggtctcctcttataaagcattacctacggagttaataccacctgaactaccgtacggcgagtcagattgttctgtgttaaacacggaaattaaatcttacttacaaaatctgcccaacaacatctgggactcggaagatcttaacatagtctctaacttcgacctcgacaataatctctccagcctgacgaacgatctctactcttccatcgtagagaaatatcgtaaggatagaactgtattacgtcaaacctatacaggccttataaacaagctaaacaatgccacaagcaacaggaaaagaaaacaaatcctataccacctagctcagaaggaatatgccaccaatccttctggctacgcagaaagactactcgacaacaaaccttgggcgaatagcgagacgacaccctcagcagacgacctcctcagccaatacaaatccaccttcggcatgtttgcagaggcttgtacacccaatacatcatccaatcggtatactaaaatcaacatcgcccgaccaatcaccatcgatgaggttaagcaagtgataaagtcattacgttccaaagctgccggcccagacgaaattggaaagatagaactctgcaaaattcctgcatgtaagctaacacttctattcaacctatttctccttcaagaggacatcccagacagtttaaaactcaacacaacaacactaattcctaaaacatcagataatcgagagattgcgaagaattggcggccaattaccatctcttcaatcattcttcgctgcttcaataaaattctggcccaacggttgaatgatattgacttggcagacaatcagcggggctttacaaaaatcgacggatgctttgcaaacacttggtccgtcgaaggcctgatccgtcaccacaggcaaaagggtaccccaattacactgatctccttggacttggctgcagcgttcgattccgttccacatgatgccattgcccgagctctcaatagggttaaagtagaccaaaaatacattaatctcataagagcaagcaatactggtagcagaacttccatcaactgcagtggactcgaagtaggcgaagtccgcattctcagaggcgtaagacagggtgacccagcatcaccaagtcatttcaacatattcttggacgagctaatctgcatcctgaatgacgaattttcgggtgttacgatcaacaacaataagctctgctgtctagcttacgccgatgattttatcatcactgctaaaacacctgaagatgcaaggagaatgctaaatcgaacaacttcattcctgacatcaatgtgcatgagcctcaatgtcaaaaaatgctctgccatagtgctcaaaaccgtcccagcccaaaaaaaggtctacctcgatattagtgctgtattcaccatcggatccgaagcaattccagtactagccaccgatgacaaaatgaaatatctgggcaaatattttcatttccgtggacttgtccccagttcaaccggagatctataccaacaacttacacgagtccgaagggccccactcaaacctgcccaaaaactcgatattgtgcgaacgtatctgatcccccgattcatcgatagcctacagcagcctaacataacaaaaaaagtattagaagaagccgatcggaaagtaagagcaactgtccggagtattttgcatgtgacagcgcactgccataatagcgttttccatgccccaatacgaagtggtggtctaggaatatttagtttcgctacaaatattccagttatcatcagcaaacgcgtcctgaaactcagaagagcaaataatatcttggacgccactttcgcattatcccaaaaaaggatcgacaaaatcacttcacttatcaaacccaacctcgaagataagacggcaatacagcaacaacatgccaatctcctcgagcactccatctcgggtaatggtcttcagcaagtgcaattctcccgagccagttcagatcatatacttaaaccacctaaattctggactggtgaagactacgtaaaagcaattcaactccgttttaacctgcttccttgcgtggggataccatctaaccccccagaggccagattttgtcgttccggttgcggacgacgagaaacaaacagtcatatactccaaagatgtccaatcgtccataccaatagaattctgcgccacaattacgtggtatcccgtattacatcatacgcagcaaagaaaaattggacatatcttctcgaacctaacatccgatgcattgacggcatattaaaaaaacccgacatcatactattgaaaaacaacatgcttataatatgtgacgtcggcgttcattgggaaggcccactccctctcgcctctcaatataacaataaattatcaatatacggcacccccaacttcatagatgccgtaaaactgcggtttccaaactacaacatccatgtactgccaattataacgggagcacgaggggtctggtgtcatcaaaacaaatatataaaacatcacctcaggctgccttttaacgttgaaaaagacatcattaccacaacaatccgtggtagttgcttaacccatacaaactttatgcgatttatatggagaagtcgaccacccaacaacattcatcaacatcaataactgctctagcgttaataacaatcgggtgattcttcggagtagccccatacacaacaggtactactgcctcacagtagcaaaaggattacagcatcaacacctgcattcaacatctatatatataaataaatatgtacaatatgtattttattatttaagtatttttttaatgtcatagataagataaaataaaagactgccctggctgaacagtccacattgtattc

SEQ ID NO: 530 - DNA, 3498 bp, Drosophila sulfurigaster
  source 1..3498: mol_type = genomic DNA
cttaaggaggatcaatgggtctgcagaaggggaataatggttcatttctcagcaatggcaaatgggctaccgtccttcgttagtcagatcaagtcgactcataggcaacatgtgccccactaaaatgtggcctcctcgtggtgtcctccgggtgctggaccgatgtagtttcggcagcagcgaatatgagcggcgaaaggggccattgggttaccaccccgatggtcctgaaaaactgatggtgcaaactctaataacatgcctcggatagctgaaagttattcagtgaattctcctacggcatccgtaggagcccatcagggaaggaacgtagatgctaatccagttgttggacatctatgtgtggaatgcggccgatcttttggaacaaagaccggtttaggtgtccacatgtcgcgtcagcacaaagacaggcttgatgagcttcgtacgcgtgttgacgtgaaaaccaggtggtgtgaggaagaattggccatgatggcgaggaaggaacttgagctcatagcaaatggcgagaggttcattaataaaaagctggcgttgcattttccagaacgcagtgtcgatgctattaaaaagtgtcgacagagggataattataaggcaaaaatcgagcagctaagagggcaagcggctcttatccccgaaattaatgaaccacaaaccattacgcgccgccctagtataagtgggcttgagtcttcttcttcaatgtcagagtcggttccaatcacaccatcgatacattcggacgacgtcctcatgcggatactgcggggcttcggccctgtgggatgtaatcgatcgtggagagtcgaggttctgcaatctatcattgatggagcgcagacttcgggcaaagaagcaactctccagtgtttgtctaactatctcctggaaatttttccgaatcgaaacgaaggtccggtttcggcgagagtctttcctgagcctcgcaataggagacaaaatagaaggcagcagttcgctagggttcagcgcaactgggacaaacataaaggtcgatgcatcggatccctgctagcaggacccgacgagtcggtaatgccaaaccaagagattatggaaccatactggagagaagtcatgacacagcagagcctttcctcttgcaatagcaccgtgccccatatgggacacttgcttgagggggtatggtcacctattacgtctagggacctgcaattgcatcaagtgccattgaattcttctcccggaccggacggaatatctccaagaactgccaggagtattcccagtggtgttatgcttcgcataatgaaccttattctctggtgcggcaaactacccacactcttccgaatggctcgaaccgttttcatcccgaagacggtaagagcatcccgaccagaagacttccgtccgatatcggtgccttctgtcatagttagacaactcaatgccatcttggcatctcgattggcctcatcagtcgattgggatccgcgtcagcgggggtttcttcctactgacggttgcgccgataacgcgacaatagttgacttaatcctgagggaccaccatagacgtcatgcgtcgtgttatatcgcgacacttgatgtcagcaaagcgtttgactctgtgtctcacgcagcggtaattgacaccctatccgcgtatggtgcaccaacgggttttgttgactacgtacgtagcttgtacttgggaggtggcactagtctcaatggtaaaggctggagatcagaggaattcgtccctgctagaggtgtgaagcagggtgaccctttgtctccacatatgttcaacttggtcatcgaccggttgctcaggtctctaccggacgagattggtgtcagtgtcggaaatgccaaaacaaacgctgcagcgttcgcagacgatctggtgttgtttgcttctacaccgaagggccttcaggcattattggataccacggtctcctttttggcgtccgttgggctgaccctaaacgctaataagtgttttactgttagtgtcaaggggcaaccgaagcagaagtgtactgtgatcgaatcacggagcttttgtgtaggttcgcgcaagtgtccaagcttgaagcgttctgaggaatggaagtatcttggcatccagttcactgcggacgggagggcccgctacaatccgactgaggacattggtcccagattggatatcatatcgcggtcccccctgaagccacagcagaagttattcgccctcagaactgtcctcattccacagctatatcacaagctaacccttggtagtgtggcaataggcgttttgagaaagtgtgacagactggtacggtcggtcgtaaggaaatggttagatcttcctatggatgtgtcagtagcattcttccatgccccccacacaagtgggggtctcggtgttccctcagttcgaaggacagctccaatgctgcgcatacagaggttaacgaacataaaatggccccacctcgagcaatccgagacagccagttcgttccttagtgcggaaattcggagggcccgagataggtgcaaggcatcgggagacgcggctctggatacacgccttttgatcgactcgtactgggcggataggttgcactcctctgttgatggtagcggtctccgtgaagcagggcgttatgctccgcaacacgggtgggttgtcgcacccacgcgtttgttaactggaaaagcttatttgaatgggatcaaactgcggataaatgccctacccacgcggtctcgtaccacgaggggaaggcacgaattggagaggcagtgtcgtgcaggatgtgatgctcccgaatcactaaaccacattctgcagaagtgtcatcgtacgcatgggaggcgggtggctagacacaacagtgtggctaattatctcaagcggggtcttgagacgagaggctactctgtcattgctgaaccaagtctgcagggagagaacaggatatataagccggacctggtgggtttccgaccagatcacacgatagtgatcgacgctcaggtagtgactgacggacttgatcttgaccaagctcatcagagtaaggttgagatctacgacagacaggacgtacgaacggctctggttcgggattatcaggcacatgaggacattaaaatcgtttctgctacgctaaactggaggggcatctggagctatcggtcggtaaaacgactgagagcactgggagtccttaacgctggtgatagtaatattatcagtaccagggtggtagatggcggagtctgcggctttaagacgttcatgttccatactggatatcgccaaggagtgggttagcaccgaggtttactttcctcattgaaagtcaactacactggccaacatctattgtgtacaaagtaaagggaaaacagtcatatgacgtgccatccatatatggcattgttgtgtgcaaaaattcatttcctacaaaaaatagcc

SEQ ID NO: 531 - DNA, 4740 bp, Rhopalosiphum padi
  source 1..4740: mol_type = genomic DNA
gccggcgtctcaatctgctaccgcggggtatatgcgctgtccgcggtgccttcgggcgcagggttacgacccaacagagattgtttcgcttattggtgattgttcacgctcttgtacctcacgagtgtcggtcggtcggctccgcgggcgtggttgcctcgagccgggtcatggacccggcccgtcggtgtttctcgccccgggactggacgccgtcatacggacaagatggtagggcggggttgaccctcaccggtcggcgcgtattaatcgcgcctctcggcgagatgtctccccgtcacttggatttccgttttgcggcggcttggacgcggctcgggacctgaaggcgctcgcctccgtactgcctggttttcaggtggcggtgggtgtcagctggtctcgtgtccccgtgctcgcgcaggcgctctaatcgtcttgtctacgtgaggccagagtcgggctgtcggcggcgacgtgggccggctaccgtcctgtgtgtgacacgagagtgtccctcacaggttgcgtcctaccccacgctcggtgttgaacgtccggactcaagggctggctcggtcggcgatgcaagggtcagaattacttcacggcccactcttcattgaagggtgagttgatggcaaaatcgatcctcacttccggactcatgaatgtggtattaattcgtctaagtgccggtcggatactgaccacttaagtggtttgctaacgaggcaatcgtcggtggggcgcatcgccgggtgatcttggcaggtcgttcggtgtatcgccttactgtgattttggtagttacagcccggcatggcccggggactcaccacagagtcctcgctaaatgtcgggagtggccgcgcgtcgttcgcgcgtgcgttggtgctggttagccccgcgggtgtcatttcaccgtccgcggtgccgtaatcgggtgcagggcttcggcccaatcagaagggtattgtctggaggcgtaccgcgtgggttaaaaccgtccgcggtgccgagaggcaggagggtgttacaccttaaacgtacaatagcaataccttgttaaccatcaccatcgcgcgtgcgcttgtcgggcgaccgcatcggactcatgtggagtccggctgtctcttccgtgatcaactcggcgggggtacatgaaacacgccctttcgtccgaggtatctcgcgtaatagtcgggtaaccccccgaccagtcccaggtcggcctctgagcagcgaggccggtgcgccggtacagaccgggatgaatgctcgggtccgcggcgccgccaagcgtcacgggctcttttaccaacacattgaataataataattttatgcctcggatagctaccgcatcccaaacagcgggcggtagcaaccgtgttggtgcggacgtagtcgggactgtcacctcggccacatccgcgtacaagtgtcgtttttgtacaaaaagttttgccaccaagattggtgtcggtgtccacgttagcagtgcccacgtgcaaaatgccaatgaccagattgacgtggccaggagcaaagctcgttggcccgtcgaggaacaaagattgttcgcagcgctcgaggcagaactcgtgttcaataacattccacccggccagattaacggccagctttatgaaaagcatcggggccgcacccatgagtctattaaggggcggcgaaagacccttaagcaccgcgaaatggtggcgactcatctcgcctgtcttaagggggtcccgaatgtaccgattactgatacggtaccggtggaatcgaactcgagtgatgcgcgaccgctgcccacggatgatgatggcagtgcggcagttaatgaccgatcgacaacagtagatcgattgagtccagcccttgaggctgggcaaaaggcggttgacctcctatcaaccgtgtccggtcatggagcagacaaactcctattagctgcaagacgcctagttgagcaatctttggacccgtgccacgcaatagcggcgtggtacatagattataactgcaaaaattcccgtaagaaaacgaaaaagggaaggcgaccgggcaccattcccggcgccggcatatgcgctggtcgcaggccgaataagaaagcgttgaaaacagcctgttacagacggaacgtcaccgaatggcgtaaaaatgcatctagcgttgctgagcgtgtacttacgggtgtagaccagggggctctaatgccccctgcgtcagagatgaccaaatactgggttcccattattgagggtaattttgaatctcgtccccagaccccggccgtatcttttgacacacacggcacaccgcagaacgcaacggtatttgatgtaattacgcccgaggaagtgtctgagtgccttcccagcaaaacaactgctcccgggccggacgggtttccggcccgtctgtggcgacgtctcccctgtaacttgacagccggcttgttcaacctgtttgtcgcctacggttctttgcctcctatcttggtgaagtcccgtaccgtcttcgtggcgaagaaaggagacccccagtgtcctggtagttatcggccgatctcgatcgcgtccgttgctatcaggcacttccatcgtatccttgctcgacgcctggaaaagttgtctctggtggatgagcgacaacgcgcattcagaagggccgacggtgtggcggaaaatcttttcctcctgcagtcggtcttgacggatgcccgttcgtcgtgtaagggcttgtgtctagcgtccctcgatttatcgaaggcgtttgacacggtgtcccacgactccattgcgtccgcgatgcgtcgcgttggcttagaccagcgcttcgtagactacattcgcggaacgtaccagcattcagagacatttcttcaggtcggcgggcaggctacgcgggggctcttcccacggagtggcgtcaggcagggggaccctttgtccccgcttttatttaatctggtggtagacggtggtctccaagaaataccagaagcagttggctacactctgggtgatactgtggtgaacgcaattgcctttgcggacgacgtaatcttgttggcggaaacgcctgatggactacgaagagcatgcgaggcgttcacggaccgattgagtgtagcgggtctaatggcaaatccgcagaagtgtgcgactcttaccctggtgccgtccggacgggaccgtaaggttaagactgttgacgaggtctatacccttagtggtatcgacctcccaacgcttaacgttacctccctatggcggtatctgggcgtaggtttcgcaggaagtagaatcgatgccttcgactccgcggcgtacgtaacagcgcttaatcggatctctacggaaccgatgaaagcgcaaatgcgactttgtatcgctagagactacctcataccgaagttcgttcacggactgacgttctcggtggtctcggtacgtaagttacgcagtctcgctcacgagacgcgccgcgcagtcaggcgttggttggaccttcccacttcgtgcccgaacgcgtacattcactcgccaacatcggcgggtggcttgggtattcctgactttgtccttttcgtacctcgtaaccgtgtaaaccgtcttgtaagacttgagaactcgtcgctcgccgccgtccgcgaagcgttccggcttcatggccgtaccgctttggcgtccgcgcgtcgatcgaccgagggtcaccgtctcaagcttagtcatgcgcagcaacttcatgcgtcagttgatggctctgaattgaaagcttgttcaagtgagtcggcatccgttgcgtggttgagacgtcctgacggcatcccgtcgtcggacttcaaaaactacgctcggattcgtatcaatgcgttgccgactcgcaagcgggtaaaccgtgggcgcaacggtctggctcattgccgggcctgtttcgccccggcggagacgcttgcccacgtagtacagagctgtcctcggacgcatgatggtcgcatcttgcgacatgactgcgttgctaaacgcatcgcgggcggtttacatgacaagggttacgaaatagaaagggaatacctctataagctgcataacggaaatttaaagccagacatcgtagctaccattagcgacgagacgagaggccgtatttccgtgatatgcgatgtgcaagtcgtttcgggcataggaaccgcactctggcacgctaacaaggtcgagaagtattccgaccgagtggatctattatccgcgatccgggcacgacaccattcgaccgatgtacgaacggtcgccgccacgctgacatggcgtggcgtctgggaaccctcgagtttccagagccttcgggcgcttgggttgagtagaggtctactcgaaggactcgttacacgagtcctgaagggtaccctctccaactggcaaacttttaatactaaaaacgacatgacgacgcgggttggtgtcgggtgattcctcgcctacccgcgacaacattgatggtctcctcttccatcaccttcctttatgattccacttaatgaccttcctctccctcagacaacttccacttccacctccgggtaggcggtatatgatgatagcccgggtcttaccctggttaccattattttctctctctctggctaatcaaaggggtaagattcggcgccttaggcgtattgcggctgataaccgttttacgtacgggtacctttctgataca

SEQ ID NO: 532 - DNA, 4103 bp, Acrocera orbiculus
  source 1..4103: mol_type = genomic DNA
ggactttggtcgggtacggacgtgttttataatcgctccgcagtaattttgaatttttctttataacttctacagttttagtgctacagttttgaaactttgtagaaagattaataagtgcaccttgtgaatatattttacattttattgaattctaacggttaatccgcgagatatcgataaaactcaataactcccgttatttcaacggtaccaagatcaaactttataaaaaccgaggaaagtaattgataaacattacttaaaattttggtgcaaatcgcgcttatacttttcaaaatatcgcgattttattatttttaaaagtgatttactgctataagcatctagtagccgtgtgcaataaacaacatcagctgcatgtatcatgcagagtgcacgtgattatatctaaatacttcatgggcgttgcttattaaaacatgttttacttgtcatttgacctcgaaggttttctgaactttgagggtatcatcgtcaacatcttgcatgatacaaatattaataacatcacacaactttcatgtgataaatatcgtgatatttatatcatgatataagtatcatgagagctggaaattactaaaattcttttagagagctgacactgaaatatgaattattttttatttatttgcagtgttttagaagaggtgttaataactaatatattaattatcaggacacgcgagaattgttccgtgatgtctgcatctcacggtttcacttgcccttgcggcaaaaatttcaccgacatcaaaggtcttcgacgacataaagtacgaatatgcaaaatccaagtttctcacgatactacatgtccaaaatgtaaaaggacgttccttacttacccaggtatgcgtagacatttatctatgacgcacaacgtacatagagatgacatctccgaaatatcttcctcttcatcagaggaatattttacgtgtgcatgtaataaaacttttgcaagtaggcctcaacttcgacaacatcaaaaacgatactgcaaaggcctgcaaaatttaagtgaagaggatgaattccaatgccaaatatgtaaacacatctcttcgacttggccaggcatgaggttacatgtaaagagaaatcatcccattgaattcaatgaggaacttaaaacaatgagtcagaacgcaagacatctatggaccgagagtgaggaaaatgcacttgcagcgatcgaggcttccttggatgcttctaaaacaactacagagattactgcatatttaaagggattttcaggtagatcactacaggccataagggctagaagaaacaaaacttcatttaaagaaaaagtcaaaatgttccgcaggcaaataatcgaggagaccctaattgaagaacaaacttcgaacgcctcagaagaacaaggcattattgataacttgaaggaattcatttcgcatatacctgatacacattttctcgaaactgatatcagtttcagaaatcaacttttagaaagtgattacgatagtaaggaattattgataaatgaatacgcaaaaacattcacaaatatgaaaaagtctaataacaaaggtccaataaacaggaatacattacaagccaacctatcgaaatccaaacgtaacacgagagtcttcaactttaaaagagcacagaacctatataagatggatacaaaaagttatgctgcaaatttactagatggagttgataataacatcactacgacaaccccaaatatcatcgcaataaaagagaaatatcaagaagtcttcgagaaaccgagtacagaggatgaaacacaaattttagacttcaaaactgaaaaaaccattatttcgacaccaattgacattgagaccatagaaatcttcagagataaacttaaatcgagcacgcctggaatagatggtattaacaaaaatcaacttcggcgaatacattccacgcgattagcattactgatgaatgccattctgctaaccggaaaattgcccatgcagttcaaggttagcaggacaattttgatccctaagaaaactaaggacttagataaggtgaacaattggagaccaattaccatcggctctatcgtcataagattactgaataaaattttatcgaaaaggatcaacgatagtattgagctccatctagctcaaaggggctttaccaaaatagatggctgtttagctaactgcttcacactgcaaaatattattaaatcgaaaagattgaaaggtcagcccttatgtattgtatctctagatttatctaaagctttcgacacagtgtcacacgatagcctaaatagagcattgaatagaatgaatatggacagtctcatcaaaagctacatcatgcactcatacgagaataacaccacatcgataaagtgcggtaatttagactgtggagtctttaaaataaacagaggtgtaaaacagggggatcctttatccccggtactattcaaccttgtcctcgacgaactattagtactactcaacaaagaaattggaataaccattggaaataatacaatcggagcacttgcatatgctgatgacttaatattatgcgcaaatacgcaacaagaagtaggcatacttttacaaaaaacaattgattttttaaaatctaaaggcttggaaattaacttagaaaaatcactctcactaactttcaagagtgttccgggcaaaaagcaagtttttatagatcaggacaaatattttaaattaaatgacaattacctgagggcactctcttctgtggaagaatttaaatatttgggaaggtcattcggtcccgaaggactaaccaaatgtaatttaacaaatctttaccatcaattaaagcttataaagaacgctccattaaaaccgttccaaaaaatgaacatattgcgaacttacttaataccaagatatatagactactgtcaaaatccaagaattacagctggaatactaagtgaagtggaccgaaaaataaggacttccataaaaaagattttgcatatgaccactcactgcacaaataccttgttttatgctcccttaaatcgaggtggactaggcatcttttgctttagaaggatgatccctttaatactatgtaaaagaataaataacttaatggaaagctctccaatcttaaaacacacctttcagttggattatcgaaatataaagagaatacgtaaattattaatggccaacataactacaaaagaagaaatgaaggaaagattaggtatggaattctataaatccttctcggggattggactacagggagctataacaccaagcttctgtaacgacttcttgataaaccccccaaaatattggaatggaaaagaatacattaaagcgactttgctgagatttaatcttcttccatgtaaggggataccatccaatccaccaactgaaagaagatgtagagccagaggttgcaccacaaatgaatctgtctgccatatactgcaacactgcccattaactcattgggaaagaattaatcgccacaactttgtagtaaaaaatgtaattaacgtggctaagcaaaacaaatgggatataaaggaagaacctcacattagatctaacgagggtatactatataagccggacatcctcttaacaaaagcaaatgaagttattatagcagagatcggcattaattgggaaggaaatgtaccattgactgatcaatatgagtcaaaaaagcaaaaatatagtgcaccacaatttttggataaacttaaagaacaatatcctactaagaacatctctatactaccactaataataggagcaagaggtacctggtgtcatccaaataaatatctagtccaaaaattaggattaactaaaatcgacacaagaaaaataatacaaactgtgctaagaggaggatggactattcacgaggactttatgagatcagtttggcgtcagaggaggtgaaacagaggagtggtactactaccagaacatcattagtagaaattttttcctttaattacttttatgtatgttgtataaacattttattttgaataaaggatattttta

SEQ ID NO: 533 - DNA, 4113 bp, Nemotelus nigrinus
  source 1..4113: mol_type = genomic DNA
ctttgctttcaccttgacgtcccgggtcttgtatcgtcctcctctgttacgagggcactagaaacaacatctatggattctacgaccgcagccaagcagctttcatcagggtactcatctgtgcctggttcgatgacggcttcttgtgtaatcattctgttctttttgtttgtcttatttatttatctctgtttacttatcatcatttccatgttatttatttagcttttatgtttatttatttctatgttatacgtagttctatcctcccttatgttccttctctcttctttatacattgtattactatctattttacttaccatttttgataggctgtttctctctctttttctctctctctttattcctttcttttgccaccctctatcttgaggccttccttctatttcttctcttactactttccacttttcgctttcattttcattttcgtccttcacaatatagtctctcgctcggacggccgggcccgtactttggactaagggaaggggtctttggggtatttacccttcgcttcattgggttgccagcccattgaagcatgaaaatagttggattcaataatcagaacagtaataatcacaatctgcggcggaggcctcggaccgccgtaatccaacagctgggtgatttcatcccagaacagcccaggcaactccgtgctaaccccgtacaggcaccaggcctaaactccctttcctcccaagaaccaatgcgtgtgccccgaacagtaccccctagcgtccctgagccggagccaccacctgctcctcacgtctgtcctgaatgttcgaggtccttcggatccaagattggtcttggtgtccatcgaagaagggcccacgcggaagaggttaaccaagaggttaacgtcgagaggacgaagaagcaatggtcatcggaagagatgcgaatgatggcgagggaagaggcgctagccacaatacaaggagttagattcattaatcaacatcttgtcgctaatcttgatagttctcgcactctcgaggctatcaagggcataaggcgcactactacataccgtgagatcgtcgccgcagcactcgctgacctacgtgctgccccgtctacaagtggcatatcttcaccatctaacacaagtaggcgacaacgctcatctagctcctcctcttcctcgtcaccatcttcatttcactcggccaatgagtcgctcgacccattggaggcatccctacatgacctaagtctttcggcccgatggagcgccatgtacggcgatatccacgtcgcagtccaagctttactaccagcgctccacgaaatcagcggctaccataagtcctctctaaccgaagtaggtgaatgtctgcttcggggacgagatgcgtgtgatctgctcgactcgtggtttcggttagcctttccatctgctgaccgaccatcggctccacatccgcgaggacttccgcttagaccacccatcggagctccgcggcatgagaggcgactctttaggaggaaggagtactcacgcatgcaagacatgttcaagaaagacatgtcgcgggctgccaaagaggttctggatggcttaaatatctcagtccccccttccatgcccgtcatggaaagttactggcgtactattctaactttaccatccagaccatatgctgcaagccaacagacgagtgtcagtcactctctgcagcatacttggctacccgttacatgcgaggaaactgaatctgtaagggtccccctctcgtccgcgcctggtcccgatggagcgactgcaagacaatggaaggccgtccctgctgttgttaaagccttcatcttcaactcgataatggtctctggtactttcccggaaccattactgcaaagtaggacgatctttattcctaagaagaacaacagcgactcgccgggtgatttcaggccaatcagcattccgcctatagcggtccggcactttcataaaatactagcaacccgtttacgggaagctaacatgattgatgtccgacaacgctgcatggatgatggttgcctggaaaacatctgcgtcctggcatcgatactggaaaatgcccgatcgaaacttcaggaggtgcatctgtgccaactggattttgctaaggcatttgacagtgtcagccatgaagctatcgctggtattcttgggagtagaggtttgcctactgcgtttgtggactacgtagttgggacctacagacgcagcaccacgaagttggaaatgaatggtcaacactcggacgtgatcagcgtaacaaggggggttcgtcagggcgatcctctatcatcgttgatcttctgtattgtagtcgacgaagtcctccgatctcttccatcagagatcggcttcgagctagaaggacagcgtgttaatgccctagtttacgcagacgatataatccttgttgcttccaccgagtctggtatgaaatctatcctccaaaccaccgaagagaaggcaggcttgcttggactgtcaattaattctcagaagtcggctgctctttccatcatccccgatgggaagaacaagaaatataagattctgaaagacacccaatttcacttcggcgacggtacaccggtcacccaattaggccccacggataagtgggtttacctaggtgtcgatttccgaccccaaggacttacgcgcgttggcgggaagttggagactcttctggagaacatttccaaagccccacttaagccacagcaacgacttaagattgccaagtctttcctcatgcctcgattccaccacaaactgattcttcagggaaccacgctcaaacatctacgagcaatggacaggcagattcgactatctgttcgcagatggttgcgtctgcctaaagacgttcctaatgcatactttcatgcacctattcgtgaggggggtctgggcttacctgccttcgagctgaccgtaccgtcaatgatgttgcacaggttgacatcattgaaccagtcgacattcccggcagcaagagcagccttcaacgctcctttcattcgtaagcgaatggaatgggctgagagggttgcttttcgcgctgggactgtgctgcggtcacgaagtgcagtgaacaaatggtgggctacagcccttcacacatcggtcgatggttccgacctaagagagtgcattaaaagcaatttatcctcgaactgggtcgatactccgggatctatgatcccgggtagagactatatccagtaccatcacatcaggataaatactcttccaaccaggattaggacgtcacgaggtatgagaaccccctcgcgcgatataacgtgtcgggcaggttgcacagcgaccgaaacagcagtgcacatcattcaatgctgcacccgcacgcatgggggtcgtgtcaaacggcacgatgcaatttgcaaagttcttgggaaatcactgagggacaaaggttggcatgtccaagccgagcctagatttctaacagaccaaggtcttcgtaaaccagacttggtgtgcaagaaggacggtagaatctgtgttgttgatgcacaagttgtcagcggatcaacatctatagacgccgcacaccagaggaaagttgactactatcagaacaatggagacattaccacttcccttatgcgcgaacataatgtccccagggatagtataactttcacctcgtgcacaatttcgtggcgaggaatctggtccaaaaagtcggcaactgaccttgtattactagggctatcaaccaaacttttatcatcattgacgacaagggtgctgcaggggagtcacacaaactggtctaggttcaacacaatgacagaccacgcgttcgggagggaaggacggggaagggccggggttgggtgaaacgggagtcgcccaattgtaaaactagggccacccatcccctaacagcttagatggaggaatatagcgggcggtttagtgggtcgatccccacacacgcgaggccgtcaacccacgttacagggatggcctcgtaggcgttacaaatgagaggagaacgttcctacccgcttcaaaaaaaaaaaaaaaaaaaaaaaaaa

SEQ ID NO: 534 - DNA, 3998 bp, Acrocera orbiculus
  source 1..3998: mol_type = genomic DNA
ggactttggtcgggtacggacgtgttttataatcgctccgcagtaattttgaatttttctttataacttctacagttttagtgctacagttttgaaactttgtagaaagattaataagtgcaccttgtgaatatattttacattttattgaattctaacggttaatccgcgagatatcgataaaactcaataactcccgttatttcaacggtaccaagatcaaactttataaaaaccgaggaaagtaattgataaacattacttaaaattttggtgcaaatcgcgcttatacttttcaaaatatcgcgattttattatttttaaaagtgatttactgctataagcatctagtagccgtgtgcaataaacaacatcagctgcatgtatcatgcagagtgcacgtgattatatctaaatacttcatgggcgttgcttattaaaacatgttttacttgtcatttgacctcgaaggttttctgaactttgagggtatcatcgtcaacatcttgcatgatacaaatattaataacatcacacaactttcatgtgataaatatcgtgatatttatatcatgatataagtatcatgagagctggaaattactaaaattcttttagagagctgacactgaaatatgaattattttttatttatttgcagtgttttagaagaggtgttaataactaatatattaattatcaggacacgcgagaattgttccgtgatgtctgcatctcacggtttcacttgcccttggtatgcccaggtatgtatgcgtagacatttatctatgacgcacaacgtacatagagatgacatctccgaaatatcttcctcttcatcagaggaatattttacgtgtgcatgtaataaaacttttgcaagtaggcctcaacttcgacaacatcaaaaacgatactgcaaaggcctgcaaaatttaagtgaagaggatgaattccaatgccaaatatgtaaacacatctcttcgacttggccaggcatgaggttacatgtaaagagaaatcatcccattgaattcaatgaggaacttaaaacaatgagtcagaacgcaagacatctatggaccgagagtgaggaaaatgcacttgcagcgatcgaggcttccttggatgcttctaaaacaactacagagattactgcatatttaaagggattttcaggtagatcactacaggccataagggctagaagaaacaaaacttcatttaaagaaaaagtcaaaatgttccgcaggcaaataatcgaggagaccctaattgaagaacaaacttcgaacgcctcagaagaacaaggcattattgataacttgaaggaattcatttcgcatatacctgatacacattttctcgaaactgatatcagtttcagaaatcaacttttagaaagtgattacgatagtaaggaattattgataaatgaatacgcaaaaacattcacaaatatgaaaaagtctaataacaaaggtccaataaacaggaatacattacaagccaacctatcgaaatccaaacgtaacacgagagtcttcaactttaaaagagcacagaacctatataagatggatacaaaaagttatgctgcaaatttactagatggagttgataataacatcactacgacaaccccaaatatcatcgcaataaaagagaaatatcaagaagtcttcgagaaaccgagtacagaggatgaaacacaaattttagacttcaaaactgaaaaaaccattatttcgacaccaattgacattgagaccatagaaatcttcagagataaacttaaatcgagcacgcctggaatagatggtattaacaaaaatcaacttcggcgaatacattccacgcgattagcattactgatgaatgccattctgctaaccggaaaattgcccatgcagttcaaggttagcaggacaattttgatccctaagaaaactaaggacttagataaggtgaacaattggagaccaattaccatcggctctatcgtcataagattactgaataaaattttatcgaaaaggatcaacgatagtattgagctccatctagctcaaaggggctttaccaaaatagatggctgtttagctaactgcttcacactgcaaaatattattaaatcgaaaagattgaaaggtcagcccttatgtattgtatctctagatttatctaaagctttcgacacagtgtcacacgatagcctaaatagagcattgaatagaatgaatatggacagtctcatcaaaagctacatcatgcactcatacgagaataacaccacatcgataaagtgcggtaatttagactgtggagtctttaaaataaacagaggtgtaaaacagggggatcctttatccccggtactattcaaccttgtcctcgacgaactattagtactactcaacaaagaaattggaataaccattggaaataatacaatcggagcacttgcatatgctgatgacttaatattatgcgcaaatacgcaacaagaagtaggcatacttttacaaaaaacaattgattttttaaaatctaaaggcttggaaattaacttagaaaaatcactctcactaactttcaagagtgttccgggcaaaaagcaagtttttatagatcaggacaaatattttaaattaaatgacaattacctgagggcactctcttctgtggaagaatttaaatatttgggaaggtcattcggtcccgaaggactaaccaaatgtaatttaacaaatctttaccatcaattaaagcttataaagaacgctccattaaaaccgttccaaaaaatgaacatattgcgaacttacttaataccaagatatatagactactgtcaaaatccaagaattacagctggaatactaagtgaagtggaccgaaaaataaggacttccataaaaaagattttgcatatgaccactcactgcacaaataccttgttttatgctcccttaaatcgaggtggactaggcatcttttgctttagaaggatgatccctttaatactatgtaaaagaataaataacttaatggaaagctctccaatcttaaaacacacctttcagttggattatcgaaatataaagagaatacgtaaattattaatggccaacataactacaaaagaagaaatgaaggaaagattaggtatggaattctataaatccttctcggggattggactacagggagctataacaccaagcttctgtaacgacttcttgataaaccccccaaaatattggaatggaaaagaatacattaaagcgactttgctgagatttaatcttcttccatgtaaggggataccatccaatccaccaactgaaagaagatgtagagccagaggttgcaccacaaatgaatctgtctgccatatactgcaacactgcccattaactcattgggaaagaattaatcgccacaactttgtagtaaaaaatgtaattaacgtggctaagcaaaacaaatgggatataaaggaagaacctcacattagatctaacgagggtatactatataagccggacatcctcttaacaaaagcaaatgaagttattatagcagagatcggcattaattgggaaggaaatgtaccattgactgatcaatatgagtcaaaaaagcaaaaatatagtgcaccacaatttttggataaacttaaagaacaatatcctactaagaacatctctatactaccactaataataggagcaagaggtacctggtgtcatccaaataaatatctagtccaaaaattaggattaactaaaatcgacacaagaaaaataatacaaactgtgctaagaggaggatggactattcacgaggactttatgagatcagtttggcgtcagaggaggtgaaacagaggagtggtactactaccagaacatcattagtagaaattttttcctttaattacttttatgtatgttgtataaacattttattttgaataaaggatattttta

SEQ ID NO: 535 - DNA, 3421 bp, Chlorops oryzae
  source 1..3421: mol_type = genomic DNA
gtgtggtagttctggttcagtccgatcgccacggaaaggtcccgcaagggtctgattcttaagagagttgtagatgtgcctacatcgcacctcctcgtggtgctcgccggtaacggtcttcggatcggctaagcgatggggtctagggggttctcatgggctgccaacccttgaatccccttaaaaatcaatgggtgctaatacaaatacaaacataaatacgggcctggataacccgagactagaggtagctgcctctagtcatcaagtgacaatgagagaagagagagaatcaggaattgacggttacaaatgtagattttgtgtgcgatccttcccaacgaaatccgggaggggcgtccatgaaaggcggaaacatcctgacgggttggatgaggaacggttatcagcgcagcgaattgtgaaagctcgctggtcggaggaagaactgcgaattcttgcgagtgcggaagcagacctggtaagagatggaactcgtttcattaacttggaacttgggaagatctttccaaataggtctgtcgaagccatcaagaaggcacgccaaaaggaagtctacaagggttatgtacaggcaaaattgacgggaacaccgccagtacaggacattcgcccggaagtagactctcccgatgacaccttcttgacgcagatgcaacagatctccctttcaccctcatcaaccaatgatgcattattagagcttattgaacatgcggagcgtcttggaaaagatgaaacacttgctagactggctagcttgttggctcgtctcttccaatcgggaacaagacgcccacgtgctcgtgtagtcgccggagacgatctgaatcctgggcaaccgacgcggcgccgggcacccaataggaggcagagacgtcgtatggaatatgcacgagtacaacgcaactttcaaaaacatcaggggcgatgcattaaaaacattctggagggtatccatgatgtagtggaacccccaagaaacattatggaaccttattggcgggccataatggaacaaacaagtttcgaatcaccatctaacgaacaaatgcaaaaccctggtaccgccaacgctatatggtacccaattcggtgttcagaagttcataagctcgatgtatcaacgtcacctggtccggacggaattaaggcctcagatctaaataatattgcgagagaaacgttggggacaattttaaccatattgatgtggtgcggaaaattaccacctgcccacaggggttctcgaactatctttatccctaaaaagggtgatagctcagaaccaggtaacttccgccccatcacgatcccatctgtcctagccagaatgcttaatagcattttggcgaagcggatactggaatcatttgtgttcgattccaggcaacggggctttataagatctgatggctgcgctgacaacaccactcttttggacatgttgctacgagatcaccatcaaacgtatgcaacatgccacattgcttgcctagacattagtaaggcttttgactccgtatcgcacaatagtattgaggtggtactaaaagactatggatttccgtgtgaattcatagcttatgtaggagaaattctatctaattctcctacagtgctttgcggcaaaggctgggtaagcgatgccctgattccagggaggggtgtgaagcagggggatcctctctccccgctgctttttaatattgttgtcaaccgacttttggaaactctgcctaaagatgtgggctcaaacataggtgattatcgcctaaatgctatggcgttcgcggatgatcttatcttggttggtaagactcccaaagggctcgagatgttactcgacttcacgcacgattacctcaaatcatgcgggatggcgattaattcatcaaaaagcctaacgattagcattgaagcgaatgcgaaaagaaaaatcaccatgatcaacagcaccagagttttcaaaataggtcaaagcgttattccgtctttgaagagaacagacgaatggcggtatcttggagtgacgttcacgccagagggtaagactttgttcagacccaaggatgaactgatccccaagcttaccgggctacagcgggcgccgttgaaacctcaacagcgtctgcacgcacttaaaacaattgtgatacctcagttgtatcacaaaataacattgggcaacattaagatcggttgtctgaataaagccgataaatttattcgaaatacagtgcgaatgtggctacgcttgccgtctgattctccgattgcctacttccatgcacctgtgagtcatggaggactaggtatacctgcgctgcgatgggtcggtcccatgcttcgcgtaaagagactgaccaatctcaagatgccgtgcctcgatacctgcgtgagagcaaacacattagtagcaagcgaaatacaaagagccgaacgaagactgctaataaatggctctgctttgcgatcacgtcaggatatcgataaaatgtgggcaaataggttatggtcgacagttgatgggcatgggctatctgactgtcactatttcccacaggcaaaccggtggatacgcgaaccgaccaggttgttgtcggggcgggactatatcaactcaatcaaactccgtatcaatgctcttccaacgagatctcgtacctcacgcggaagaccaagcattgatcggcagtgtagagcgggttgtaatggtccagaaaccctgaaccacatccttcagcaatgtcatcgcacacacaactctagaattgctcgacatgatgccatagttaagtacatgaagagaagcttggacactaagggctatagtactgaaatagagccaagacttcagttaccaaatggaacaatattaaagcccgacattgtggcgagcaaggatagaaacgtgtggatcattgatgcgcaggtgaggaccgaatgtaacttggatgaagccgacctgaataaagcacgcaaatacgaccgagaggacctcaaggttcttctcagaagtagatgcgatgcagtggacataaatagctatgcggtaactcttaattggcggggagtgtggagcaaacgctccgcacaaaagcttcttaacgccaaaatgattagcaaacaagaccttgcaataatcagcacaagagttatcgtaggtggtatagctatatggaatattttcaatcgcacaacgtcgttcgtacctgccggtatcggatgaactctctttctctcagctaatattttgggtgacatcttcccggtgaagaaggtgcaaaatcggtggaggtttttagtgagtaagaatctcacactacccactcgaccgcctgtcgaggggtgcctatgtaaggttttcctccacgtgacaaaaaaaaaaaaaaaaaaa

SEQ ID NO: 536 - DNA, 4907 bp, Andrena bucephala
  source 1..4907: mol_type = genomic DNA
cacagcattaccacgggtcggtgtctaagaccgaatggcccttatgtggtgagcgtccgatagtgacgttggtggcacgtatgtaccctacttgcgtcatactctacacccactaatgtgtctcccgagtggaaccatttatgtcgagaagcctctggcttcgttgagacaaaacttggttgccaatgacccgtcatctcaatagtgacgcagaaaatctatgaccatctaaggtgcctcatgtcccgtcatcccaatagtgacgtagcaaatctatgaccatataaggtagacacgatgacccgtcatctcaatagtgacgaaacaaacctatgaccatcgcaggtaaacgcatgacccgtcatataattagtgacgtactgttaccaaatgacccgtcatctgtagtgacgctcgaatgaagtgcacaatggcaaagagaccatagccattttgtcggctcaactaatgacaagcagtcctctgcggagtctgcagaatcaatgagaaagcaagaggtgtcaggtattggaaaaaggacatggtcctagatatgtaagaaagtgagatgggggtcctatccggtatataccggtaggcccccattttcacgtcgaaaactatgagccgacaatgcgcttcacgcacgggccaaagctcctcgatcactattgaaagcaatacgcggccaggacttgccctgcggcacgcggagataggagaaggcaccttcgggagaggtaaacgggcagagaggaaggctgttgacgactaggcttgtaaatggttatgagaggaaacggattggaatgatgtacccggcttacaaatccaacctatttcaatgtttagtagcaacgaagatgaagtagcctcggacgcggggatccccggccctgggatctccgtggcggacttgtccgctgccgataggagggccattgttgacgacttagaccacgaaaacggacatgatttttcccaaacggttgggttgccgctggacggccccatccggtgtgctgggtgccaaaaagaaggcaggaacaaacagttcctgtccgaaaaggatttcaatacgcatgccgcagagtcccatcgtaaaatggtggtccagtgggagtgccaagaatgtggcaagaaatacttacgaatacaccaactcaaatgccacttgccaaagtgcaaaggagcggtggaagacaccgttggtgaattccgatgctcgatgtgtgacactgcttttggaacgcaaagaggcctatcaacacatgaaaggcacagacacccaacactgagaaatgaaaagaggaaaggcgccggtggggccgggccagcggcggctaagaaaggaaggaaggccacagtctggtcggaggaagaaacagctctcctccgagagctggatcgactgcatgggggcagcacccgggtaaatgtgcgaatcagggagcacctgcccgggaaaacgcttaaacaaataagtgacaaaaggcgacaattgaagccccgtgaggacgaggtcggatgtgccgcaagtgaggagtcgggcacagaggaagcagtccactccctagaagaagaagtcccggcacggccagacagtggcgatagtagccaggtgcctgctttgagtagggcttggcgagaaataatgaaagaagcaatctcagcccctgggccagagaatgtcgaatgggccagcatcgcaagaagcatagagatgctggcgattgacgaggaagccagtaacgagcagttagaaggcgtggtgggcgaagtattcagcgtcctactgggtaacgtacctgccacgaggccccgtgaaaaccgggggcgcacggggccacaaaatgctggaagcgaaggggcacgcttcagcaggcgcacaagaaggcgcagattcaggtacaataggtaccaggaattgtacaagaagtgccccaggaagctggcggacttagccatcatgggtagcaataccgaccaggtagacctagaggtacgctacccacagaccgaggaaattgaaaggctatataccgccctctggggcaaggagggccccagtgatgtcaacctgcactcaggtggcggtgtggcggggacggttccgaccggtgaggtgtgggtgccggtgggggctaatgagattataagacgcatagcgaaaatgaagccagggacggcagctggtccagatgggatcaagaagacccacatcaaaagagttggcgcagtgcaggtcctggccaagctctttaatttgctcctgctgaagggatactacccaaagcaatggaaggcaaacagaacgacgttaatcccaaaaccagggaaagatacgaaagacgcacgaaactggaggccaataacaattggctcccttattggcagactgctatccaatatgatcgatagccgaattagggataacgtcagcttatcacagcgacaaaaaggcttcatgaaagacaatggttgtaagcacaatgttgcaatcatgaagtctgtcttggacagaatgaagaagaccaaaggcggcgtgctaaccgtagtggatatatccaaagccttcgacacggtgcctcacgcttcactggtcgcctccctggcagccaaaggaatgccggatgaagtgacctcctatataagagaaatgtacaatggttgtcacacaacaatcaaaggcagccagggtggcagtattaacatcacactcctaagaggagtgaaacaaggagacccgctatcgccgttgttgtttaatacggtgatcgaccccatagtaagtcagattgagaacacaaccaaaggggtcgatttaaatgataacaatgtcgccgtgctggccttcgctgacgatctagtcttgataggccaagatcgaaaggaggcagtcaggcagaccaaaatgctcgccaaatatctagaggacctcgggatggaactgtccatcgcgaaatgtgcaaccatcgaggttgtttctaaaaacaaaacgtggttcctcaaggacccagaaatcacagtgggaacagacaggatccccaccctgggaccagaggaaaccactagatacctgggtatcacactaaacccatggagtggattgaaggtagatagagagaggcttaaagaagtcacgagggcggcaagcgctatagcgcatatggggctcaagccccatcagaaagtagatgtaatcaggacgtacttgctgcccagagtcatctatgaattagtaacaagtccaccgccaatcaaggtcctcaaggagctagaccatgaaataaaacaagtggtgaagaacatattaaaactgcacccgtccactacggacggtatcatctactcgatgaaaagccatggaggtgtgggactccaaagaatagaagacattgtcaaattggcggtaatccgcaacgggctcaaaatgcttgactctacagatgatgtagttcaagaagctcttaaggaggaaaggggtataatcgagaaatatgcaaaatccctgaatctgagctggccgaccacgatggtcaaaatagaagaagcgagaagggagagtaagaaaagagacaccgaaaagtggcgtcagctaatctcccaagggcagggcgtggcggatttcagccacgatcggattggcaacgcgtggttgtacaatccgaccctgctcaagccttccagatatctggatgcgctcaagttgcggacgaacaccttcggcacaaaagtagcattatcgagggcaagtaagagcatggacgttgcatgccgaaggtgcaaagtccaagcggaaactttggggcatgtaataggcaattgtacccacactaagcccatgcgaatgaggagacacgatgaaatcaaagatttcatcggcaatcgcatggcaactaagcacgccgtctttgtcgagcctaccgtgaacgtcttgggagagctgaggaagccagatctggttattaaggaccaggagaggctcctcatcttggacgtcacggtacggtacgaaatgaatgataaccttcgaaaggcgtatagagagaaggtctccaaatacaaggaaaccctggaatacatcaggatcaaaaccaatagcagggaaggaagggtactgcccatcgtggtaggggccagaggggcaatgcccacacagacacaagaaaacctaatgtcccttgggttcagaaaagaagatatggtcaccatttccatgatagcattaagatcctcactggaaatggcgaatgcctttatcgattacgatcacataaggtaatatctctggtaccccccaaatatgtgtcatgtatgtctgtacgtgtgtgattgtctagaccaggcacggagcggagcagctctgtgcgtttgtacacagagaccgtccgtgccagtatttataatgtgatggttgacgcttgaacatattgaccaggcatgaagcggaacagctccgtgcgtatgtacacggagaccgctcaagccagtatttattggtatacgtccggaacgcaattgacgaagcagctgccgctgataatatattatgcagtcaagcccacctggcactttacaccaggtggtgcgagtcgtgcccactattgtggtgaacggcgcggagcgggtgaatacgaagagtaggaacccgggtgataccttcgcgatggttttccctgagcacgttacacgtggccaaattcacttccccaagggggactccgtttcctaatttttcgaagcccgtgaggcagatctcttggcagtggaagcaagaaagtggaatttgttaaagttaaaaattattgttattggtaccagtcactgggccaactcacgtctaacagggtggcgaaccaaacccctggaaatattcggccgcctcggcgcatccgaacaggttc

SEQ ID NO: 537 - DNA, 4332 bp, Acridotheres tristis
  source 1..4332: mol_type = genomic DNA
gggcgggagtaactatgactctcttaaggcagctttagagagtcaggttacaaactgggcttagctgcggaagtcacacctcctcgtggtcccgctggacacccgtatagggtgactgagttgacttctgccccagtgtgagtgagggtgctttatcagcctctccctaccgtttggattcgccacccaacggtagcttcacgatcttgccgaaaccaaaagcaattggcgtagcttctgagctgctgcccagagccttgtccacgggctacagttggacacagttggcagtgtgggagagggccacctgctaacttcgacctccctcacttgattttaacattttaacatttactagtttttaatctatttctgacaatggtccaattactggccttgcgatacgtatctatagccactcagacagaccccttagatctgtgggtccaaaaagccatcattccatctgttccccctgccatacacaaagatgaaggattcgatctgatgagtttggagttcatgaactcctcctatttggataaaggtggactccatctagatattggtcaggcgggattggctgattttcctgagccgtatgagaccttgcccattgggttaactcaggaactcaattctgagtgcagagtgagtgagattggagagcccaatacacccgttgctctccacagaaccaacaagggcggacctctactacaaacacccgttctatccatcaaagataaagacctggcttgccccagttgcgacatccgcttcaccacgatgtcaggaatagtcgaacatctactgataagtcatggacagaaaaagatcatcttccaatgtccaaaatgcggtaaacaagatctcaattgccacagcgtacaatgtcatttcccacgatgcaaagggaaggtgaatgtagttccaacaggtgactggacgtgtgaggtatgccaaaaaagttttaactctaagattggcctgggacaacacaagagactgatgcatccatccgtgagaaacaaggagagaattgaggcctcccatccaaaggaaacatcacagagaggagcccacaacaaggtgtggtcggagagcgaagtagcgctactgagacagctggtaacagagtacgctggatgcaagaacatgaatcagaaaattgcggagcgaataccaacaaaaacagctaaacaaataagcgataaaaagcgctatttggtacagaccacttccaagcacacacaaaaggtggaagacaacaaggaagtgcatgaggtgaatgctaggacggaagtgcacaaggtgaattctgggacgaaagtgcaagaagaagtcccccagaaggtggaactcctgggggaaaataaattaaagctccattatcatgatgccatcagagagaagctggcggctcgcgaactacccaactgtcgaaaagccttcaagaaagtgttaaagggaaaagacccgcaaaaagcagtgaataagatctacaaggaagttctggataatccagtgagcaattgccatgataaaaaatcttcccgaaaagcaaaatcgaggaaaggccgaaaccacaatacatccgagtcaactaaatggatgcacaggagagctgtcaagagaggaaaatatctaagattccagaaaatgttccacctacagaggggaagacttgcaagaatcatcttggatgatgtagaagctttgcaatgccagataccatctaacacagttcacgcagcgttcaaatccagatgggaaacaacagtagggttcaggagccttgattctttcccgcctcacgggaaagctgataacaccgcttttcaagccctgatcacccggaaggagattgagagaaacatcaaagaaatgagtaaaaggtcagctcctgggccagataagattaccttgggtcatctgctcaaaagagacccaaagttttctttgttgatggagatcttcaacctctggcttgtatctggaaccatccccgacacgctgaggggctgtcgaacagtcctgatcccaaaatccagcgacgccgccaagctcggtgacatcaacaactggaggcccatcaccatttcatctacggtgctgaggctattctccagaattataacagctaggctggccaaagcgtgtcccattaaccccaggcaaaaggggttcattagggcatcgggatgctcagaaaatcttaagctgttacaacttgtgcttaagcatgcaaaacgggagcattgtaacctcggagttgtgtttgtggacattgcaaaagctttcgatacggtctcccaccagcatatcatcacgggtcttgagcaaaggggagtcgatccccatattatccatctcattaaggacatgtacaagaacacaaccacgtacatcacgatgaaaaatgaacagaccgagagaatcaacatcctctccggtgtgaagcaaggcgaccctatgtcacctctgctgttcaacctggctcttgaccccctgctgtgtaagttggagaaggaaggcaaagggtttcaacgaggcaagttaaaagtcacagcaatggccttcgccgacgaccttgtactgctcagtgattcctgggacggtatgtgtgagaacatcaaaattctggagaccttttgcgatcttacgggactccagacacaggggaagaaatgtcatggattttacatcaggccaactaaggactcgtataccatcaatgactgtccgacttggctcataaagggctccccgctgaacatgatcgatccaggaagctctgaaaaatatcttggtgtacaggtcgatccctggactggctttgcagaccctggattatcacagaagttggaaggatggctccgtcgaattggggaagcaccactcaaacccctacaaaagatagatattcttcggtcttataccatcccaagactgatgtatctggccgaccacaccgagagcaaagctggacccttggagtcccttgactcgaatattcggaatgcagtcaaggattggttacatcttccaccgtgcacatgcgatgccatcctatattccagctgtagggatggtggactaggcatcatcaaattggcggcgttgattccgagtgtacaagcaagacggttacatcgcctggcccaaacatctgacagggccttaagagagtttttgaagggagaaaacctgcaagcactgtacgaaaagctatggattagagctggaggtgtgaaggaagccatgccgtcaatttgggagcgtagtacattgatgaccattgtcacgggaaatccagacttatcagaatgggaggtccctgctccaaaaatgcattacccaaaaccatctaattggaggaaaacagaatttaagaagtggaaaaagctggcatcacagggtcatggaattgaggtttttgaggaagacaccatcagtaacaactggcttaagaattacagaggcgtacctcatcgtaagctgatcaccggtctgcaactaagggcgaatgtctaccccactcgagaattcctggccaggggtagggaaggaagttgtgcacgatcttgcagacactgtaacgcggaatacgagtcagctgcccacatcattggaacttgtccgatcactcaggatgccaggattaagcggcacaactccatctgtgacacccttagtgccgaagctaagaaatgtgggtggaccgtattccaggaaccacacataagggatgacaacaatgaattgtttaaacctgacttaatcttcgttaaggacagcaaggcattcgtgttggatgtgactgtacgctacgaacatgacaagcgttctctgaagagagcagctgaggaaaaggtaactaaatatcaacaccttctgccgcaagttcaagacctaaccaacgctgcagatgtcgagtttgtgggctttcccattggggcgcggggaaagtggtaccctaataactctgatgtgttacaggctctcggtctctctaaatcgaggctagggaagactgaaagagccttggcactcagagccctctcctcctctgtagatattgttcacatgtttgcgagcaaagctcgctcagttgtacctgttttatccaataaagttgtcggcccctcccctcctgttggttgcgctggacagtgagaattggtttgggtgggaggggttcatccttcataaccgcgtctggcccatattacaacttctgggccccaaattctgatctgaccataggtggacgggccacctttacttaacccggaagagaaacatataattctttatatgtttattata

SEQ ID NO: 538 - DNA, 4568 bp, Acrocephalus scirpaceus
  source 1..4568: mol_type = genomic DNA
ccaaaggcggctttggtaagtacggttgcaggctgggcacagttaaacatctctagcccaggacagagacgttagagttcaccagcctaacgatctcttgctaaattcggtgaaacaaattcctggtttaagccctctggcttaatacccaaaacccggccccagggtatcaaagagggcaaaagtctggtggattggcaaggggggccactaccagtcccacaacacccccctactttgcaaataacaatgcctcctaatagtgacaatactattcccttaactatggaaaaacttcttccactttcgggaccaccagtacgcctatgtaggcgatcaatcagtactcagacttctatatcggacttttataaaacagatatagtgccaccagacataccacctaaaccccctgaccctgcagaaaacaaaattgattgcttggtaaacttggaattttatagatcggatttttctgctactaactgtgtttatttttctgttaactgggagggattgagtgggtttcctgaggtgtatgaacagcttgcaccacaaacaactgctggggagaagatctgccccacgagagacggtgaagtgcctgtgcttgaggaaggggagaggaatactgagggagaagaggagaggaagactgagggagaaaaggagaaagcagaaacaccgccttctgacccagtgaccacggcatcaccagcacccccagcctcacctataaccagtaataaacagacacctgaagacatcactatggtgactgttccagacaaaaatccaccatgtcctcactgtggtattcgtatgaactgtgtatcggggttaattgaacatctttggggggttcacgggcggaagagggtttgttttcgatgtgctaaatgtgggaaagaaaacaataactgccatagtgttatttgtcacttttctaaatgcaggggaaaggtagaagaatcggctccggccggggagtggatctgtgaggtatgcggcagagatttcacaactaaaataggcttgggacaacacaaaagattggcacacccagctgttaggaatcaggaaagggtcgctgcttcccaccctaaaccaacctccaaccgaggagcccacaaaaaatgctggactgaagaggaagagaaactactgatagaattagaagctcaatttgagggacacaagaatattaataaactaattgcagaacatatcccaaccaaaacagccaaacaaattagtgataaaaggagactgcttcccaaaaaagatgtagtggacttaagtgatacagaaaagggaccatatcaacgcactaggagagctgctgctagaggaaaaacaatggaagagataagttcccaccctgataaggccaacggtcagcaggaaacccccagtaaggggaggggcccccggaccagaagaacagctgcgggagggagaacaaaggacaagataagcccccaccctgataaggacaacggcgagcagatgcctggcaaccagagggaggtgcaattacaagcccattatcaggaaaccatcggagcctggttatcagctgggaaaatcaagaccttctcaggggcattcaagcagttgctagggaaacaggagatacaagtaacggtaaaccaatctacacaggactgtttcagaaacctcgaaccaaagagtaaattaaaaacaattaaccaagagaaaacagataagggaccaacgagacctcctcagaagtggatgaagaaaagagctgttaaaagaggtaattatcttcgcttccaacgtctcttccatcttcacagggggaaactggccaagattattctggatgacgtagaatgtttaacatgtgatatcccacccagtgaaatctactcggtctttaaagccagatgggaaacacctggcaagtttgaaagccttgggaactttaagattactggaaaagctgataacagtgctttcagagacttgattacagcaaaagaaattgagaagaatattcaggaaatgagcaagggctcagctcccggtccagatgggattactctcggagacatcaggaagatggatcccaagtattcccggatcacggagatcttcaatttatggttaacatcaggaaagatcccggacatggtgaggggttgcaggactgttttaattcccaaatcaaccaaaccagagcgcctaaaggacattaacaactggagacccattacaatcggttccagcttgctcagactgttctccaggattttaacagctagaatgaccaaggcatgccccctcaacccaaggcaaaaaggcttcatacaagcagctggctgctctgaaaacctaaagctcctgcaaaccataatttggtcagccaaaagagaacacagacccctgggtgtggtattcgtggacattgctaaggcttttgacaccgtaagccaccagcacattctacatggtctgcagcaaagaggagtggatccccacatcgtcaacctggtgagaaatatgtatgaaaacatctacacacatatcaccaccaagagaacacagacggaccgcatccagatccgagtcggagtaaaacagggtgacccgatgtcaccctttttatttaatctggctatggaccccctgctgtgcgagttggaagagagaggcaaaggacaccatcgtggatcgagttgcattacggcgatggcattcgcggacgatctggtcttattgagtgattcctgggaggacatgaagaagaacatcaagatactagaggacttttgtgagctcaccggcctcaaaacacagggggagaaatgtcacggcttctacatcaagccgacaaaggactcttacacggtcaacgactgcgctgcttggattataaatggcactcccctgaaaatgatccaaccaggtgaatctgagaaatacctgggtctacaaatcgacccctggactggaatagcaaaatcaaacatctctacaaatctcgactcctggcttgaacgaattgatagggctccacttaaacctttacaaaaaattgacttactcaaaacatacaccatccctcgactgacatacctggcagaccattcagacctgaaagcaggcttcctagagactctagaccagaaaattcgcacaacagtcaaagaatggctgcacctaccctcatgcacctgcgatgccatcctgtactctagcaccaaggacggaggtttgggcatcaccaaattggcaaaactgatccctagtgtgcaagctcggagactacacagaatcgcccaatcatcagatgaaaccatgaaaatgtttttagatagggaccaaatggaactaatgcacaagaaactgtggatccaagctggaggggacaaggagaagatacctgaaatttgggaaactaaaccgacaatcgaaccacctacctcacatgatacagacacaacctctgagtgggaggcaccgaccctaaaaagcaaatttcccaagccatgcaattggagaaaggtagaatttagcaaatggacctcattagtgtctcagggccgtgggattgtaaatttcaaaggggaccaaattagtaaccattggataaaatactatagaagcatacctcacaggaagctcctaactgctttacagcttagggccaatgtctaccccactagggaattcctagccaggggtagacaggacaaatgcaccaaaacatgcagacactgcgaggcggacaacgagtcctgtgcccacatcatcggtaactgccccataactcaggatgcaagaatcaagagacacaactacatctgcggagtgctgtcggaagaggcgaggaagttggactggctagtgtttcaagaaccgcacataagggacaccaacaaggacctatacaaacctgacctgatatttgtgaaggacacccgggcactcgtcgtagatgtgactgtgcgatacgaatcggacaagacctcgttagagcacgcagcggcagagaaggtggacaaatacaaacatttgactaaagaggtacaaagactcaccaacgcaaaggacattacatttataggttttcccattggggcacgggggaagtggtaccataaaaactttgaactgctagaaactcttggactttccaaacatgatcaaatacagactgctcgatctttatcctgcacagctctcatgtcatctgtggacattgttcatatttttgctagcaaagctaggacatgcactatattgtaacagtttttttttttggttttatttatcatttcttgtaaatacttctgtaatttttcatatgtacattcttttctcaataaaatcagacgggagctggggacgcagggcagccacaagccagaggtagcaagccagaaggagatggatagtaagtggggacgggacctattatttcataacgcgtcaattaccatctgatttggaccaattcaccggatttgtccgaggtggacgggccacctttacttaacccggaaaaggaacatatatatttatatgtgttcgaaaaa

SEQ ID NO: 539 - DNA, 4828 bp, Agelaius tricolor
  source 1..4828: mol_type = genomic DNA
ggcggcttttgagagtatagttgcaaactgggcttcgttgcagagatcgcacctcctcgtggtcccgctggtagccctgcgtagggtgaccaagtcgatctctgccccaggtacggaaccgttggggctcaccagtccaacggattcctaccaaattcggtgaaacaaattcctcggtaaaagccgcatggcttattgcctgaaacctggccccccggtttcagacaggggcatggagttcggaaatggactgaccacccattccgttctcaccgtcgaatgtggtcccaattcgatggttattccggatccgtcctttggggggggggtctgggggccgccggtacgcctgtccagggtatcggtgggcactcagacttccccctccgactgggtagacctgttgtccaggggtttacccggcgccaggtctaactcccagcgggtagacctggtgtctttatttcccagacaccgggtagacctgttgtccaaaactcagcgggtagacctgttgtctgaaagtcagcgggtagacctgttgtccaaaagacagcgggtagacctgttgtctgacagtcagcgggtagacctgttgtccaaaactcaccgggtagacctgttgtctaaaactgaccgggtagacctggtgtcccaaattgacttaacatctaaaaccaccaatttggcagaaaatgaattggatttgctggtgaatttttctttagagctgtatagatcggacttgcatgtgcatgagggtgttcatttttctgtggattgggaagtgttgaacaggttgcccgaggtgtatgaagaacttgcaccacaaccgtgtgtgggggagaacttagactcgagccccccacaagacagcgaaccgcttgtgcttggtgagggaagcggcgggaaggcgggagaaggcacaccagaggcattgcccccagtgcctggggaaaacggagggcagtcaccggataacatcgtgaaggtgactgttcctgacaaaaatccaccttgtccttgctgtggtacccgggtaaactctgtggtaagcctgcttgaacatcttaaggggtcacacgggaaaaagagggttcgctttcggtgtgccaaatgtggaaaagaaaatgttaactatcatagtgttatttgtcattttccaaaatgcaagggtgcagaaattgaaaaggttccagctggagagtggatctgtgaggtatgcggcagagatttcacaaccaaaattggcctgggacaacacaaaagattggcgcacccgttgataagaaaccaagaaaggatcgttgcttcccaaccgaaagaaacatcaaaccgaggagcccacaaaaggtgctggacaaaagaagaggaagaactgctgataaaattggaggcgcagtttgagggaaacaaaaacatcaataaacttattgccgaacacataacgaccaaaacggcaaagcagattagcgataaaagaagattgctgcccaaaaaattgccagaggtaacggacaaggaacctggggtgtgtcttcgcaccaggagagcggccgggagcgtgggaacggaacctgggacgagtcaacagtcccaggcgggaatattggacaatggacctgggaaatgccacctgccagggaggccggctgccggagagaaaacaatggagaagttgagacgacaccctgataaggataacggtcgccagaagaccagcggccagcggagggaggggctgctgcaggctcattatcaaaagacgatcaaagaaggcttatcagctggagcaattaacaacttccccggagcattcaagcaattaatggacggccgggaaatgagaacaatgatcaatcaaacagcgcaggactgctttggatgcctggaatcgataagccagataagaactgctatgcgtgggaaaaattccgggaagaaggcaactatggagcaaccagcaagaaaattccagaagtggatgaaagatagggcgatcaaaaaaggtaatttccttcgcttccagcgtttatttcatctcgacagggggaaactagcgaaaattattttggatgacatcgaatgcttgtcctgtgatatatcacccagtgaaatttattcggtctttaaagccagatgggaaacacctggtaattttgccggccttggggactttaaaattactgggaaggcagacaacaatgccttcaaggacttaatcacggccaaagaaattgaacgaaatgtgcaggaaatgagcaagggctcagctccaggtccggatgggattactcttggggacatcgtaaagatggatcccgggtattcccggactgctgagctcttcaacttatggttaacatctggggagatcccggacatggtgagggggtgcagatctgttctgattccgaagtcgacaaaaccggaaagattaaaggacatcaataactggagacccatcacgatcggttccatcttgctgaggctgttctccaggattgtaacagcaaggctaagcaaagcgtgccccctcaacccaaggcaaagaggctttattagagcggcaggttgctctgaaaacctgaaactcctgcaaactataattcggactgccaaaagtgaacacaaaccactgggtgttgtattcgtggacattgctaaggcttttgacaccgtaagccaccaacacatcctacacgctttacagcagaggggagtggatccccacatcattggactggtgaacaatatgtacaaggacatcagtacgtatgttaccacaaaaagagacacacacacagacaaaatccagatccgggttggagtaaagcaaggtgacccgctgtcaccccttttatttaacctggcaatggaccccctgttgtgcaagctggaagagagcggtaaaggatttcatcgaggagagagcagtataacagcaatggcgttcgctgatgatttggtcttgctgagcgactcctgggaaaacatgcaaacaaacatcaagatattagagaccttttgcgatctcaccggtctcaaaacacaaggggaaaagtgccacggcttctacataaagcccacaaaggactcttacaccattaataactgcgctgcatggaccatcaatggcacacccctgaacatgattaatcccggagaatctgagaaatacctcggtctgcagtttgacccctggactgggctagcaaaaaccaacctcaccacaaaattagaattctggcttgaacgaattgatcaagctccacttaaacctctgcaaaaactcgacatcctcaaaacttacaccatccctcgactgacctacctggctgaccattcagaaattaaagcaggggctctggaagctctcgaccagaagatcagaacagcggtcaaggactggctgcacctacctccgtgcacctgcgatgccatcctgtactcgagcacgaaggacggcggtttgggcgtcaccaaattggcgggactgatccccagtgtacaggcccgaagactgcaccggatagcgcagtcctcggatgagacaatgaaggagttcctggagaaagatcaaatggaacaattatatagaaaactgtgggttcaagctggaggggaaagagaagagataccctcaatttgggaggcactaccgacaagtgaacaatctaatagaggagacacaacctcggagtgggaagcaccgatcctgaaacctaaattccctaaaccttgtgattggaggaagaaagaattcgagaagtggaccaaattagtatcccaaggccgcggtattagtagctttaaaaatgactcgattagtaacgattggctccaatattatagacgcatacctcacaggaaactcatcactgcactacaactcagggctaacgtctaccccacgagagaatttctctcccggggtagagaggaaaattccaccaaggcctgtaggcactgcaacgtggaaaatgaaacttgcgcccacatcatcggccaatgcccagtgacgaaggacgccagaatcaagaggcacaatcacatctgtgacatgcttagtgaggaggcgaggaagaaggactgggtagtgttcaaagaaccgtacataagggataccaccaaggaactgtacaaaccagatctgatatttgtcaaagacggacatgccttcgtcgtggatgtgacagtacggtatgaaaccaccacaacatctctggaagaagccgctgcagagaaagtaaacaagtacaagcatttagaaaccgaggtgcgaaacctcaccaacgcaaaggacgttgtttttatgggttttccccttggagcgcgggggaaatggtacacagggaattttgaacttttgaatacgctcggcctctccaaatcgaggcaagtgagggttgcaaagactctatccacggtagcgctcctgtcatctgtggacattgtacatatgttcgccagtagggccagaagggtacaggattcagggtaatgaatttagattgtactgtttgtagatttttgtaggactgtttttatatattgttttcttgtatgtaacttttgtaatttttattacttgtactttattttataaataaactagacggtagctaggttcgtagggcagccacaagccagttaggtagctcatagtaggtagggacagagactttaattctaaacgcgtcaagtaccacctgatttggactgaattaccggacctgaaccaatttaccggatatgtccaaggtggacgggccacctttacttaacccggaaaaggagcatatattatttatatgtgttcgaaata

SEQ ID NO: 540 - DNA, 4581 bp, Ammodramus caudacutus
  source 1..4581: mol_type = genomic DNA
ggcgacttaagaaggtctcgttacaactgggcatagctgcagagatcgcgcctcctcgtggccccgctggtaagcccttaacagggtgactaagtcgatctctgccccagtccaggagccgctgggactcaccagcccagcgattccttccaaattcggtgaaacaaatttctcggtgtaagtcgcaagacttattacctgaaacatggccccacggtctgacgggggcaccgggtcgggaagtgggctgaccacccaccccgcacctgagagtgaatctggtcatgactcaactgtcccaaatcctggtccagtccttgcagcgggggacggtgctcgaccggtacttttggtatcagtgggcacccaaacctgcaaagaggactttataacatctagaccaaccaaattgataggaaatgaatcagaattaggcttgctggtgaatttttcattagaggtgtatagatcagatctgaaaggggatgtgcaatttgagggggttcattttccagataattggggggtactggacgggtttcctgaggtgtatgaacaacttgcaccacaaacaggcgagggagacgggttaaaacctagtctccagggggacagtgagggagatgtacttgagaaaggtagcagcgagaaggggagggagaaggagaaggaaaaggaggaggagaaggagaaggaggttacaccagaggcattacccccaaagcggaaggcccacagcgaacagtcacaggataacatcgtaaaagtgactgttcctgacaaaaatccaccctgtccttgctgtggtgtccggttgaactcggttttggccctgattgaacatctcaagggccacgggaagaggagggtatgctttaggtgtgccaaatgtgggagggagaattttaaccatcatagtactgtttgtcatttcgcgaagtgtaaaggtccacagactgaaaggccaccagtgggagagtggatctgtgaggtatgcggaagggatttcacgaccaaaattggcctgggacaacacaaaagacatatgcatgcaatggagagaaatcaggaaaggatcgatgcttcccaaccgaaagaaacgtcaaaccgaggagcccacaagaggtgctggacgaaggaagaggaggaactactcatgaaattggaggtacagtttgaaagtcacaaaaacattaataaactcattgcggaacacttaacaactaaaacagctaaacaaattagtgataaaaggagaatgctgctcaagaaagggagggtgacagctggaaatttagattcggagcctgggatgaatcatcaacctcaggcagaagtcaaggacaatgaacttggggggtgtcatctgcccggggggccagctgttgataaagggacaatagggaaattaggacaacatcttgaatcgggtaacggtcaccaggaaactgctggccaaaagaaggagaggggactgcaggcccgttatagaaggagaattatgaagcgattagcggccgggacaattaacatcttccccaaagtatttaaagaactgctgaactgccaggaggcgagaccgctaatcaaccaaacaacagaggaatgctttggcctcctggactctgcatgccaaattagaacggcactccgggacaagggcagggcacaggaggagcgaccaaggaaacagtatcagaagtggatgaaagaaagagcgattaaaagaggtaactacctccgcttccagcgattattccatctagacagggggaaattggcaagaattattttggacaacactgagagcttgtcctgcgaaataccacccagtgaaatctattcggtattcaaggccagatgggaaacacctggacagtttaacggccttggggactttgaaattaaagggaaggccaacaataaagccttcagggacttaatcacggcaaaagaaattgaaaagaacgtgcgggaaatgagtaagggttcagcgccaggtccagatgggattgcccttggggacatcagaaagatggatcccgggtattcccggaccgccgaactcttcaacttgtggctgacatctggtgacatcccggacatggtgagggggtgcagaactgttttgatcccgaaatcgacaacaccggagcgcctgaaggacatcaataactggagacccatcacgattggttccatcttgctgaggctgttctccaggatcataacggcgaggatgactaaggcgtgccccctcaacccgagacagagaggcttcatcagtgcgccgggatgctctgagaacctgaaactcctgcaatctataattcggactgccaaaagtgaacacaggccactgggtgttattttcgtggacattgccaaggcttttgacaccgtaagccaccaacacatcatacatgttttacagcaacggagggttgacccccacattgtaggactggtgaacaatatgtacaacgacatcagtacacgtatcaccacgaagaaggacgcacatacagacaaaatccagatccgggttggagtgaagcagggtgatccactgtcaccccttctattcaacctggcaatggaccccctgctgtgcaagctggaagaaagtggcaaaggattccatcgaggacagagttcaataactgcgatggcattcgctgacgacctggttctgttgagcgactcctgggagaacatgaaagagaacatcagaatactggagaccttctgcgatctcaccggtctcaagacacaggggcagaagtgccacggcttctacatcaagcccacaaaagactcttacaccgtcaataactgccctgcgtggaccatcaatggcacacccctgaacatgatcaaccccggggagtcagagaagtacctcggcctgcagatcgacccatggactggaatagcaaagtacgatctctccacaaaactgaaagcctggctcgaaagcatcgaccgggctccactcaaacctctgcaaaaactcgacatcctcaaaacatacaccattcctcgactgacctacctggctgaccattcggagatgaaggcaggggctttggaagcacttgaccaacagattcggacggcggtcaaggactggctgcacttaccctcgtgcacctgtgatgccatcttgtacgtaagcacgagggacggcgggttgggtgtcactaaattggcgggtctcattcccagtatacaagcccggaggctgcaccgcattgcgcagtcaccggaccagacgatgaaggacttcttagagaaggcccagatggagaaaatgtatgagaagttatggattcaagctggaggtaaaaagaaggggatgccgtcaatttgggaagccccgccggcgaccgtaccacctgtcaatgcaggcacactttcggagtgggaagcaccgaaccctaaaagtaggtacccaaaaccttgtgattggaggagaaaagaacttaaaaagtggacgaaattagagtcccaaggtcgtggagttaaaaattttaggaacgatagtattagtaacgattggattcaatgttatagacgcatacctcacaggaagctcctcactgctatacaactcagggccaatgtgtatcccacgagggaattcctcgggcgggggaggggagatgactgtgttaagttttgcagacactgcgagatggaccttgaatcctgtggccacatcatcggcttttgcccagtaacgaaggacgcccggatcaagaggcacaatcgcatttgcgacaggctctgtgacgaggcgatcaagagagactgggtggtgttcaaggaaccgcacttgaaggatgccaccagggaactgttcaaaccggacctgatatttgtgaaggagggccgtgcactggttgtggatgtgacagtacggtacgaagcagcaaagacaacgctggaggcagctgctgcggagaaagttgacaagtacaaacatttggagcccgaagtgaagagcctcaccaacgctacggacgttgtttttatggggttcccccttggagcgcgggggaagttttacaaagggaactttgatttgcttgagactcttggcctcccaaaaacgaggcagataagtgtggcaaagactctgtccacgtacgcgctcacgtcatctgtggacattgtgcacatgtttgttagtaaggctagaaaatctaatgtctaggtagtcactctgcactttctgtaacttgcaccggggtgtgggacgtgggtgtgggatgtgggttgtgggtgtttttaataggggggggtgatttctttgtagaattgtctatttattgtatgcctatctttttaataaaaagacggtagctatgttcgcaaagcagccacaagccactagccagttaggtagcttcatagtgggtaggtgacaggaacttttgactcagaacgcgtcctttaacatctattatggaccactttaaccggacatgcaccgattaaccggatttgtccaaggtggacgggccacctttacttaacccggaaagggaacatatattattatatgtgttcgaaaaa

SEQ ID NO: 541 - DNA, 4580 bp, Ammospiza nelsoni
  source 1..4580: mol_type = genomic DNA
ggcgacttaagaaggtctcgttacaactgggcatagctgcagagatcgcgcctcctcgtggccccgctggtaagcccttaacagggtgactaagtcgatctctgccccagtccaggagccgctgggactcaccagcccagcgattccttccaaattcggtgaaacaaatttctcggtgtaagtcgcaagacttattacctgaaacatggccccacggtctgacgggggcaccgggtcgggaagtgggctgaccacccaccccgcacctgagagtgaatctggtcatgactcaactgtcccaaatcctggtccagtccttgcagcgggggacggtgctcgaccggtacttttggtatcagtgggcacccaaacctgcaaagaggactttataacatctagaccaaccaaattgataggaaatgaatcagaattaggcttgctggtgaatttttcattagaggtgtatagatcagatctgaaaggggatgtgcaatttgagggggttcattttccagataattggggggtactggacgggtttcctgaggtgtatgaacaacttgcaccacaaacaggagagggagacgggttaaaacctagtctccagggggacagtgagggagatgtacttgagaaaggtagcagcgagaaggggaaggagaaggagaaggaaaaggagggggagaaggagaaggaggttacaccagaggcattacccccaaagcggaaggcccacagcgagcagtcacaggataacatcgtaaaagtgactgttcctgacaaaaatccaccctgtccttgctgtggtgtccggttgaactcggttttggccctgattgaacatctcaagggccacgggaagaggagggtatgctttaggtgtgccaaatgtgggagggagaattttaaccatcatagtactgtttgtcatttcgcgaagtgtaaaggtccacagactgaaaggccaccagtgggagagtggatctgtgaggtatgcggaagggatttcacgaccaaaattggcctgggacaacacaaaagacatatgcatgcaatggagagaaatcaggaaaggatcgatgcttcccaaccgaaagaaacgtcaaaccgaggagcccacaagaggtgctggacgaaggaagaggaggaactactcatgaaattggaggtacagtttgaaagtcacaaaaacattaataaactcattgcggaacacttaacaactaaaacagctaaacaaattagtgataaaaggagaatgctgctcaagaaagggagggtgacagctggaaatttagattcggagcctgggatgaatcatcaacctcaggcagaagtcaaggacaatgaacttggggggtgtcatctgcccggggggccagctgttgataaagggacaatagggaaattaggacaacatcttgaatcgggtaacggtcaccaggaaactgctggtcaaaagaaggagaggggactgcaggcccgttatagaaggagaattatgaagcgattagcggccgggacaattaacatcttccccaaagtatttaaagaactgctgaactgccaggaggcgagaccgctaatcaaccaaacaacagaggaatgctttggcctcctggactctgcatgccaaattagaacggcactccgggacaagggcagggcacaggaggagcgaccaaggaaacagtatcagaagtggatgaaagaaagagcgattaaaagaggtaactacctccgcttccagcgattattccatctagacagggggaaattggcaagaattattttggacaacactgagagcttgtcctgcgaaataccacccagtgaaatctattcggtattcaaggccagatgggaaacacctggacagtttaacggccttggggactttgaaattaaagggaaggccaacaataaagccttcagggacttaatcacggcaaaagaaattgaaaagaacgtgcgggaaatgagtaagggttcagcgccaggtccagatgggattgcccttggggacatcagaaagatggatcccgggtattcccggaccgccgaactcttcaacttgtggctgacatctggtgacatcccggacatggtgagggggtgcagaactgttttgatcccgaaatcgacaacaccggagcgcctgaaggacatcaataactggagacccatcacgattggttccatcttgctgaggctgttctccaggatcataacggcgaggatgactaaggcgtgccccctcaacccgagacagagaggcttcatcagtgcgccgggatgctctgagaacctgaaactcctgcaatctataattcggactgccaaaagtgaacacaggccactgggtgttattttcgtggacattgccaaggcttttgacaccgtaagccaccaacacatcatacatgttttacagcaacggagggttgacccccacattgtaggactggtgaacaatatgtacaacgacatcagtacacgtatcaccacgaagaaggacacacacacagacaaaatccagatccgggttggagtgaagcagggtgatccactgtcaccccttctattcaacctggcaatggaccccctgctgtgcaagctggaagaaagtggcaaaggattccatcgaggacagagttcaataaccgcgatggcattcgctgacgacctggttctgttgagcgactcctgggagaacatgaaagagaacatcagaatactggagaccttctgcgatctcaccggtctcaagacacaggggcagaaatgccacggcttctacatcaagcccacaaaagactcttacaccgtcaataactgccctgcgtggaccatcaatggcacacccctgaacatgatcaaccccggggagtcagagaagtacctcggcctgcagatcgacccatggactggaatagcaaagtacgatctctccacaaaactgaaagcctggctcgaaagcatcgatcgggctccactcaaacctctgcaaaaactcgacatcctcaaaacatacactattcctcgactgacctacctggctgaccattcggagatgaaggcaggggctttggaagcacttgaccaacagattcggacggcggtcaaggactggctgcacttaccctcgtgcacctgtgatgccatcttgtacgtaagcacgagggacggcgggttgggtgtcactaaattggcgggtctcattcccagtgtacaagcccggaggctgcaccgcattgcgcagtcaccggaccagacgatgaaggacttcttagagaaggcccagatggagaaaatgtatgagaagttatggattcaagctggaggtaaaaagaaggggatgccgtcaatttgggaagccccgccggcgactgtaccacctgtcaatgcaggcacactttcggagtgggaagcaccgaaccctaaaagtaggtacccaaaaccttgtgattggaggagaaaagaacttaaaaagtggacgaaattagagtcccaaggtcgtggagttaaaaattttaggaacgatactattagtaacgattggattcaatgttatagacgcatacctcacaggaagctcctcactgctatacaactcagggccaatgtgtatcccacgagggaattcctcgggcgggggaggggagatgactgtgttaagttttgcagacactgcgagatggaccttgaatcctgtggccacatcatcggcttttgcccagtaacgaaggacgcccggatcaagaggcacaatcgcatctgcgacaggctctgtgacgaggcgatcaagagagactgggtggtgttcaaggaaccgcacttgaaggatgccaccagggaactgttcaaaccggacctgatatttgtgaaggagggccgagcactggttgtggatgtgacagtacggtacgaagcagcaaagacaacgctggaggcagctgctgcggagaaagttgacaagtacaaacatttggagcccgaagtgaagagcctcaccaacgctacggacgttgtttttatggggttcccccttggagcgcgggggaagttttacaaagggaactttgatttgcttgagactcttggcctcccaaaaacgaggcagataagtgtggcaaagactctgtccacgtacgcgctcacgtcatctgtggacattgtgcacatgtttgttagtaaggctagaaaatctaatgtctaggtagtcactctgcactttctgtaacttgcaccggggtgtgggatgtgggtgtgggatgtgggttgtgggtgtttttataggggggggtgatttctttgtagaattgtctatttattgtatgcctatctttttaataaaaagacggtagctatgttcgcaaagcagccacaagccactagccagttaggtagcttcatagtgggtaggtgacaggaacttttgactcagaacgcgtcctttaacatctattatggaccactttaaccggacatgcaccgattaaccggatttgtccaaggtggacgggccacctttacttaacccggaaagggaacatatattattatatgtgttcgaaaaa

SEQ ID NO: 542 - DNA, 3861 bp, Aquila africana
  source 1..3861: mol_type = genomic DNA
ggacatagttacatggtctggacgcctcctcgtggcgaccgctggataggggtgagagtgctcaccctgaactaagatccagaccaccctctgcattggcagattgccgtgcagaatttattgctgattatgttgaaatcacatgattcgtgtcttgatccctctggaatgcaagacgacagcaataacgacattcatacaggtggcagacatgagattccagcagttccctttgtgtgtacttgtggcatgcagttcgggacacaacggagtttgagtatgcatcgtttccatcgccaccaagacgaactgaatgctgagcgggttgcggcgttaccaaccaggaagttggtttggtcccgggaagaagacttggctttgataagacaggcggagacgctttggcaagaggttatgcttaagaaagatctgtaccagcgtctgctgcctctttttcctgggcgatcagtggaggccctgaaaaaacgcctccaaattcttaaatggaggcctgttgacaacagaggctcagggcaaacaacggctgctgttccaccgacttccgttgacgtgccaaatttgcctcctggggcacctattgttgggatgccggatgcgattccatcttttcgcacagtaacagccccagctcgcttgtggtcgatggaagaagatgacatcttacggaagaatgcggatgctttccatgggtctgcgaagacaaagaaagaacttggtcaacgcctgatgttgtatttaccaggtcgaagcgcagatgccatcttgaaacgtttacgaaccatcaaatgggctccgcccaagttaacatcgaaggttccaactccgcttacaactcttactgcgtctgaaacatcgacctcttccgtgatgcatacttcgttgtctgtagcatctttggccacaggagccccgatactggatgggaaaatgatgacagttccggtgacatccgaggtggctcttggaatttctcgctctcctgctagagcagccgcggattttgcttcccaagcaacgccctacgatccagttgttttaccaattgactcttcaccgaggcggaatggagtgatgaagtcagctagcagtgaggccaccgagatagatttatctttacaactattatggagagacagattgctgcgtttagtgattaacaccttgcgtgagcagaggttggggagcgatgagctacgaattattgctcaagatctactatcgggagaaaccagtttgcaacaggcgggtattctcctacaagggcatgcccaacggtggtttccccacaagtggcggccctctgtggttcgtacaccacctttgattaagagttggagcaagaacaaaatcaggcgctccaactacgcgataattcagcgcctgtacgcgacccgacctaaagacgcagcttcaactgtcttctctggtaactggcgcgatgcgtatcgcggctctgcccatctcccatcggagatggacagttattggtcttccatctttgagaccccgagttcgacggatgatcggatatctttccctttgtctgaacttcagtggtccttgatggaaccaattgcgccatctgaagtcaccgcagctcttcgtgggatgggttctactgctccagggcttgacaggatctcagctgtggatttattatcctggcatcaaccgtccgtagcagcttatttcaacctgctactggccaccgagagtcctcctcaacatctggcatgctctcgggttacgttcctgcctaagacaagtaatcccactctacctggagactacagacccatctcggtagcttcggtgttacttcgcgcatttcataagatcatggcacttcgcctccaggactccgtgaatatttcaccattacaacatgcctttcaacaaagggatggctgcctggaggctacgacgttgttacattctatttttcgtctcatccatacaaagcaagtgccatgcgcgatggtgtttttggacgtttcaaaggccttcgatactgtatcgcatcagacgctgtttcgtgtggccgccgatgctggtcttcctcctcccttgatttcgtaccttcgtaatctgtacggatcagccacggtgaagatgacgaacagatttgtgcactgtgggcgtggtgtgcgtcagggtgatcctttatcaccaatacttttcctgttggtcattgatgagattttgaagtcttgccttcctcaagtagggtttgacttcgatggccatctgatcggtagcctggcatatgccgatgacttagtgttattggctcgaacacctgccaggctgcaggagaagcttgattgccttaatgacgcccttcgcagagcaggaatgtctctcaacgttaagaaatcttttggcatgaccattgcgaaagccgggaagcaaaagcatatggtccttcttccgaaaccctatatagtctcttccgattctatctatccattggggcccacagagactgttaactatttggggctccaatttaattggaaggggcgggtttcggtaaagcataccggcaagttggagagactgctctgtgagttgacccaggctcctctcaagccttatcagaggcttgacctgcttaagaggttcctggtccctaagcttacttatgaacttgttttaggaaccgcccacaggaacactcttcttaaactggaccgtctgattcgttcgtccatcagatgctggctacggctgcccccggataccccgaccgcctacttttacgccccgataaagagcgggggaatgggtgtcccatgcttcggaacatctattcctcttctccaacgagctcgccttgccaagttggcggagaattccggccaactttataagaccttacttattcaatcttttttccgctctctgcagcagcgagtagagaaaccgtgcaggctgaactcggttgttgtttcatctaagatcgaagtgaagggcgagtggacgactttgctgcatcagtccgtggacggccgagagttgggagcggccgggatcgatccagccagccatgggtggttgctgcaaccctccggtgtgtttccccgattatatctacgggggctgcaacttcggggtggtttgctatctacgaaatcgaggaatgcccgtggcgtctgcaggcaggtgacagacaagagctgcaagggatcctgcaggatggtggaaaccattaaccacatcttgcaggtatgtgagattacccacgatgcgaggtgtgcccgtcacaaccgtgttgtacagctgcttgagaagtccctacggctccactgtgttcgaacttgggtggagcctattattccgtctgtgtcatcgtttctgaagccggacctgattcttgagaccaatgacaacttttgggtcctggatgtttcggtggtctctggccatcgactacagacgacgtgggacctcaagactgctaagtacgggagcccggatcgtgtcgctgatattgccgtttggactgacaagccttttccaatacatcagcttccagtcatcatttccaaccggggacttattttaaaggcttcttctgctggactgcgcactttgggcttgagccgcagggacattatggacctctgtttattggccatacgcggctcgctcaagtgctatgacatgtacatgcgggggacatggactggttgtaaatgatttaatgtgtctcatgtactgcttacttgtaatgtctattagcgactttgttcgccttagggagtctgtgtgcggggtggggggcccttgatgggattcctattcttgtatgctgactgtctaaaaataaatgtttcc

SEQ ID NO: 543 - DNA, 3392 bp, Buteo platypterus
  source 1..3392: mol_type = genomic DNA
aagatcatagttgcatgacttggacgcctccgcgtggcgaccgctggatatgatactacggtatcagaactaagatccaagtcacccctctgccctactaacggaaggcagagggattgttactggtttgaatatgcatatatttttcagtcctggtccccctggactttcggactccagtgacagagatgggaacgccaatagtaccggcacccagagcgaagcaaacaaccccagcttcccatgcttctgtggggcacaatttaaaaccaagaggggcctcggcaagcaccaatcctatcgccatccggcacaggtgaacgccgaacgagtaaaagccctgcccacgaagcgcctaacatggagccatgaggacgatgaggccctgcgacggctagctaacaatatctggaaggatgggatgatgaagaaggtgcttatcaccaacctcacaccctacttccccggccgttcgcatgaagcgattaagaaacgcctccaagtgattacatggtctccagaaagagcggaacaccccactgtgcgtgaaaccccagacacaaacccggttgagcgtgataccccaggaaccacagatccggttacccatggaccggaccccagtgcctcatggagagatgccctcctgagagctgcggcagaacatctcacagaaagcaacatgggggcggaggagctgacccagattgcccgagacttgcagaacggagtgagtcgcaagcgaattagaacgcgactgaatcagcacgcggaaaagtacttcccgcacaagtggaagccgtcggtcatccgaccaaagaaaactattgctagcagcaaaaaagccatccgtagagcgaactatgccaccgttcaaaagctctacaagctgcggcaacgcgatgctgcctccactgtactgtccggacgctggagaagcgcgtacaaagggccagcgccgatcccacaagggatggaagaatactggcggtcagtattcgaaacaccgagcgcagcggataatagcgtacctgtagtcccttctacagtcctgtggtcactcatggaaccgattgccccgtcggaggttacagcagcactccacggtatgaaagccagtgctccgggactggacagaatatcggcggaggagctactaacctgggaccagccttcactagcagcatactacaatgtgttgttagctgtgggtggcccgccgaagcacatctcttgttcaagagtagtgtttcttcccaagacggaggacccttcggccccaggtgactacaggcctatttccattgcctcaaccatcctgcgtgcaatgcataagatcctcgcctggcgcctacgagatacgcttcagctctctcccctccagcatgctttcctccaaagagatggctgcctcgaggcttcgaccttgctgcatactatcttccgcggggtccacacagatagagttccatgtgcgatgctgtttttagacgttgccaaagcgtttgatacggtgtcacatatgagtctcttccgtgtggcccgcgaggcaggtctacctcgtccgatggtgtcatacctacgacacctataccaggaatccacaatccagcttgcagaggccaccacccagtgtggccggggtgttcgacaaggcgacccattatccccactcctgtttataatggtcatggatgacatcataaaatcgtcgctccctgacatcgggttcgacttaaatggccagaaaatcggcagtctagcgtatgcggatgacctcgtgctcttagctggcaatcccagcaggcttcaggagaaactaaatctactctctgaaggcctccagcgagccggtatggcactcaacgctaagaaatcccacggcatcaccatcgccagggatggaaagcgcaagtgcatggccctagtcccagaagcatataagtgtaagggggataacatccaacccctagggactgatgactcagttaaatacctgggcctccagtttaactggaaagggcgaataacacccaaacataccggcaagctggcaaccatgctaaatgagctgaccaaggcaccccttaagccgcaccagcgacttaagcttttaaaaatccatctggtgcccaaattaacacacgaattggtcttaggtcatgcccatcgaaacaccctgaaaaagctagactgcctaacacgtgctgcggtgcggcgatggcttcggcttccaccagacacaccggtgggatacttccacgcgaatgtcaaagacggtggcttggggatgccgtgtttctccacttctatcccactcctgcaacaaaagaggctcgagaagatagccctgagccctgcatccctgttccaggaggtgcagagacaggactccttccgaaccttagggcgccgcattgaaaggccatgcagactgaatggcctggaggtggcaaccaaggcagaagtgagagaagggtggaggatcgcgctctccagctccgtggatggcagagagctgagtatcccgaaggtagataaagccagccacgagtggctacgcaatcctgctcgggtgttccctcgactctacatcaggggcatccagctgcgatgtgggctactccccaccaaagccaggagtgcgcggggaaacaacaggcaagttaccgacagaacttgcaggggagcctgtcgtgccccagaaaccctaaaccatgtgctgcaagtgtgcgaggtgacgcacgatgccaggtgcgcacgccacaaccgagtgctgcggtccctcgagaagctgctgagccgtgcgggtatccagacgagagtggagccgatcatcccatcgggcgcctccttcatcaagccggacctgatcgcagagatggagaaccagctgtgggtcctcgacgtctccgtggtcgccggctaccgattggaggaatcctgggagatcaagtctgctaagtatggacgtcccgaccgagtcgcagatattcgacgctgggctgcagtaccggacaccacccccgttttccagttaccggtcatcatttccaacagagggctgttctacgaaccatcgggcaagaaacttcgggctttgggtttgagctgccgggacattatggacctatgtgttttggccattggcggctcgctcaagtgctacgattggtacactcgtggaacaaaagactggaaatgttgatttgctttgctttgtattgtctgtatgacgttgacgttgttgtctaatagcgggcgaccgccttgaaaggggaggcgggcggggaaggtacaaatatatgtatatatgtgtaagttttgacatccctatacattgctgtaacctgtaactgtcttgttttgccttttcaaaaataaaatgtgac

SEQ ID NO: 544 - DNA, 4728 bp, Chamaetylas choloensis
  source 1..4728: mol_type = genomic DNA
ggcggcttttgagagtatagttacaaactgggcatcgctgcagagatcgcacctcctcgtggtcccgctggtaaccctgcgtagggtaactaagtcgatcttctgccccaggatggagccgttgggaatcgccagttcaacggtctcctgccaaaaattcggtgaaacaaattcctcggtaaaaagccgcgtggcttcattgcccgaaacctggccccccggtttcaaaggggcaatgtctccggtaagtggactgaccacccactaccgttccaccttccaaggtgggcccattccgatgggttctggctctgatttgggggggggggtctggtttagagcgccggcacgcctgtccagggtgtcggtgggctcccagacctcccccagcgactgggtagacctgttgtcctggaattttaattttttaccaggctccaagtctaattcccagcgggttgacctgttgtctaggcactgggttgacctgttgtccaaaaatgaccaggtagacctggtggctcaaaatttaccatccaaattgtcccccgattcggcagaaaatgaattggctttgctggtgaacttagagttttacaggtcggatttgcatgagcatgagggtgttcatttttctgctaattgggagggtttgagcgggttgcctgaggtgtatgaacagctagcaccacaaccgtgtgcgggagatagttcacattctagtctcccgcgggacactaaactgtttgtgcttgagcaaaagggcagcgtggagaaggagagcgaggacgtgccaaaaacatcccctccgacgcctgggaagcccggggagcggacacctgaggagacggtgacggtgactgttcccgacaaaaatccaccttgtccttgctgtggtacccggctgaactctgtgttgggcctaattgaacatctaaaggggtcgcacgggaaaaagagggtttgttttcggtgtgttaaatgtggaaaggaaggtactaactatcacagtattgtttgtcactttcccaaatgcaggggtgcagagactgaagcggctccagctggggagtggatctgtgaggtatgcggacgagattttcaaactaaaattggcctgggacaacataaaagacatgcacacccgttgataagaaaccaagagaggatcgctgcttcccacccgaaagaaacatctaaccgaggagctcacaaaagatgctggacaaaggaggaggaggagatgctgataaagttagaggcgcagttcgagggccacaaaaacatcaataaactcatcgcggaacacatcacaagcaaaacagctaagcagataagcgacaaaaggagattgctgcccaggaaaccagataaggaccttgaagaggaacctgctgtgagtactcgcaccaggagagcagctgcgggcctgagaaaggaacctggggtgagtcatcaaagccaggctacgatcgaggacaatggacctgggcggagccaccggccagggaagccagctgccggaaagaaaacaatggacgagataagccaccgccctgataagggtaacggccggaggggaaccatcaagcagcagatggctgggcaactgcaggcccattatcaccggacactcggggaaaggctatcagctggggcaattaacaccttcccccgggcattcaagcagttaatggaaggccaggagatgcaagaaaccatcaaccaatcagcgcaggactgcttcggatgcctggaatcgataagccagataagaacagcaacccgagataagatcaacaaagggacccgggagaagcaaccaaagagaccttttcaaaagtggatgaaggacagagcaattaggaagggtgattaccttcgcttccagcgattattccatcttgacagggggaaacttgcaaaaattattttggacgatgttgagactttgtcctgtgatattccacccagtgaaatttattcggtttttaaagatagatgggaaacacctggtaactttaatagccttggggaattccaaagtaatgggaaagccgacaatagcgctttcagagacttaattacggccaaagaaattgagaaaaatgtgcaggaaatgagcaagggctcagctcccggtccagatgggattactcttggggacgtcaaaaagatggatcccgagtattcccggacagcggagatcttcaatctgtggttaacatctggaaaaatcccggacatggtgaggggatgcaggactgttttaattccaaaatcaacagaaccggaacgtttgaaggaccctaacaactggagacccatcacaattggttccatcttgctgagacttttctccaggattgtaacagctaggctgagcaaggcctgccccctcaacccaaggcaaagaggcttcatcagagcggcgggatgctctgaaaacttgaaactcctgcaatctgtaatgcggtctgccaaaaaagaacacagaccactgggtgttgtattcgtggacattgccaaggcttttgacaccataagccaccaacacatcatacacgctttgcagcaaagagaggtggatccccacatcatcggcctggtgagcaatatgtacaaggacaccagtacttatatcaccgtaaagaaaaacacacacacagatgaaatccatttccgggttggagtaaaacagggtgacccgatgtcaccccttttatttaatctggctatggaccccctgttgtgcaagctggaagagagcggcaaagggtaccatcgaggccggagcagcatcacggcgatggcattcgcggacgatctggtcttattgagtgactcctgggaaaatatggaaacaaacatcaagatattagagaccttctgcaatctgaccggtctcaaaacacagggagtgaaatgccacggctactacatcaagccgactaaggactcttacaccgtcaatgactgcgctgcttggaccatcaacggcacacccctgaacatgattgaccccggtgaaactgagaaatacctaggcctgcagattgacccctggactgggatagcaaaatccaatctctccactaaacttgaatattggctccaacgaattgatcaagctccacttaaacctctgcagaaagttgatatcctcaaaacatacaccatccctcgaatgacgtacctggccgaccattcagacctgaaagccgggttcctcgagagccttgaccaaaagatccgaacgacggtcaaggactggctgcacttaccttcttgcacgtgcgatgccatcctgtactcgagcacgaaggacggcggtttgggcatcaccaaattggcagggctgatccccagcgtgcaggcccgaagactgcatcgtatcgctcagtcttcggatgaaacgatgaagatgttcctggagaaagatcaaatggaacaaatgcataagaaactgtggattcaagctggaggggacagggagaagattccttccatctgggatgcaccgccggtgagcgaaccatctaacagtgcaagcacaatttcggagtgggaagcaccatccttgaaaactaaatttccaaaaccgtgtaattggaggaaaaatgaatttaaaaattggactaaattagtgtcccaaggccgtggaattataaattttgaaggtgataaaattagcaaccattggctacagtattacagaagcatacctcacaggaagctcctcactgctttacaactcagagccaacgtataccccacaagagagttcttagctagggggaggcaagataaatacatcaaggcatgcaggcactgcgatgcggacattgaaagctgcgcccacatcatcggcaactgcccagtgacgcaggacgcccgtatcaagaggcacaattacatctgcgaagtgcttcttgaggaggcgaaaaagaagggctgggtagtgttccaagaaccgcacataagggataccaccaaggaactgtacaagcctgatctgatatttgtaaaagacgcccgtgcacttgtggtggatgtgacagtacgatacgaagcagccaaaacatcgctagaggacgccgctgcggagaaagtgaacaagtacaagcatttagagactgaggtacgtaacctcaccaacgcaaaggacgttgcttttatgggctttccccttggagcgcgggggaaatggcaccagaaaaactttgaacttctggaagctctgggcctctctaagtcgaggcaagagaaaattgcaaggactttatccacaacagcgctcctgtcatctgtggacattgtacgtatgtttgctagtagggccaggaaattaggtaaccaggagtagtttattttttatttttattttattttatagctttttgtaactgtttgtagcttcctttttgtagtatttttgcatttttgtatctttttatatgctttaatttaaaaaaaaaaaaaaaaaaaaaaaaaaaaaaaaaaaaaaaaaaaaaaaaaaaaaaacctaataaaaagacagcagctagggacgtagggcagccacaagccagttaggtagctgatagtgagtagggacaggactttttatttcataacgcgtcaattaccacccgaattggaccaatttaccggatttgtccaaggtggacgggccacctttacttaacccggaaaaggaacatatattatttatatgtgttcgaaaaa

SEQ ID NO: 545 - DNA, 4217 bp, Chamaetylas fuelleborni
  source 1..4217: mol_type = genomic DNA
ggcagcttgagatggtctgttactaactgggcttagctgcggaagtcacacctcctcgtggtcccgccggacgcccgtaaagggtgactgagttgacttctgccccagtgtgagtgagggaggttattctccctccctatcgtctggtctcgccacccagcggtagtttcacgatcttgctggaacaaatacttggcacagtttcttactgtcgcccagagcctggtccacgggcctaagttggacgcagttggcagcgtgggggagggccccgctgctgactttgacaaccctcacttggacgtgacgcaatttacattccggatccgaccatgatacaaccgctctcgttgcggtacatatcaacggccactcagacggaccctttagacctacgggtcccagaggccgagattccatcaataccccccacatcaagtactgaggggttcgagctggtatgtctagagtttgtgaactcctcctatagcgaggagattggattccatctggaaactatttgggagggcttggccagtctacctgaaccctatgagaccttgcccttgcggttggttcagagagatgaatctgagtgtgttgaaacggtggttgaagagcttaaaacacctgaggctcttccagggcccagcggtgataggacaccggttggaacacctgtggtgtccgtcccggacaaaaatccagcatgtccacgttgtgccacccgttttacccggatgctggggttgattgaccatctaaagagaaatcacgggcagaaaaagatctggttcaagtgttcgaagtgtggtaaacaaaatcttaaataccacagtattgcttgtcacttcccacggtgcaagggggaagtatgtgtggttccaactggtgattgggtctgtgaggtatgccagagaagttttaccaccaagataggcctgggccaacacaagaggctgatgcatcctcttgtgagaaatttggaacggattgaggcctcccatccaaaggtgtcatctttacgaggggcccacaagaaggtgtggacggaggaggaggaggccctcctgagtcaactggtggtggcatatgctggtaggaagaacatcaaccaactaattatggagcacataccatctaagactgcgaagcagatcagtgataaaagacgccttctgatgaaagctccctccaagagagatcgatctgaggaggaaggtgcggggaaagaagaacttccccagggtgctgacctgccacaggaggggcagttgaagctccaatactcggatgccatcaagagaaagttggcggcatgtgagttcactagctgccaggaggccttcgcgaaaattcgagatgggcaagatccgcagacggtggtgaatgaggtttatgagaagttttttggtagcccgcgtgggctcagccagaatgtaaaatcttccaggggccggaagtcacagaagggccagaaagcatccgggaaaacaactaattggatgcgaaaaagggcaaagaaaaaaggaaaatatctccgatatcagaggctgtttcatttgcacagagggagacttgcacgaattatattggataacatcgaggctatacagtgccagataccatctaacattgtccacgccgcttttaaagctcgatgggaaacatctgttggttttaagggtcttgaatccttcccaccacatgggaaggctgataacaccgcttttcaagccctgattacagaaaaagaggttgaaaagaacttgaaggaaatggcaaagacctccgctcctgggccagatgggattactttgggtcagcttcttataaaagacccgaagttttctctgttgacggagatcttcaacctctggctggttactggaacgatacctgatttgctccgggactgccggacagtcttgattccgaaatccaccgatttggaaaaggtgggtgacatcaacaactggaggcctatcaccattgcctcgacggtgcttaggttgttttccaggattgtgacggcgagactgacccgagcttgtcccattaaccccaggcagaggggatttattcgggcgtcaggatgttccgagaatttgaagctattgcagcttgtggtgagacatgctaaaagggagcattgtgacctgggggtcgtatttgtggacattgctaaggcttttgataccatcagccatgaacatattattatgggtctgatgcagaggggggttgatccccatgtgatccaactagttattgacttgtacaagaacatcagtacgtatattgacttgaaatctgggaagacagacccgattaagatcttaagaggggtcaaacaaggagacccgatgtcacctattttatttaatcttgcgcttgatcctcttttgtgtaaattggagaaggatggctatggtttccagcgaggacgtttaaaacttacagctatggcctttgctgatgacttggtattgttaagtgactcctgggatggaatgtgcagtaacatcaagatcctggagaccttttgtgaacttactggtctccagacgaagggggaaaaatgtcacggcttttacatcaagccaactaaggacgcgtataccatcaatgattgtccagcttggattgttaatggttccccccttaatatgattgacccagggaattcagagaaatatcttggtgtacagattgacccctggactggctttgccgactcaggtttatcgaagaagctggaagaatggctccagcggattggggatgcaccactgaaaccccttcaaaaagtcgatatacttaggacgtataccatccctagactaatatatctggctgaccacaccgaagttaaaagtgggcccctcgaatcccttgacttgattgttcggaatgaagtcaaggtatggcttcacctccccccgagtacgtgtgatgcgatcttgtattcgagatgtaaagatggtggtctaggtgttatcaagttatcggcgcttgttcctagtatacaagcgcgaagactgcacagattggctcagtcttcggatgagactctggttgaatttttaaagggggaacatctggaacttttatatgagaagctatgggtacgagctggtggtgagaaggagtctatcccgacaatttgggagcctattccagtggatgaaagtgtcgggagtggaggtgaaggtttgtcggattgggaggcacccgttcccaaagtccgctacccgagaccttgcaattggcggaaagtagaatttaatagatggaaacgcctggcagcccagggccatggtattgagaattttgagaatgataacatcagtaatggctggttaatccagtacagaggtattcctcatagaaagttgattacagcattgcaattgagagctaacgtctaccccacaagagagttcctggccaggggtagaggggatgtctatgcgagatcttgtagacactgtggtgccgattatgaaacaacagctcacataatcgggagctgcccaatcactaaagaggccaggattaagcgtcataattccatctgtgagactcttagcaacgaggctaagagggagggttggtcggtattccaggaaccacatatacgggacgagaagcaagaattgtttaaaccggacttgatatttataaagggaaataaggcacttgtggttgatgtgacggtgaggtacgagcataacaactcctctttaaaggaggcggctgcagaaaaggctaagaaatatcagtgcctggtacatcaaattaaggatttaactaacgcagctgaaattgaatttgtgggctttcccattggggcgcgggggaagtggtatgagaagaactctgaattgttaacggccctcggtctctctaaaacgaggctagggaagactgcccgggccctagcatccagagcgctccttacttccgttgatattgtacatatatttgccagcaaagcacggactgttgtatccaataaataaactcgtcggccccttcccggctgtcggtgacctggacagtggaattggttttgggtgggaggggttcatccttctatcgtgtcaatataccatcacccagattttgggtccaaattctgatctggaccaggtggacgggccacctttacttaacccggaaaaggaacatataatctttatatgtttattaag

SEQ ID NO: 546 - DNA, 4693 bp, Cichladusa arquata
  source 1..4693: mol_type = genomic DNA
ggcggctttggagagtatagttacaaactgggcatcgctgcagagatcgcacctcctcgtggtcccgctggtagccctgcgtagggtaactaagtcgatctctgccccaggatggagccgttgggaatcgccagttcaacggactcctgccaaaaacccggcgaaacaaatttctcggtaaaaagccgcgtggcttcattgcccgaaacctggccccccggtttcataggggcaatgtctccggtaagtggactgaccacccactaccgttccaccttccatggtgggcccattccgatgggttctggctctgatttgggggggggggtctggtttagagcgccggtacgcctgtccagggtatcggtgggctcccagacctcccccagcgactgggttgacctgttgtcctggaattttaattttttaccaggctccaagtctaatgcccagtgggtcgacctggtgtctaggcacggggttgacctgttatccaaaaatgaccaggtagacctggcaactcaaaatttaccatccaaattgtcccccgatttggcagaaaatgaattggctttgctggcgaacttagagttttacaggtcggatttgcatgtgcatgagggtgttcatttttctgctaattgggagggtttgagcgggttgcctgaggtgtatgaacaactagcaccacaaccgtgtgtgggagatagttcacgtgctagtctcccgcgagacactaaactgtttgtgcctgagcaaaggagcagcgaggagaaggagagcgaggacgcgccaaaaacattccctccaacgcctgagaagcccggggagcggacacctgaggagactgtgacggtgactgttcctgacaaaaatccaccttgtccttgctgtggtaccagggtaaactctgtattgggcctaattgaacacctaaaggggtcgcacgggaaaaagagggtttgttttcggtgtgttaaatgtggaaaggaaggtactaactatcatagtattgtttgtcactttcccaaatgcaggggtgcagagaccgaagcggctccagctggggagtggatctgtgaggtatgcggaagagattttcaaactaaaattggcctgggacaacataaaagacatgcacacccgtcaataagaaaccaagaaaggatcgctgcttcccacccgaaagaaacatctaaccgaggggctcacaaaagatgctggacaaaggaggaggaggagatgctgataaagttagagatgcagttcgagggccacaaaaacatcaataaactcatcgcggagcacatcacaaccaaaacagctaagcagataagcgacaaaaggagattgctgcccaggaaaccagataaggacattgaagaggaacctgctgtgagtactcgcaccaggagagcagctgcgggcctgagaaaggaacctggggtgagtcatcaaagccaggctgcggtcgagaacaatggacctgggcggagccaactgccagggaagccagctgccggaaagaaaacaatggacgagataagccaccgccctgataagggtaacggccggaggggaaccatcaagcagcagatggctgggcaactgcaggcccattatcaccggacactcggggagaggctatcagctggggcaattaacaccttcccccgggcattcaagcagttaatggaaggccaggagatgcaagaaacgatcaaccaatcagcgcaggactgcttcggatgcctggaatcggtaagccagataagaacagcaacccgagataagatcaacaaagggacccgggagaaacaaccaaagagaccttttcaaaagtggatgaaggacagagcaattaagaagggtgattaccttcgcttccagcgattattccatcttgacagggggaaacttgcaaaaattattttggacaatattgagactttgtcctgtgatattccacccagtgaaatttattcggtttttaaagacagatgggaaacacctggtaattttaagagccttggggacttccaaattaatgggaaagccgacaatagcgctttcagagacttaattacggccaaagaaattgagaaaaatgtgcaggaaatgagcaagggctcagctccaggtccagatgggattactcttggggacatcaaaaagatggatcccgagtattcccggacagcggagatcttcaacctgtggttaacatctggaaaaatcccggacatgctgaggggatgcaggactgttttaattccaaaatcaacagaacctgaacgtttgaaggaccctaacaactggagacccatcacaattggctccatcttgctgagacttttctccaggattataacagcgaggctgagcaaggcctgccccctcaacccaaggcaaagaggcttcatcagagcggcgggatgctctgaaaacttgaaactcctgcaatctgtaatgcggtctgccaaaaaagaacacagaccactgggtgttgtattcgtggacatagccaaggcttttgacaccataagccaccagcacatcatacacgctttgcagcaaagagaggtggatccccacatcattggcctggtgagcaatatgtacaaagacaccagtacctatatcaccgtgaagaaaaacacacacacagatagaatccatttccgggttggagtaaaacagggtgacccgatgtcaccccttttatttaatctggctatggaccccctgttgttcaagctggaagagagcggcaaagggtaccatcaaggccggagcagtatcacggcgatggcatttgcggacgatctggtcttgctgagtgactcctgggaaaatatgaaaacaaacatcaagatattagagaccttttgcaatctgaccggtctcaaaacacagggagtgaagtgccacggctactacatcaagccgacaaaggactcttacaccgtcaatgactgcgctgcttggaccatcaacggcacacccctgaacatgattgaccccggtgaaactgagaaatacctaggcctgcagattgacccctggactgggatagcaaaatccaatctctccactaaactagaatattggctccaacgaattgatcaagctccactgaaacctctacagaaagttgatatcctcaaaacatacaccatccctcgaatgacatacctggccgaccattcagagctgaaagccgggttcctcgaaagcctcgaccaaaagatccgaacgacggtcaaggactggctgcacttaccttcgtgcacgtgcgatgccatcctgtactcgagcacgaaggacggaggcttgggcatcaccaaattggcaggactgatccccagcgtgcaggcccgaagactgcatcgtattgctcagtcttcggatgaaacgatgaagatgttcctggaaaaagatcaaatggaacaaatgcataagaaattgtggattcaagctggaggggacagggagaagattccttcaatctgggatgcaccgccggtgagcgaaccatctaacagtgcaagcacaatttcggagtgggaagcaccgtccttgaaaactaaatttccaaaaccgtgcaattggaggaaaaatgaatttaaaaattggactaaattagtgtcccaaggccgtggaattataaattttgaaggcgataaaattagcaaccattggctacaatattacagaagcatacctcacaggaagctcctcactgctttacaactcagagccaacgtataccccacgagagagttcttagctagggggaggcaagataagtacatcaaggcatgtaggcactgcgatgcggacattgaaagctgcgcccacatcattggcaactgcccagtgacccaggacgcccggatcaagaggcacaattacatctgcaaagtgcttcttgaggaggcgaaaaagaagggctgggtagtgttccaagagccgcacataagggataccaccaaggaactgtacaaacctgatctgatatttgtgaaagatgcccgtgcacttgtggtggatgtgacagtacggtacgagtcagccaaaacatcgctagaggatgccgctgcagagaaggtgaacaagtacaaacatttagagacggaggtacgaaacctcaccaacgcaaaggacgttgtttttatgggctttccacttggagcgcgggggaaatggcaccagaaaaactttgaacttttgggagctctgggcctctctaagtcgaggcaagagaaaattgcaagaactttatccacaacagcgctcatgtcatctgtggacattgtacatatgtttgccagtagggccagaaaattatgtaaccaggagtagtttagttttcttttgtaacttttatagcttttagtatgtttttgtagctccctgctttatagtatttttacattcttgtatctttttgtatttttttatatgctttaatattttttttaaaaaatttaataaaaagacggtagctaggggcgtagggcagccacaagccagttaggtagctgatagtgagtagggacaggactttttatttcataacgcgtcaattaccacccgaattggaccaatttaccggatttgtccaaggtggacgggccacctttacttaacccggaaaaggaacatatattatttatatgtgttcgaaaaa

SEQ ID NO: 547 - DNA, 4374 bp, Ciconia episcopus
  source 1..4374: mol_type = genomic DNA
atggtcatagttactaactgggcttagctgcagaggccacacctcctcgtggtcccgctggataccctaacgggtaactaagttggcctctgccccagagagagggggctttgctccctctcgccctatcgattggcctcaccgatctttcgatagtatttacggtgatacaaatttacggcaccgagttctactcgctgcccaaaacctgcgcccacgggtattagatgggcataaaccgacagtattagaggggaatactgtcggggtctgacaaccctcattccaaactggtcaaaatgggtcgtccgatacggattgcgttcgtatcggtggccacacaaacaggtccgatagacctgcgcgaaagagtaatcacagagactgggaaagagcacgataaaagtaacgtgccggaggacagctggaattgtacagggctggagtttattaactcaattgttgaaggactggaatggagtcatccttccaaccgggctgagagactggccaagtttcctgaagtttacgagacgtataacagctcacacgcggctgagacggagatcaatgagaagggggaaccatcacctcgaaaggccatgtcaccgccacggactcctagtccggatcacaatactgacctgccaaacgaaggcacaccggtggtaaaggtcccggacaagaatacatcatgtccgtgctgtggaaaccggataggaaaaatctcgcagctggttgaacatctaaagagagcccatggaaacaaaaagatcttgtttcagtgtgccaaatgtggaaaaacagaaatgaaacatcacagtattgcgtgccattttccgaagtgtaaagggtccataacaacagacccaaagtgcaaggggtccataacagctgacccaacggtgggcttgacctgtgaggaatgcgggagagcatttacatcaaaaatcggtctgggacagcataaacgcctagcccacccggtgctcagaaacatcgagcggatcgccgccgctcaaccaaaagcaagtacgaaaagagggctacatcggcagtgctggacagaggaggaagtggaactactacgaatattagagaaacagtacgagggaagtaagaacatcaacaaactgattgcagagcatattccatcaaaaactgcaaagcagataagtgacaagagaagaggactctctaagagtccggaggaggagggtgagaaagaccaagacccagagtggagaaaacaaatgacaatggagcaagaccatcccaggggcgttggatcagatacggagggaggactgatttcccactataaaaagagaattgcagagtggataacatctgagaaactgcccattctccagggtgtgtttgaagaggtgctaaatgggaatgagaacaccgattgtttggttcaagaggcaactgacgaatactacccacacctattcaggaggtccacagagcctgaaacaaaccaagatgaaaagcacccagggcacagtaaagctaaccctccaggaccatctaaggagtggatgaaaaagagggcaagaaaaaggggacaattcctaagattccagcggctgttttaccgagatagagggaaactagccggtatcatcctggatgatgtggagtccctgcagtgcggtatcccgcttgaggaggtacataaagtgttcaagtcgagatgggaaacaccgggaacatttaagggcctgggtgcctttcgatcggcaggccaagcagacaactctgcattcaaagccatgatcacggcaaaggaaattgcgaaaaacatcagagagatgaataagaaagcagcaccaggaccagacgggcttagtctgagagatctcataaaaatagatcctcactatacccaagtcatggaactattcaatctatggttgctgtctgggaatattcctgacgtggctagagaatgccggaccgtgctaatatcaaaatctgcagtgccagagcgccaaaaggacatcaataactggcggccaattaccatcggctctactgccctgagactgttctcaagaattctaacggcacggttaaccaaggcgtgccccatcaatccaagacaaaggggctttatcaagtcgccaggatgtgctgagaacctcaaactattacagctattaattcggagtgctaagaaggagcaccggcctctgggcgtagtcttcgtcgatttagccaaagcctttgacacagtgagtcattctcacatcttaacagttctcaaacaaaagggtgtggacgagcatatcatcaaattaattaaaaatctctatcataatatcaacacccgtatcgatctaaagaacaaacaatccgaacccattggtatgcaaattggagtaaagcagggtgatccaatgtccccgattctattcaacttatctgtggaccccctactgtgtaaactagaggaggaaggaagtggagtccagtacggctctagaaatataacaactatggcctttgctgacgacttggtactactaagcgaatcatgggaaggaatgaagaaaaacattgaaattctagaggtcttttgcgagctcactggcctcaaaacacaaggggagaagtgccacggttttttcatccaaccgacaaaagactcatatacaatcaatgactgccctccatggacagtgaacggcacccccctcaatatgatcgagcccggtagttctgagaagtacctgggtctgcgcgtcgacccatggaccggaatatctaagccagaactacaacaaaaagtgaagggatggctgcaaaggatcaacgatgctgcactgaagccgttccaaaaggttgacatcctgaaaggctacaccattccaagactgatttacttagcagaccaagccgatgtaaaaacaacatacctagagacccttgacttggagattcgaacggcggtcaaggagtggttacacctaccaccatgtacttgcgatgccatcctttactccagcactcgggatggaggtctcggtatcactaggctcacgggcttgattcccagtgtgcaggctcgaaggctgcacagaattgcacagtcttcagacgaaacaacaagagagatagccaagaaagagggcattgagaaagaatatgcgaggctgtggatcgcagcaggaggtaacaaagacaagattccacccatatgggacccaagagctgtaacggtgatatcggaaggacaaggcggcgagaaacaggtctcggaatgggagctacctgcccccaagaccatctatccgaagccctgtgattggcgaaatcaggaatttacgaactggactaagttgataacccagggccgtggcatttccaactttgaaagtgacaagatcagtaacagttggttagaattttataggggcattccacacaggaagctacttaccgcactacaactaagggcaaatgtttaccccacgagagaatttctaacaagaggaaaacaaggaaccccgatgagagcgtgccgacattgccaagcggaagccgagacctgcgcacacataattggatattgtccggcagtacaggatgccaggatcaaaagacacaaccaaatatgcgaggtactaatggaagaggccaaaaagaaagaatggactgtgtttcaagaaccacacgttcatgacgagcgaaatgaactgtacaaaccagacttggttttcgttaaagaaaaccaagccatagtggtggatgttacagtcaggtacgagagtaaatcaacatcattggctgatgctgcggcagagaaagttaggaaataccaacacctcaaagaccatataaaagatctaacgaaagccttaaacatcaaatttatgggcttcccaataggagcacgaggaaaatggcaccctggaaattatgaattattgaaagaacttgggctctcttcctccagacaggacaaagtggctcggcgtctatcaaatcgagcactgttctcctcagtcgacataatacacatattcgccagcaaaacaagaactgtcatcagatcgacatgactcaattatctattgggtcacgagccgcgggaataccatgtaaattgtattttattattgattatcaataaagtgacaaccccctatccatcaggtgggagggacccctagagactgcctagacagacaaaagcttgtgtcagggcgctaatagtatgtaggactttatgggactcgaatcatgacgcgtcatcaacccggccttaagacactaattaccggtctttacccaggtggacgggccacctttacttaacccggaaaagaaacatgtatatttattatatatgtgtttgttaaa

SEQ ID NO: 548 - DNA, 4383 bp, Ciconia stormi
  source 1..4383: mol_type = genomic DNA
atggtcatagttactaactgggcttagctgcagaggccacacctcctcgtggtcccgctggataccctaacgggtaactaagttggcctctgccccagagagagggggctttgctccctctcgccctatcgattggcctcaccgatctttcgatagtatttacggtgatacaaatttacggcaccgagttcgactcgctgcccaaaacctgcgcccacgggtattagatgggcataaaccgacagtattagaggggaatactgtcggggtttgacaaccctcatcccaaactggtcaaaatgggtcgtccaatacggattgcgttcgtatcggtggccacacaaacaggtccgatagacctgcgcgaaagagtaatcacagagattgggaaagagcacgataaaagtaacgtgccggaggacagctggaattgtacagggctggagtttattaactcaattgttgaaggactggaatggagtcatccttccaaccgggctgagagactggccaagtttcctgaagtttacgagacatataacagctcacacgcggctgagacggaaatcaataagaagggggaaccatcacctcgaaaggccatgtcaccgccacggactcctagtccgaatcacaatactgacctgccaaacgaaggcacaccggtggtaaaggtcccggacaagaatacatcatgtccgtgctgcggaaaccggataggaaaaatctcgcagctggttgaacatctaaagagagcccatggaaacaaaaagatcttgtttcagtgtgccaaatgtggaaaaacagaaatgaaacatcacagtattgcgtgccattttccgaagtgtaaagggtccataacaacagacccaaagtgcaaggggtccataacagctgacccagcggtgggcttgacctgtgaggaatgcgggagagcatttacatcaaaaatcggtctgggacagcataaacgcctagcccacccggtgctccgaaacatcgagcggatcgccgccgctcaaccaagagcaagtacgaaaagagggctacatcggcagtgctggacagaggaggaagtggaactactacgaatattagaaaaacagtacgagggaagtaagaacatcaacaaactgattgcagagcatattccatcaaaaactgcaaagcagataagtgacaagagaagaggactctctaagagtccggaggaggagggtgagaaagaccaagacccagagtggagaaaacaaatgacaatggaacaagaccatcccaggggcgttggatcagatacggagggaggactgatgtcgcactataaaaagagaatcgcagagtggataacatctgagaaactgcccattctccagggtgtgtttgaagaggtgctaaatggggatgagaacaccgattgtttggtccaggaggcaactgacgaatactacccacacctattcaggaggtccacagagcctgaaacaaaccaagataaaaagcacccagggcacaataaggttaaccctccaggaccatctaaggagtggatgaaaaagagagcaaggaaaagaggacaattcctaagattccagcggctgttttaccgagatagagggaaactagccggtatcatcctggatgatgtggagtccctgcagtgcggtatcccgcttgaggaggtacataaagtgttcaagtcgagatgggaaacaccgggaacatttaagggcctgggtgcctttcgatcggcaggccaagcagacaactctgcattcaaagccatgatcacggcaaaggaaattgcgaaaaacatcagagagatgaataagaaagcagcaccaggaccagacgggcttagtctgagagatcttataaaaatagatcctcactatacccaaatcatggaactattcaatctatggttgctgtctgggaatattcctgacgtggctagagaatgccggaccgtgctaatatcaaaatctgcagtgccagagcgccaaaaggacatcaataactggcggccaattaccatcggctctactgccctgagactgttctcaagaattctaacggcacggttaaccaaggcgtgccccatcaatccaagacaaaggggctttatcaagtcgccaggatgtgctgagaacctcaaactattacagctattaattcggagtgctaagaaagagcaccggcctctgggcgtagtcttcgtcgatttagccaaagcctttgacacagtgagtcattctcacatcttaacagttctcaaacaaaagggtgtggatgagcatatcatcaaattaattaaaaatctctatcataatatcaacacccgtagcgatctaaagaacaaacaatccgaacccattggtatgcaaattggagtaaagcagggtgatccaatgtccccgattctattcaacttatctgtggaccccctactgtgtaaactagaggaggaaggaagtggagtccagtacggctctagaaatataacaactatggcctttgctgacgacttggtactactaagcgaatcatgggaaggaatgaagaaaaacatcgaaattctagaggtcttttgcgagctcactggcctcaaaacacaaggggagaagtgccacggtttcttcatccaaccgacaaaagactcatatacaatcaacgactgccctccatggacagtgaacggcacccccctcaatatgatcgagcccggtagttctgagaagtacctgggtctgcacgtcgacccatggaccggaatatctaagccagaactacaacaaaaaatgaagggatggctgcaaaggatcaacgatgctgcactgaaaccgttccaaaaggttgacatcctgaaaggctacaccattccaagactgatttacttagcagaccaagccgatgtaaaaacaacatacctagagacccttgacttggagattcgaacggcggtcaaggagtggttacacctaccaccatgtacttgcgacgccatcctttactccagcactcgggatggaggtctcggtatcactaggctcacgggcttgattcccagtgtgcaggctcgaaggctgcacagaattgcacagtcttcagatgaaacaacaagagagatagccaagaaagagggcattgagaaagaatatgcgaggctgtggatcgcggcaggaggtaacaaagacaagattccacccatatgggacccaagagctgtaacggtgatatcggaaggacaaggcggcgagaaacaggtctcggaatgggagctacctgcccccaagaccatctatccgaagccctgtgattggcgaaatcaggaatttacgaactggactaagttgataacccagggccgtggcatttccaactttgaaagtgacaagatcagtaacagttggttagaattttataggggcattccacacaggaagctacttaccgcactacaactaagggcaaatgtttaccccacaagagaatttctaacaagaggaaaacaaggaaccccgatgagagcgtgccgacattgccaagcggaagccgagacctgcgcacacataattggatattgtccggcagtacaggatgccaggatcaaaagacataaccaaatatgcgaagtactaatggaagaggccaaaaagaaagaatggactgtgtttcaagaaccacacgtccatgacgagcaaaatgagctgtacaaaccagacttggttttcgttaaagaaaaccaagccatagtggtggatgttacagtcaggtatgagagtaaatcaacatcaatggctgatgctgtggcagagaaagtcaggaaatatcaacaccttaaagaccatataaaagatctaacaaaagcctcaaacatcaaatttatgggtttcccaataggagcatgaggaaaacggcaccctggaaactatgcattataaaagaacttgggctctcttcctccagacaggacaaagttgctcggcgcctatcaaatcgagcattgttctcttcagtcgacataatacacgtttgccagcaaaacaaggaccattactagatcggcatgactcaattatctattgtatcatccattgtgtcatgagccaggggactatcatgtaaattgtattctataattgactatcaataaagtgacaactcctctatttatcaggcgggaggggccccgagagactgcctagacagacaaaagcttgtgtcagggagctaatagtatgtaggactttgtggaactcggatcatgagcgtcatcaaccccgcctaaagacattaattactggtctttacccaggtagacaggccacctttacttaacgcggaaaagaaacatgtacatttactatatatgtgtttgttaaa

SEQ ID NO: 549 - DNA, 4315 bp, Colaptes auratus
  source 1..4315: mol_type = genomic DNA
gaagtcttatgactctcttgagaaatcatagttactaactgggcttagctgcagaggccacacctcctcgtggtcccgctggataccctcctgggtaactaagttggtctctgccccagtctccggagctttgatgctccaaactatcagtgagctcgccactgactggtagtattttggcgaaacaaactttagtggcaatttaattgccacacgctagcctagcccacggcgtagttagttgggcaaagtcatttgctctttgaggggagagcttctgactgattcctccctcacattgacttgacaaaatgggtcggcaactgcgtagcctttttgccaccataggcacccagaccactcctaaagattggctggatgttgcgaccacagataatacgagaccaccagatgaggaaataagggtatgttggactggaattgagtttgtgaactcaatgatagccaagaacaatatagcctataatcctatctggaatgagaaactgatgatattgccggaggcttatgaagggcccacttccccagctcgtgagaaaggcatccgagatcagagcctagagaggagcaggaatgaggatgtggactgtcctgaaaccccgagctctatgagtcagctctcaatactaaccgcatcgcccgagctggagaatacagcggacacctgtcctgggactcccctagtgaggatgccagatgacaatccggcttgtccatgctgtaccactcgggcaggcaatctgacgagattgattgaccatctaaagagagcccatgggaaaagaaagatcaccttccagtgttctcgctgtgaaaggacgaatgaaaaccatcatagtatctcatgccatatcccaaaatgcaaaggggtccaagagcctacccagatagaaggatttagatgcgaagagtgtaataattgttttaagactaaaattggcctgggacaacataaaagactagctcacccagccctgagaaatagagaaagaattgaagcttcccgccccaaggagacctctaaacgaggtgctcacaaacaagtctggtcccaagaggagacagaaatgttgcagacactaagtcaagaatttgaagggaggaaaaacattaataaactgattgctgaaaagttaacaactaaaacagcaaagcagatcagtgacaagagaaggctactaaaagaaactttagtgccagagaaagagaaaacaccagagcgcaagagcaggttaaagaaggggaggactgagattccatcttccggtgagggggagttaatagcccactatagaaaaacgattaaggaaaagatatcgtcagggaagctgcccatccttcaaaatacatttaaacaaataattgaaggcaaaaaagactcattaaaaatactcaatgaggtagctcaggacaaatatttgcatctgtttgagaaggcaattgaacagaaagcacctaaacagagccaacgtaagccccagcagagaaaaagtaaaaaggagtggatgaagaaaagatctaaaaaacgtggagaatttctccgattccaacgcctcttccagttagatcgtgggaagctggctaacatcattctcgatgagaaagactctgcacagtgtaccatccctctggaggaagtcagtaacacctttagatctagatgggagtctcaaaacacatttcaaggactcgggacattcgagtctgtgggacgggcaaataattcggcatttaaggacttgattacagagaaggagatccttaagaatatcaaagaattgaataaaaaatcggcaccaggccccgatgggatcaccctgaagtccctgcttaaaatggatccagattgtaaggagatcagagaactatacaatctctggctgttaagtggtaaaattccagatgtggtaagggggtgccgaaccatcctaatacctaagtcatcagcgcccgaacgccaaagtgatattaacaattggcggccaattactattggttccatcatcctgagactctattcaagaatcctaactgcaaggttggcaaaagcatgtcccattaatcctagacaaaggggctttattcagtcctcgggatgtgctgagaacttaaaattgttacaattaataattaggaatgcaaagaaacaaaagaaacccctgggggttgtctttgttgatttggccaaagcctttgattcagtgagccacacccacatcattgaagtgctaaaacaaaagggccttgatgaccacataatagatttaattaaggacttttatcataacattcacacagtaattaaaaccaaagaaggtgagactgagtctataggaataaaaactggtgtaaaacagggcgaccccatgtcacctctcctatttaatctgtgcattgatcctctgttatgtaaattggaagaatgtggggaagggttccaacacgggaagggtaaaataacagctttggcttttgcagatgacctggtcctgctaagtagttcccaatcaggaatggagaaaaacattgaaattttagaagcattttgtgacttaactggactaaaaactcagggtgagaagtgccatggcttctttgtaagaccaaccaaggactcttataccatcaatgattgtcccccatggctagtcagcggtacccccctaaacatgatccatccaggtcaatcagagaaatatctaggcttgaaaatcgacccttgggtggggctagttaagccagaattgcagaacaatttagaagtttggctcaatcgtatagagagagcccctttaaaaccatttcagaaattggacatattgaaagtgtacacagtgcctagattgatttacttagcagaccaggcaaatgtaaaatccacctatctggaaaaaatggatttaacaattagaaatagggtgaaaaattggttacatctcccaacttgtacttgtgatggcatcttgtattccagcactaaagatggaggcctgggcttaacccgattggctgggtcaatccctagtatccaagctagacgattacatagattggctaattcatcagatgacacagttaaaactgtggttaaagagaatgatattgataaagattatgaaaaattgtgggtatcagcagggggagacaaagataaaataccatcaatttataacccccaaacaataatggtagccgaatatgggggaagtgaggaattatctgaatgggaaaagcctgccccaaagaaaatctttcccaaaccttgcaattggagaaaaaatgagttcaaaaaatggactacattgatgtcccagggcataggaactgcagtctttgaaaatgattccaccagtaaccattggcttgtgaattacaaaaatattccccacagaaaattactaacagctttacaattgagagcaaatgtatatcccactagagagttcctagcaaggggtaggaaagaggaccaaaatacaaaatgccgtcactgtcaggctgataacgaatcagttgctcatatcattgggtactgtcctgctgttcaagatgctagaatacgcagacataattatatttgtaagatgattagtgaagaagctaagaaaaaggagtggctcgtatatgaagaaccccaaatcagagacaaggacttgaatttgtataagccagatttagtgtttgtaaaagaaaacgtagcttatgtagtagatgtcactgtaaggtatgaaagtaacataacaaaactgaaacatgcagcagaggaaaaagtgaggaaatataaacatcttagggaggaaattgttgaattgactaatgctaatgaggttaaatttgcagggtttccattaggcgcacgagggaaatggtatgagggaaactacaagatcttgtcagaccttgggctttcaaagtctcgtcaaagcagagttgcacggcgactagcatcccgtgcgctgctcacgtctgtggacatagttcatatgtttgcaggtaagagcaggaaagtgacaacaaatcccgtataagacaccctggccgtaagactcctttgaaaccatatgaaggtgcacatggacctattccggtctatgtaacaaacaccagatggtggattaggagcagccttaacttatcagtggaatctcgtaatgattactagcctcatgacgccgtcacataccgatgaacgacatctaatcggtaatgccgacttcccccggctatgaccaaatgggtggacgggccaccctcacttaacccggaaagtaacatacctcggtatgttcgatac

SEQ ID NO: 550 - DNA, 4347 bp, Cossypha archeri
  source 1..4347: mol_type = genomic DNA
gatgagggcatagttacaaactgggctccgctgcagagatcgcacctccccgtggtcccgctggatgccccttgtgggtaactaagtcgatctctgccccagttcggaggaggggcattgcctctctctccctatcgtctggagtcactacccagcgatagtattcaaaatagtgaaacaaattttttttggtaatagcttacgaagtaaattacccaattcccttgctcacgggttttgagttgggcacaggttaacagatactgagggaaactgttagccttataccccctcacttggattggcaaatataaataccgcaagatggggccgttgatgcgtcttatgtatgtatcgacagccactcagactgatattaatgatttgaaacttgtcgtaactaaattaaaagaaactataatccccgtaacaataccatcagatgatattgaattacaacgattagagttctctaactcgaaagagatagaggactggcaaacaattgaatttgctaaccaatgggaaaaattggctttatacccggaagtttatgagtcattaccatcagactcaccacaagaaagtaatgttactccatctgataataacatcgatgccgacggagatggagaggactcctttgccctggctactgaatttgttttagatcctcataaagatgacttgccaggagaaataccactcgttatgttaccggacaaagcaccatcttgtccgtgttgtaaagttaagattatgggaatagaaaagcttgtagaccaccttttaagatctcatggaaaaagaaaaatcattttccaatgtattacatgtggtctacaaagtgaaaattaccgctctatcgtttgtcactatccatcgtgcaaaggtgctagtgaggtgattccatctggtgattgtgtatgtgaggagtgtggaaggagtttcccaacacaaagaggcttgggacaacataaaaggcatgctcacccggacgttagaaatcaggaaaggattgatgctgctcgacctaaagctaaaatacctcgggaatcagcccgtaaatgttggacaaaagaggaggaggaattgctgaaaaaattaatagaacaatacgagggagaaagatacatcaataaattgattgccgaacatattccaactaaaacggtaaaacaaattagtgacaaacggcggtgcatgaatcctgtacgtaaggaaaggaaagatcaggaaagatgtgtacaggtggaaaaaagaaagaaacagccagtaactacggaaccatcgaacccggatcagttgagagcacattatatggaaacgatcaggaaagggataaaattaagaacgattaacatctattccagggcattccgcaaaattgttgagggggttaaagatcaactaacattaattaatgatactacagaggactggtatggacaccttaaagctagatgtctagcagagaggaaccctaaagtacaatcaaaaagaggtaaaacccaggaaacacgaagtaagagaaaagcgacaaattggatgaaaaagagagcaattaaaaagggacgatatttgagatatcaaaaattattttataaagatagagggaaattggcaaatattattcttgatgaggttgaatctgtaaaatgtgaaataccacttccagaagtattctctgtgtttaaatctagatgggaaacaactggtaaatttaaaggccttggacattttcagtctaagggaatggcagataacagcgcctttaaagttatgattacagaaaaggaaatagttaaaaacatcaaggagacaaataaaaatgcagcgccaggaccggatggaattacaataaaagacttgattaaaatggatcctaagtttgttgaaataactgaactctttaacttatggttaacatctggagagataccagactcattgagaggatgcaaaactatattaataccaaaatcaactaaaccagatcgattgcatgacatcaataattggagacccattactatcgggtcggttattttacgattattttcgagaatattgactgcaagattaacaaaagcatgtccaataaattcaagacaaagaggttttattaaatcgcctggctgctcggaaaatctgaaattgttagaacttattataaaaaacgcaaagaaacagcatagagaactgggagtggtattcgttgatattgcaaaagcctttgatactgtaagccaccaacatattattatgggtttaaggcaaaagggggtggattctcatattattaatttaattacaaatatgtataagaatatttatacagaaattggcattaaaggagaaagatcagaaccaattcagattaaagtgggcgttaaacagggtgatccaatgtccccgttattatttaatttggccatggatcctttgctatgtgaattggaacaaaatggaagagggtatcactatgatgctaattcgataactgcgatggcttttgcggatgatctggtcttgcttagtgattcctgggaaggtatgagggaaaatatagagattttggaagcattttgtgatttaactggtttaaaaacacagggagagaaatgtcatggatttttcattaaaccaacaagagactcttatacaatcaatgattgtccaccctggacagtgggtggtacacccctcaatatggtttgccctggtagttcggaaaagtatttaggccttcaaattgatccttgggtacaaatagctaaaccggatttgtcatctaaaatagatacttggctggatcgtattagtgagtcacctcttaaaccgctacaaaaggtagacatcttaaaaatatacatgatccctcgaataatatatttagcagatcatacagacatcaaagcaggattcctagaagccctggacttaaaacttagggcaagaataaagaaatggttacatctaccgactgatacttgtgatgccatcctttattccagcacgaaggatggaggactgggcattataaaactacaagctctgatcccgagcgtacaagccagacgactacatagactggcacaatgttccgatgagaccttaaggaatattttacaacaagaaaacatcatgcagaagtacgagaaactatggataacagctggaggagataaagaacaggtaccggatatctgggcacccaaaccaacggtgccaacatcacacctgggtgaagaagatacatcggagtgggagataacaacacctaaaaacatctacccacggccttgtaattggaagaagatggagtttcggaaatggactaaactccaatcccaaggcattggaatcatcaactttgagggggatacgatcagcaacaactggattaagaactatcgtggtatcccccataggaagctcctgacagctctacagttacgagcaaatgtgtatcccactcgagaatacttggcgagagggagaaatgatggacggattacatcatgcagacactgcaaggcggagaacgaatcctgtgcccatatcatcggccaatgcccagctgttaaagatgcgaggataaaacgccacaattacatctgtgaaatgctttcaggcgaagcgaggagaaaagactgggttgtctatcaagaacccattataagagattcaaaaggagagctatttaagcccgaccttgtctttgtcaaagagaaacaggcactagtcgtagatgtgacagtacgatatgagggagaaattaacaccttagagaaggcagctaaagaaaaagtcaagaaataccaacatcttgagacagaaattcaggaattaacaaacactgagaaagtaacttttataggctttccccttggatcgagaggaaaatggtataataagaattttgatttgttacagactcttggactgtcatcgtctagacaagagagaatagcgcgggccatggcatctagagccctcttcagctccgtcgacatcatacatatatttacaagcaaggttcgtacagctattgacaagtaggtattgttttcttgtttttaatttttagtatagtatgttagttttttagttttatggttttattgtagtgttattattgttgttttattgtgtagcatgttatgattttaatgttatgattttaagattgttattaaaggctgtgcgtttcgatccccttccccaaaagtggcgaatctcgtgatgattacaatctaagcgcgatcaccggatatgacgatggtggacgggccacctttacttaacccgtaaaaggtgcacacctcgtgtgtgttcatataa

SEQ ID NO: 551 - DNA, 4217 bp, Cossypha dichroa
  source 1..4217: mol_type = genomic DNA
ggcagcttgagagtgtctgttactaactgggctttgctgcggaagtcacacctcctcgtggtcccgccggacaccctaaagggtgactaagttgacttccgccccagtgtgagtgagggagttcattctccctccctatcgtttggactcgccacccagcgatagtttcacgaattgctgaaacaaatttgtggcacagttccgttctgttgcccagagcctggtccacgggcttaagttggacgctgttggcagcgtggggtgagggccccgctgttgacattgacaaccctcacttggacgtgacctattttgttctcctgaattgaccatgatacaaccaatttcgttgcgttacatatcaacggccactcagacggacccgttagatctgtgggtcatagaggccgatgttccatctgtcccccccacatcaagtgatgatgggttcgagctggtatgtctagagtttgtgaattcctcctatagagaggagaatggattccatctggaaattgtttgggagggcttggccaatttacctgaaccttatgagaccttgcccttggggctggttcagggtgatgaatctgagtgtgttcaaacggttgtcgaagagcctaaaacacctgaggctcttcctaggcccagcggtgatggggcaccgactggaacacctgtggtgtccgtcccggacaaaaatccagcatgtccacgttgcgccacccgttttactcggatgctggggttgattgaccatctgaagagaaatcacgggcagaaaaagatctggttcaaatgctcgaagtgtggtaagcaaaatcttaaataccacagtattgcctgtcacttcccgcggtgcaaaggggaggtatgtgtggttccaactggtgattgggtttgtgaggtgtgccagcggagttttaccaccaagataggcctgggccaacacaagaggctgatgcatcctcttgtgagaaatttggaacggattgaggcctcccgtccaaaggtgtcatctttacgaggggcccacaagagggtgtggacggaggaggaggaggtcctcctgagtcaactggtggtggcatatgctggtagaaagaacatcaaccaactgattatggagcacataccatctaagactgcgaagcagatcagtgataaaagacgccttctgatgaaagttccctccaagaaagatcgagttgaagaggaaggtgcggggaaagaagagcttccccagagtgctgatctgccacaggagggacagttgaagctccaatactctgatgccatcaagagaatgttggcggcatgtgagttcaccagctgccaggaggccttcgcgaaaattttagatgggcaagatccgcaaacggtggtgaatgaggtttatgagaagttctttggtagcccgggtgggcttagccaggatgtaaaatcttccaggggccggaagtcacgagaggatcagaaagcatccagggcaacaactaattggatgcgaaaaagggcaaagaggaaagggaaatatctccgatatcagagactgttccatttgcacagagggagacttgcacggatcatattggataacatcgaggccgtacagtgccaaataccatctgacattgtccacgctgcctttaaagctcgatgggaaacatcagttggtttcaagggccttgaatccttcccaccgcatggggaggccgataacaccgtttttcaagccctgattacggaaaaggaggttgaaaagaacttgaaagaaatggcaaagacctctgctcctgggccagatgggattactttgggtcaacttcttaaaaaagacccaaagttttctctgttgacggaaatcttcaacctctggctggttactggaacgatacctgatttgctccgggcctgccggacagtcttgattccgaagtccaccgatttggaaagggtgggtgacatcaacaactggaggcctatcaccattgcttcgacggtgcttaggttgttttccaggattgtgacggcgagactgacccgagcttgtcccattaaccccagacagagggggtttattcgggcgtcaggatgttccgagaatttgaagctattgcagcttctggtgagacacgctaaaagggagcactgtgacctgggggtcgtgtttgtggacattgccaaggcatttgataccatcagccatgaacatattattatgagtttgacgcaaaggggggttgatccccatgtgattcagttggttattgagttgtacaagaacatcagtacatatattggtatgaaatctgggaggactgacccgattaagatcttaagaggggtcaaacaaggagatccgatgtcacctattttatttaatctcgcacttgatcctcttttgtgtaaattggagaatgatggttatggattccagcgaggatgtttaagacttacagctatggcctttgctgatgatctggtattgttaagtgactcctgggatggaatgtgcggtaacatcaagattctggagacattttgcgaacttacaggtctccagacgaaaggggagaaatgtcatggcttttacatcaagccaactaaagatgcatataccatcaatgattgtccagcctggactattaatggttccccacttaatatgattgacccagggaattcagagaaatatcttggtatacaaatagacccctggactggctttgctgattcaggtttatcgaggaagctggaagaatggctccagcggataggggacgcaccactgaaaccccttcaaaaagtcgatatacttaggacatataccatccccagactaatatatctggctgaccacaccgaagttaaaagtgggcccctcgaatcccttgacttgattgttcggaatgaagtcaaggtatggcttcacctccctccaagtacgtgtgatgcgatcctgtattcgagatgtaaagatggtggtctaggtattatcaagttatcggcgcttgttcctagtatacaagcgcgaaggctgcacagactggctcagtcttcggatgagactctggtacaatttctaaagggggaacatctggaacttttatatgagaagttatgggtacgtgctggtggcgagaaggagtccatcccgacaatttgggagcctattccagtggatgatagtgttgggagtggtggtgaaggtttgtcggaatgggaggcccccgttcctaaagtccgctacccgagaccttgtaattggcggaaagttgaatttaatagatggaaacgcctggtagcccagggccatggtattgagaattttgagaatgataacatcagtaatggatggttaatccattataggggcattcctcatagaaaattaattacagcattgcaattaagagctaatgtctaccccacaagagagttcctggccaggggtagaggagatgtctacgtaagatcttgtagacactgtgatgccgattatgaaacaacagctcacataatcggtagttgcccaatcacgaaagaggccaggattaagcgacataattccatctgtgagactcttagcaacgaggctaagagggagggttggtcggtatttcaggaaccacatatacgtgatgagaaacaggaattgtttaaaccagatttgatttttataaagggaaataaggcacttgtggtcgacgtgacggtgaggtacgagcacaataactcctcattaaaggaggctgctgcggaaaaggccaagaaatatcagtgcctggtacagcaaattaaagatctaactaacgcagctgaaattgaatttataggctttcccattggggcgcgggggaagtggtatgagaagaactctgagttgttaacggccctcggtctctctaaaacgaggctagggaagactgcccgggccctagcatccagagcgctccttacttccgttgatattgtacatatatttgccagcaaagcacgaaccgttgtatccaataaataaacttgtcggccccttcccggctgtcggtgacctggacagtggaattggttttgggtgggaggggttcatccttctatcgtgtcaatgtaccatcacccagactttgggtccaaaattctaatctggaccaggtggacgggccacctttacttaacccggaaaaggaacatataatctttatatgtttattaag

SEQ ID NO: 552 - DNA, 4417 bp, Falco fasciinucha
  source 1..4417: mol_type = genomic DNA
gggacggcaccttgaagaggtatgagagcttaacccgtgtcatgagcaatacggaagggaccgacgtctatccgttaacgcccgcctgactatgacagtcacgcccaaggcggagctgtacaggggagtgcacaccgaggggtccctcacactggacacctccgggtgtcccaatgagtgtaccggccaaggggtgcctcgtaggtttaaccatacctggtaggtccgttcacgagcgagtcgacgcgttggcacgatggcggaagtctcagtaggtactaccaagtccgtaaggtcaggtcactttggggaactaagatcgtccgaaaaatcatgaacaatgacacatacagaccctatcatacggcagctgggcgccgataaaccagtgaccagggggaatgggacgggttcccctggtccagtgcgactgtccccgagaagaaataccgggccggatttccgctctcgtaagtcaaccggccccactggtaacgaccatgtgaaacgcccatcgattatggtacgcagagaccgaccagatcgtttcgttctggactacggctctcacgcggtggtgttaaggggaaaacaactacccaaagaactggcatgcggacctccagaaacgagtctggtaacgcatgtcccggttggtggggacttttcgctggacattccatgcgccgaagcgttgttgcgctgtcccatttgtccacggcaattctcatccccgtcaagctggggggagcacctgtggtgtcgacataacaccaagccgatttacaggtgtacagagtgcggtagagagagtggtcacctacattcgctgaggtgccactgcgggaagtgttcgggccggacaacgggtgacgtccccgccccaacggacggcgactttatatgtagcgaatgtggccaagcattcggcacggccacaggccgatctcagcacgaacgtcacaggcatcctgcgcttgcgaataagcgcaggatcgactcctacaacctggagttggcgaagaagaaggccctgcgtgctgcagctacactacctggaaggcaaacaggtaagggttgctggtccgcggaagaggtagcgattctcatatcgaatggagaaaagcttaccagggcgggatgtcgccgtgtcaaccaggcgctagccccgctcctgcccgataagaccctcaaacagatcagctccaagcggtgcgatctgaagcgtcgaaatgagaggtcggagaccgagtccggagagagagcggaccggaatgtagggaccgagtccgaagagagagcggaccggaatgtagggtctgaggtgacagaccatagagtcccccagctcagcgaaactgaaggggaaataacgggaacagctccctcccccgagtggaggagatcgtttaaggatgcagcgctgcccggacgctcggggtgggctgcaacctttgctgaatgcctccaggaactaaatgcggaggtcgcaaacgatagctgggaccgctttacgagaaacgtggatgagtggatcacgcagttgcggcagcgtagcacgcgaggcgaacgcgtgggagccgaaagagtcacgacgactcgtcggccctgtaggaatctgggtaaacgcgcacgaagagcgacgttcgcgcgataccagaacctattcgatcggaacaggaaaaagctccttgcggaggtgctttgcgagaacaagcagggtgagtgcctcgtccccatgaacgtgatcgaagagacgttcaaggagaggttctcgaagaagggtccggaggtggacttaagcgcatacccggcctcagccatggtgaacaactcgccgctattaacgccgttcacgatggaggaggttgtggatgcgcgccgaagtatgaagtccgcctcggcaccaggaccagacggtatcaccccgcggcaggtgaagtcgattgaccctgctgaactcgtgaacatcttcaattacatgttactggccgggaaggttcccgatgtcttgaagcttggcaggtcggtcctcctcccgaaaaaagaggacagcccgaatgacctgtccgactggcgaccactgacgatttgttccgccatttatcgtctatatacgaaactgctcgccactcgtatgcttcaggtaactcccttgaaccctgcgcaacggggattcatcaatgctgacgggtgcagtgagaacttgttcttgctgcgccagcttatgcttcgcagcatggggaggccagtgggtccaaggattaagcggctggacgtagcctttttagacctggcgaaggccttcgacactgtgtcgcactctctcgtatttgcgggcatgagaaggctgggcttccacgaccatatgatcgaagtggtcaagggtctttacgagggctgcttcacgaaattctcggtccgagctgagtcgagcgaacctatcgaaatcttgcgaggggtccgacagggagatgcactctcgcccctcctcttcaatattgccacagatccgctgatggacgctctatcaaaagactgtggtattagcgtcgacggagcgaacattgggtgtctggcttatgcggacgacaatgccctggtggctgactccgcggtggggctgcaacggtcggttgaccggtgcgtgcggttctatcgcgaggtgggtctctcggtcaacgtcgccaaatgtgccacattctcaattacggcgagagggcgctcctttcacgcaaataggggcgcccccccggagatcgatggagttccgctcccgcaggtcggccctgcagagaaggcatcctatctcggtgttaggttaggtccctggagcgacgaggcgtacatttcggtggaacgcgtgaccctgcaaatcgacttgctgtgcagggcgccactgaaaccacggcagaagttccatcttttgcagcagttctacctgcctaggctgttttacggcctgtcgcaggtgctgccttctaggagtacgctgatggcgatagacacggctatccgccaggggacacgtaggatgttgcacctgcacgagtcgaccgcgaactcgttcctgtacagcagcagatgcgacggagggttggggctcgtctgcctgacggagtcgataccctccagcgtgattcggcgcaatctacgcttgctctgctccgaatatgaggcagtgcgtacactggcccggacggcgggactcgccgcgcgaaacagcgaagttacgcagagatatggcctgccaccgattcgggcagacgagacggagtacgcccccatgttccgacaggatcactcccttgattgggagtccctgccggtgcagggccagtgtgcgaagtctttccgaggtgaccactgcggaaacgcatggatgtcgaggccgggcgggattacggaggaaagctacttgacttgcctcaagctgcggaccaacacattccctacccgcgaatgtctgacccgaggaggtcgaggactgaaggcttgtcgacgctgtggagcgccgtccgagacagtttcccacatcagcggccaatgtccgaagctcaaacgtgagcggttggccaggcacaatcgaatatgccagctggtggcggatgaaagcgcacgacacggctgggtggtaggcatagaaccatccttccgtgtgaacgggaccagactaatccccgatttggtgctgcggagagcggacagaactgtggtgatcgacgtcacggttagatacgagcaaggcgatgctctgagagacgcggcctccgagaaggtgaggaaataccgtccgttgatcgcgctgctgggggccacgggcggacaggtcgagatacacggtctgccgattggggcctgcggcgcgtggtcggcggcggctgaccgagccttattggcgctgcgtataggggacgaaggcttcagacgaagattgtgtcaacatgccatgctatcgacgttgggcatgctcagggattaggggacccctgcggcgtggcggcggccactcgtttgttcatttggtagtggactcggaccggacctgcagggcgtaacaaccctccgtttattttttcgttttgttccgtgactgtacttgtgacttcgcgtgcgcgtcgaccttccgcgtggatcttcctcccttcgcgtgtctatcgttgcggctggcccagggcagtcgtgccctgaagccacacagccccgctcattgctcacttggattagccaatctgaccgggacgccattaccgcgggtatgtccggcttactccgatgtatccggaccgaagaatcggagttcatggtagattagagagttgttgatctgacatgcgcgtcgctatttgacgtacagtgggaccacccacgttaaagaccaggtaatgacgggtctccgaaaccagtcaacgtcatc

SEQ ID NO: 553 - DNA, 4254 bp, Gallinago paraguaiae
  source 1..4254: mol_type = genomic DNA
gacgggatcatagttacaactgggcatagctgcggggggtcacacctccccgtggtcccgccggatacctcttgtgggtaaccgagttgaccccctgccccagtgcgaacggagttatggttacttcctccctatcaattggcctcaccaaccaattgatagtaatatcccaaggtgaaacaaagttctgaccttgcgtctaaattcctagcccacggtaatagttgggcttgtccggcaagttctgttggggtactgtcggacttgtcgaaatccccacaaatttggatatacgaaatgggttggtccggacggttgtgctttgtgtccgtggccacccagactaaatatttggattgggcactatcggttccttccatcttgaaccctgatctggtagggggtgggattgcggaaagaaaaagatgggagtttgttaactctgagaaaggttatgtgttggtgctttccccctcccgatccagcttacttgatacgttaccggagccgttcgagtctccgaaggtgtcgggcaggactatcagcccaagctctgtgcagaccgaatatacaggagaaagaacatcatctcctccaataacaccacctcccatcttggaagccggggcagatcctccgcaggagggcacacctgtggtaaagatcccagacaaaaatccagcttgtccatgctgcggcaaccgaatgggaaagattacgggactggttgatcatctgaagagaacccatgggaagagaaagatcttattccagtgtgcccgttgtgggagaacgaacccgaaacatcatagtatcgcttgccacatcccaaagtgtaaaggcgctgaggagcccagcatatcgatgggctgggcctgtgaggaatgcaatagaacatttgggacaaaaattggtttgagtcaacataaaaggttggcccatccagttacaaggaatgtggaacgtataacagcaacccgcccgaaagaggaaagtgcaagaggtgcacaccgtcggtgttggtcggaggaggaagtggaattacttaagaagctggaaaaacaatatgaagggaacaaaaacatcaataaattaattgcggaacatcttccattgaaaacaacaaagcagataagtgacaaaagaaggggactggtgagaagtccatctaaaaagaaggtgaaagagctggggataagagaagaacttatgaaagagggagaatatctggaaaggagtggctcccaagaagaggggggactaaggtcccgatatcgaaagtcgattgcagaatggttaagaactcggaaaataaccactctcagggagatctacgagagagtgatgaaagggaaaaaagatcttcccgcgctagtggatgaagctgcccagggccactatgcatgcctgaaaaaagatcttttggaaggggaaagacggcaaattcagaagatccgagaaatccgcagatcccgtccacagaaaccatcaaagcaatggacaataaagagggccagaaaaagggggcagttcctacggttccagcggctattccatctggatagaaggaaactggccggtattatcctggacgatgtagaatccctccaatgtggtattccacttgatgcgatacatgaggtattcaagtcaagatgggaatcacccggaacattcaagggcctgggtacattctgtaccaatggacttgcagataattcagcattccaacctatgattactgtgaaggagattgagaagaatatcagagaaatgaacaaaaatacagcaccaggaccggatggggtcactctgcgggatctcatgaaagccgatccccaatgtgtcaatttaatggaattatttaatttatggttattaaccgggtatataccggatggcattaaaaattgtagaacaatattgatacctaaatcaaatgtaccagaaaagttaaacgatgtgaacaattggagacctataacaattggctcgattatattaagattgttttctaaaatattaacggcacgattaagtaaggcatgcccaattaatacccggcagagggggtttataaaatcgcctggatgctccgaaaatttaaaattattacagcttgtgattcagtatgcaaaaagggagcaccgccctctcggggtagtcttcgttgatctggcgaaagcatttgatacggtgagccatgctcatataatagcagtattaaagcaaaaaggtgtggatgaacatataataaatttgattgaaaattcttatcataatattaagacttatattgatatgaaaaaggaaaaatctgactcaattggaattcgaattggagtaaaacaaggcgatccaatgtctccaattttgtttaacttatctgtcgatcctctattatgtaaactggatgagattggtaatgggtttgagtgtcatacgaaagttgtaacatcactggccttcgccgacgatttagtattattaagtgggtcctgggaaggcatgcagaaaaacatagaaattgtcgagaccttttgtgaacttacgggtctcaaaatgcagggggaaaaatgtcacggcttttacatcaagccaacaaaagattcatatactatcaatgattgtcctccttggactattaatggcaccccccttaatatgattgaacccggtagctctgagaaatatttgggtcttcgtatagacccatggacaggaatatctaaaccagaactactggagaaagttgatagatggcttgcgaaagtgggaaaggctcctttgaaaccttttcagaaggttgatatcttgaaagggcacttgatcccaagattgatataccttgcggaccaagcaaatttaaaaccaactcatttggaaaatattgatttggccatacgaaacggagtcaaggagtggttgcacttaccagcgtgcacatgtgatgccatcctgtattctaatactcaggatggaggattgggaattaatagattggcagcattaattcctaatgttcaaactcgacgattacatagaattgcccagacaacggatgatgtattgaaagagattgtgaaacaagaaggaattgagagagaatatgagaaattgtgggtaatggctggtggtgataaggaaaagataccatctatatgggacccgaaatcaataatggtaatatcagaaacgggcggggaagaactatcggaatgggagtcccccaatccaaaattgatttatccaaaaccttgtaactggagaaaaagggaatttaacaattgggtcaaattgtcaacacagggtcgaggtattagtaattttgaaaaagataaaataagtaataattggatacaacaatataggggcattcctcaaaggaaagtaattacagcattacaattacgtgctaatatctatccaacaagggaatttttagcgagaggacaatcagaaacatatattaaatcttgtcgtcattgtcaggctgatatagaaacgtgtgcacatataattggctattgtccatctgtacaggatgcaagaattaaaagacataatcaaatttgtaatatattggcagaggaagctaagagtaaagattggcttgtgtatcaagaaccattattaagagatgaatcaaatgaattatataaacctgatttaatttttgttaaggagaatcaggctattgtgacggatgtaactataagatatgaaataactacaaaaacattggaagaagcagcattggcgaaagcaaaaaagtatgctcatttaaaatcacaaattcaggacttgaccaatacttctattataaattttacaggctttcctttgggatcccgtggtaaatggtaccagggtaattacaatatattaaaggatttgggtctctccagttcccgacaagagaaggtcgccagacgattgtcgaattacgctttatttagctcggtggacattgttcacatgtttgcaagtaaagcgaggacagaggtaagataaacattttcattatattactcttgatgtattaggtaatagattagtataagtagtatgtagatgtattagattgtaatgtagtattgtagtattgtagaaatgtagtattgcaataaactggactgggatctcgtgatgattacctttaatcatgacgctcactggacatgacttggtaggtggacgggccaccttcataaaacccggaaaaagtacacatactcgtaatgtgttcgtaaa

SEQ ID NO: 554 - DNA, 4709 bp, Garrulus glandarius
  source 1..4709: mol_type = genomic DNA
ggcggcttatgagagtatagttacaaactgggcattgctgcagagatcgcacctcctcgtggtcccgctggataccctgcgtagggtaacaaagtcgatctctgccccagcacggagtcgttgggaatcaccagttcaacgatctcctgcttaattcggtgaaacaaatttgaggtaagagccacgcggccattgccctaaacctggccccagggtttaaaaaagagggcaaaagatcggtagtcggtgaagggggccactaccgttctaatggaaatctccaaaccacttttggggccgccgatacgcctgtaccaggtatcggtcggcacccaaacctccaattccgattgggttgacctggtgtcccgggatttcaagccgggctcctcgtctaagtcttgcggggtggacctggtgtctttaacttctaaacaccgggtagccctgctgtctaaaaccgatcgggtagacctggtgtattttacttctaaacaccaggtagacccgctgtctaaaactaaccaggtagacctggtggctcaaaattttccatctggctctcctaattcggcagaaaatgaattagatctggtgaacttagagttttatagatcggatctgtatgttggtaatgtggatggtcatttttctgtgaatcgggagggtttgagcgggctgcctgaggtgtatgaacagcttacaccacaaccgagtgcgggagggggcgaccacctccccaaggacagtgaagggattgtgcttagcgacggggaggaaagcggcgagcacgagcgtgagagcgcctcggaaacttcgcctcctgagctccagaacacctcggagacttcgcctcctgagccggagacctgcgttgtaccggcaacatcacctcctccaccagatgcccacgggaaggaggcaccgggggactccctagtggtgactattccggacaaaaatccaccttgtccatgttgtgggacccgggtggggggggtggggggcttgattgaacatctcagagaagcccacgggaggaggggggtctgttttcgatgtgctaagtgtgggaaagaaagtaacaactgtcatagtattgtttgtcactttcctaaatgcagggcaaagacagaaacggctccagctggggagtggatctgtgaggaatgcgggagagatttcaaaactaaaattggcctgggacaacacaaaagattggcacaccctatgataaggaatcaggagaggattgctgcttcccacccaaaagagacctccaacagaggagcccacaaaaggtgctggacaaaagaggaggaagaactactgataagattggaaactcagttcgagggcaacaaaaacatcaataaactcatagcagaacatatcccaactaaaacagcaaaacagatcagtgacaaacggaggctgctgcccagaaaaccgacagaggatgtttgtgaagagcctggggtgagtcatcgcaccaggagagcagctgcgggactaaaaatagaacctgggccgagtaatcagcctgggaaaggagtagaagacaatgaacctgagataagccaccgtctcaggaggccagctgccgggaggggagcggaaccagagataaggcgccgccctgataagaggacaaaggcgctgggaaacatcgaccagcagagggaggggcaactgcaggcccattatcaaaagaaactcggtgagtggctttcagctgggaaaattaagaccttcccacgggcattcaagcagttaatcaagggacaggagatgcagccggtggtgaatgaaacagcgcaggactgttttggatgcctgcaggcgataagccacacaaaaacagcaagccgagataaggaaaagagggaggcccaggagaaaaaaccgacaaggccttatcagaagtggatgaaaaagagagcagtgaagcgaggtaaatatctacgtttccaacgtttattccatctcgataggggaaaactagctaagattattctggatgatgtagaatgtttgtcctgtgatatctcacccagcaaaatttattcggactttaaagccagatgggaaacacctggtaaatttgatagccttggggactttcaaattaatgggaaagccgacaacagtgctttcagggacttaattacggctaaagaaattgagaaaaatgtgcaggagatgagcaggaacgcggctccaggtccagacgggtttactctgagagacatcaagaagatggaccccgagtactcccggaccacggagatcttcaacctgtggttaacatcaggaaaaatcccggacacagtgagggggtgcaggactgttttaatcccgaagtcacccaggccggagcgcttaaaggacattaacaactggagacccataacgattggatccatcttgctgcgtctgttctccagaactctaacagcgaggttaactaaagcgtgccccctcaacccaaggcaaagaggctttatcagagcggcgggatgctctgaaaacctgaaactcctgcaaactataattcgatcagccaaaagagatcataaaccgctgggtgttatatttgtggacattgccaaggcctttgacaccgtgagccaccagcacattctacaaggtctgcaggaaaggtgtgtggacccccatatcgtcagcctggtgagcaatatgtatgagaacatccgtacatatatcaccacggggaagacacagacagaccacatccagatccgggttggagtaaaacagggcgacccgatgtcaccctttttatttaatctggctatggatcccctgctatgcgaactggaaacgagaggcaaagggtaccaccgagggccgagcagcgtcacagcgatggcattcgcagacgatctggtcctgttgagtgactcctgggaaaacatgaagcagaacatcaggatagtagagaccttctgcgacctcaccggtctcaaaacacagggggaaaagtgccacggcttcttcatcaagcccaccaaggactcctacactgtcaacgactgcgctgcttggactattaatggcacacccctgaacatgatccaccctggagaatctgaaaagtacctgggcctgcagattgacccctggactgggctagcaaaatccgacctatctacaaaacttgaaagctggcttgagaaaataggcaaatctcctcttaaacctctgcagaaactcgatatcctcaaaacatataccatccctcgactgacctacctggctgaccactcggatctgaaagcagggttcctcgaggcccttgaccagacggttcggacgacggtcaaggaatggctgcatttacctgcgtgcacctgcgatgccgtcttctactcgagcacgagagacggcggtttaggcctcaccaaactggcaggactgatccctagcgtgcaagctcggagactgcatcggctcgcccagtcttcagacgagaccatgaagttgttcctggataaagttcaaatggaacaactgcataagaaactgtggattcaagctggaggggacagggagaagataccttcaatttgggaagcaaaaccggcgaatgtaccatctacctcatgcagtgcagacattacttctgagtgggaagcaccatccttaaaaactaaatttcccaaaccgtgcaattggcgtaaaaatgaatttaaaaattggactaaattagtgtcccaaggccggggaattgaaaattttgagggagacaaaattagcaaccattggatacaatattacagaggcattcctcacaggaaactccttacagctttacaactgagagcaaacgtctaccccacgagagaatttctcgccaggggtagaaaggataaatacaccaaggcgtgcagacactgcaaggcggacaacgaaaccagtgcccacatcatcggcaactgcccgataacgcaggacgcgagaatcaagaggcacaattacatctgtaaggtgctgtcagaggaggcgaagaagaaggactgggtagtgtttcaggaaccgcacctaagggataccaacaaggaactgtacaaaccagacctgatattcgtgaaagacgcccgtgcattcgtcgtggacgtgacggtacgatacgaagccagcaaaacatcgctggaggaggccgccgcggagaaagtgaacaagtacaaacacctcactgaagagatacgagaactgaccaacgcaaaggacgttgtgtttatgggctttcccctaggagcgctggggaaatggtaccatgggaacttagaactgttgggtgttctcggcctttccaaaacaaggcaggagaaggctgcccggactctatcctccattgcgctcacatcatctgttgacattgtacatatgtttgctagtagatctaggagctgtaatgtagtataggcagctctttattgttttgtagttaatttcctctgtattatttcatagcatgttttcaataaagtttcggcgggggctagggacgcagggcagccacaagccagaacatcgctcatggtaagtagggacaggacggaacttttcataacgcgtcaattaccacccgatttggaccaatttacctgatttgtccaaggtggacgggccacctttacttaacccggaaaaggaacatataatttttatatgtgttcgaaaaa

SEQ ID NO: 555 - DNA, 4454 bp, Geranoaetus albicaudatus
  source 1..4454: mol_type = genomic DNA
gatgggatcatagttactaactgggcagagctgcagaggttacacctcctcgtggtcccgctggatgcccttcggggtaaccaagttaacctctgccccagtgtgggaattatagctacttcccccctatcgtccggcctcaccgaccgttcgatagattctgtttggtgatacaaattcctggcaacgatttccagtcgctgcccaaagccttgcctacgggcacagttgggctcagtcatacagcacttgagggggtgttgtttgacttatactactcctctatctggactggcaaaatgggtcggccgatgcgaatttccttcgtgtcggtggccacacaaacaagtcctttggacttgcgtgacaatgtggtctcctgttccatccaagaccacaaaactgggggattgctggaagggagatttgaaataaggggattggagtttgtgaactctgatctggagggtctaaaatgccagcaatctcccaccctgactgacctcctggctgtgcttcctgaggtgtatgaggtacctaactcttttagtctcggggacaagaacacctgtccgactccggtggaggacgagaacgaagaggaggagccctcgcctctcggggccgtggctgggacttctccattgccatcgactccggtctcacgatcccgtgacgatctcccagcagagagcactcctgtggtgaagatcccggacaagaatacatcatgtccgtgttgtggtaatgtgaccggtaaactgtcgggtttaattgaacatctgaaaagagcacatgggaagaaaaagatcttattccaatgtgctcggtgtgggagaactgatgtcaaacaccatagtattgcttgtcattttcctaagtgtaaggggcctgtggaagcctctcccgagaggagttggaagtgtgaggtctgtgagaaaacatttgatacaaaaatcggcctggggcagcataagcgcttggtccacccagtcacaagaaatctcgagcggattaccgctgctcgccctaagacaggtactatgagaggggcacatcgtcggtgctggaccgaggatgagatggaattattgagaaagttggataaacaatatgaggggcagaaaaacatcaataagttgattgcggagcatattccgaccaagacaacaaaacagataagtgataaaagacgggaccttcgtaagagcccggtaaaaaagggaaaagatcagggtcagacaaaacatctagaactagaaggggaacacctcgtggaaggggaacatctcgtgtgcattggatcggagatggaggggggactgaggtcccgataccgaaagacagtttctgagtgggtaacagctggaaaattgtccattctccatggaatgtttgagcaggtgatcgaaggagaagaagatccagcactagttgctgataaggcaatgaaagactgtttcacgtgccttgcctctaagtccctggagttgaaaaccagccagggtcgaccgcgtcaggtggcccaaactgctcgaccttcggaaccaccaaaggggtggatgaagaagagagctgtgaaacgggggcaatttctacgcttccagcggctgttctacctggatagggggaaactggccggtattatcctggatgacgtggaatccctgaagtgtgctatcccacaagacgagatacacaacgtgttcaagtcgagatgggagtcaccgggaacattcaagggcctgggtgcgttcagatccaagggcctggcggacaactcggcattcgaagccatgatcacggcaaaagaaatctctaaaaacatccaagagatgaacaagaacagtgcaccaggaccagacagactaagtctgcgggatatcatgaagatagacccccattgtgtccagctaatggaactattcaatctatggctggtgactggcaccgtaccggacgtggtgaaagaatgtcggactgtattaatatcgaaatcatctctgccggagcgccaaatggacattaataactggcgtccaattaccatcggatcgattatcttgaggctgttctcaaggatcctgacggcaaggctggcaaaggcatgccctattaactcccgacaaaagggctttattagatcagcgggatgtgctgaaaatttgaaactgttacagctcttgattaagagtgcaaaaaaggaacatcgacccttgggcgttgtcttcattgacctggctaaagccttcgacacagtgagtcaccaccatcttatggcagtgctgaaacaaaagggtgtggaccatcacattatcaccctgattacgaacatgtatcaaaacaatagaactcgcattactgtgaagaatgagcactcggatcccatcgggattcaaattggtgttaaacaaggagatccaatgtcacctttattgtttaacttatctgtggaccccctattgtgtaagttagaggaagaagggagtggataccatcatgactctaagggtgtaacatctatggcttttgcagatgatttggtattgttaagtgggtcgtgggaaggaatgcagagtaatattaaaatcctggaggccttttgtgagctgactggcctcaggacgcagggggagaaatgccatggcttttacatacaacctactaaggactcgtatactatcaatgattgtcctccatggcagattaacggcaccccattaaatatgattgaacctggtagctcggagaagtacttgggactgagaatagacccatggactggaatatcgaaacccgagctactcaggaaaataagagattggttacaacggattggagaagcaccactgaaaccgtttcagaaagttgacatcttgaagggatataccatcccgcgactgatttacttagcagaccaagccgatgtaaaagcaacgtacctagaagaacttgacctgacgattcgaactacggtcaaggagtggctacatctacctcctagtacctgcgatgccatcctgtattccagcacacgtgacggaggattaggcatcgctagactctcgggcttgatccctagtatacaagctcgaagactgcacagaattgcgcagtcttcggacgatgtgataagatcaatagtgaaacaagaggggatcgaaaaagactttgaaaaattgtggttaacagctgggggcgatagaaataaaataccatctatttgggacccgagtgcgattagggtaacatctgaggaattgggcgaggatgaatttgcttccgagtgggaaataccaactcccaaaaccatctttcctaaaccttgtgactggcgtaaacaggaatttattaattggaccaagttacagtcccagggccgtggtattgccaactttgagaaggataaaatcagtaataattggctcgaacgatatagaggcattcctcaccgaaaactcctcacggcattacaattgagagctaacgtgtaccccactagggaattcctggcaagggggagacaggagtcgcatataaaatcttgtcgacactgtcaagcggaaaatgaatcaagcgctcatatcattgggtactgccccgcggtgcaagacgccagaattaaaagacacaaccaattgtgtgatttattgataactgaagtaaaaaagaaggattggatcgtattccaagagcccatactaaaagatgaacaaaatgagatctacaagcctgatctcgtattcgtaaaaggggaccaggcgatggttattgatgtaacaattcgatacgagagtaaactgtcatcactggcggacgcggcggcagaaaaagtaaagaaatattgccatcttaaaaatcaaattcaagaattgacgaatgccaaaaatatcaaatttaagggattccctgtgggcgcacgaggtaaatggtattctggcaattacgaagtgttgaaagcattaggaatctcaaactcccgacaagataaaattgcgcgatgtatgtcaaggaaagctttatttacttctgtcgatatcgtacatatgtttgtgagtcattctagatctattgtaagaacttgactattgttactgtttcggttatattgctcttttttgctgtattattgttggttgttcttattgcatttattgttctgtcttgtatcgttcttgctatattatcattcattgccttgttgtattactatcaattctttaataaaactacccctggtactcctgctctgttcccttggcactggaaaggttgggagagtaatttggaactcgtattcatgacgtgtcacatcaacctaaattttgacaaaatactaattggacttgacaaattctgccgaattggactattcactggattggacacaggtggacgggccacctttacttaactcggaaaagaaacatatatacttttatgtgtttgttaaa

SEQ ID NO: 556 - DNA, 4454 bp, Harpyopsis novaeguineae
  source 1..4454: mol_type = genomic DNA
gacgggatcatagttactaactgggcagagctgcagaggttacacctcctcgtggtcccgctggatgcccttcggggtaaccaagttaacctctgccccagtgtgggaattatagctacttcccccctatcgtctggcctcaccaaccagtcgatagattcgctgtggtgatctaaattcctggcaccgattctcgatcgctgcccaaagcctcgcctacgggcacagttgggctcagtcatacagcacttgagggggtgttgtttgacttatacttctcctctatctggactggcaaaatgggtcggccgatgcgaatgtctttcgtatcggtggccacacaaacaagtcctttggacttgcgtgacaacgtggtctcttgttccaccaaagaccacgggggattgctggaggtaagatttgaaataaggggattggagtttgttaactctgatttggtgggtccggaaggtcagcaatcctccaccctgattgaccacctggctttacttcctgaggtgtatgaggtatctaactctttaagtctcagggacaagaacatctgtccaactccggtggagagcgagaacgaagaggaggaggagtcctcacctctcggggctacggccaggatctctccattgccatcgactccggtctcgcagcctcgtgacgatctcccaacggagggtactcccgtggtgaagatcccggacaagaatacaccatgtccatgttgcggtaatgtgaccggtaaactgtcgggtttaattgaacatctgaaaagagcacacgggaagaaaaagatcttattccaatgtgctcggtgtgggagaactgatgtaagacaccatagtattgcctgtcattttcctaagtgcaaggggcttgtggaagcctctcccgagaggggttggaagtgtgaggtctgtgagaaaacatttgatactaaaatcggcctggggcagcataagcgcttggtccatccagtcacaaggaatcttgagcggattaccgctgcacgccctaaggcaggtactatgagaggggcacatcgtcggtgctggaccgaggatgagatagaattattgagaaagttggataaacaatatgaggggcagaaaaacatcaataagttgattgcggaacatattccgactaagacgacaaagcagataagcgataagagacgggaccttcataagggcccggtgaagaagggaaaagatcaaggtcggaaggaacatctagaattggaagaggaacactttgcggaaggggaacatcttgtgtgcgttgggtcggagacggaggggggactgaggtcccgttaccggaagacaatttctgagtgggtaacatctggaaaactgtccattctccatgaaatgtttgagcaggtgatcgaaggcgaaaaagatctaacaacagttgctgataaggcaatgaaagactgctttgcatgccttgcctctaagtcctctgagttgaaagcgggccagggtcgaccgcgtcaggtggcccagactgctcggccttcggaaccaccaaaggggtggatgaagaagagagctgtgaaacgggggcagttcctacggttccagcggctgttctacctggatagggggaaactggccggtattatcctggacgacgtggaatccctgaagtgcggtatcccacaagacgagatacacggagtgttcaagtcgagatgggagtcaccgggaacattcaagggcctgggtgcgttcagatccaggggccaggcggacaactcggcattcgaagccatgatcacggcaaaagaaatctctaaaaacatcaaagagatgaataagaacagcgcgccaggaccagacagactaagtctgcgggatatcattaagatagacccccattttgcccagttaatggaagtattcaatctatggttggtgactggcgttgtaccggacgtggtgaaagagtgtcggactgtgttaatatcgaagtcatctctgccggagcgccaaatggacatcaataactggcgaccaattaccatcggatcgattatcttgaggttattctcaaggatcttgacggcaagactggcaaaggcatgccctattaatccgcgacaaaagggctttattagatcagcgggatgtgcagaaaatctgaagctactacaactattgattaagaacgcaaaaaaggaacatcgacccttgggcgttgtcttcattgacctggctaaagccttcgacacagtcagtcattatcatcttattgcagtgcttaagcaaaagggtgtggaccatcacattatcaccctgattacgaacatgtatcaaaacatcaaaactcgcattgccatgaagaatgaacagtcggatcccatcgggattcaaattggggttaagcaaggcgacccaatgtcacctttattatttaacttatctgtggaccccctgttgtgtaagttagaggatgaaggcaatggataccatcacggttcaaaatgtgtaacatctatggcttttgcagacgacttggtgttgttaagtggatcatgggaaggaatgcaaagtaacatcaaaatcctcgaggccttctgccatcttactggcctcaggactcagggggagaaatgccatggtttttatatacaacctactaaggactcgtatacgatcaatgactgtcctccatggcaaattaacggtaccccacttaatatgattgaacccggtagttcggaaaaatacctgggactgagaatagacccatggactggaatatctaaacccgaactactaacgaaaataagagattggttacaacggattggagaagcgccactgaaaccatttcagaaagttgacatcttgaagggatatactatcccgcgactgatttacttagcagaccaagctgatgtaaaagcaacgtacttggaagaacttgacctgacgattcgaactacggtcaaggagtggttacatctacctcctagtacctgcgatgccatactgtattccagcacacgcgatggaggtttaggcatcactagactctcgggtctgatccccagtatacaagctcgaagactacacaggattgcgcagtcttcggacgatgtcataagatcaatagtgagacaagaggggatcgaaaaagagtttgaaaaactgtggttaacagctggaggtgataaaaacaaaataccatctatttgggacccgagtgcgatcagggtaacatctgaggaattgggcgatgatgaacttgtttcagaatgggaagtaccagctcccaaaaccatctttcctaaaccttgtgactggcgtaaacaggaatttataaattggaccaagttacagtcccagggccgtggtattgccaactttgagaaggataaaatcagtaacaattggctcgatcgatatagaggcattcctcaccgaaaactcctcacggcactacaattgagagctaacgtgtaccccactagggaattcctggcaagggggagacaggagtcgcaaataaaatcttgtcgacactgtcaagcagaaaatgaatcaagtgctcatattattgggtactgccccgcggtgcaagacgccagaattaagagacacaaccaactgtgtgatttacttataactgaagttaaaaggaaggattggattgtattccaagagcctatactaaaggatgaacaaaatgaaatctacaagcctgatcttgtatttgtaaaaggagaccaggcgatagttattgatgtaacaattcgatacgaaagcaaactgtcatcattggcggacgcggcggcagaaaaagtaaagaaatactgccatcttaaaagtcaaatccaggaattgacgaatgctaaaaatattaaatttaagggattccctgtgggagcacgaggtaaatggtactttggcaattacgaagtgttgaaagcattaggaatctcaaattcccgacaagacaaaattgcgagatgcatgtcaagaaaagctttatttacttctgttgatattgtgcatatgtttgcaagtcattccaggtctattgtaagaacttaatatctgctactgttctgttttatatcgggtttgctatattactacttgttgttactattgtacttactgttctgtcttatgttgtttcttgcggtattactacttactgccttgctgtattactattcaattctttaataaaactacccctggtactcctgctctattaccctggcactggaaaggtcgggacagaaaactggaactcgtattcatgacgtgtcacaccaacctaaatttggacaaaatgctaattggaaatgtcaaattttttaccgatttggaccactttaccggatttgacacaggtggacgggccacctttacttaactcggaaaagaaacatatataatttttatgtgtttgttaaa

SEQ ID NO: 557 - DNA, 4245 bp, Limnodromus scolopaceus
  source 1..4245: mol_type = genomic DNA
gacgggatcatagttacaactgggcatagctgcggggggtcacacctccacgtggtcccgccggatactccttgtgggtaaccgagttgaccccctgccccagtgtgaacggagctatggttacttccaccctatcaagtggcctcaccaaccacttgatagtatctccctaaggtgaaacaaagttcagacttctgtctaaattcctcagcccacggtaatagttgggcacgaccgacaagttcggtggggtactgtcggtcctaccaaagccccacaattggacattcgaaatgggttggtctgggcggatttggttcgtcacagttgccacccagacaaaatactcggattgggcatttacggttcattccatcacgaaccctgagctggcaggggacgggattgcagatttgagaggatgcgaatttggaaatgtggagaagggatattatgtggggcattcccctccccgatccagccttctggctactttaccggaggtatatgaaactccgagggtgatgggcaaagtcaccagcccgagttctgtgctgaccgaacatgagggagatagaacatcttctcccccaagaacaccacctcctattcttgagaccggggcagaccttccacaggagggcacacctgtggtaaaggtcccggatgataatccagcgtgtccatgctgcggtaatcgaataggaaggatttcggggcttatcgatcacttaaagagaacccatggaaagaaaaagatcctctttcaatgtgccaaatgtgggagaacaaatctgaaacatcaaagtatcgcttgtcacgttccaaagtgcaaaggcgccaaggggaccagcccattaaggggctgggcctgcgaggaatgcaatagaacatttgggactaaaattggcttaagtcagcataagcggcttgctcacccagttactaggaatatagagcgaataacagcttcccgcccgaaagaggaaagtgcacgaggtgcacaccgtcggtgttggtctgaagaggaagtgaagttgctcaagaagttggaaaaacagtatgaagggaataagaatataaacaaactaattgcagaacaccttccatcaaaaacagcaaagcagataagtgacaaaagaaggggactgataaaaagtccatcaaagaaaaatgggaaagatctgacgttgcgggaacaactcacggaggaaggagaacatctaattgagagtggctcccaagaaggtggggaactacggtcccaataccgtaagtcgattgcagaagggataagatctcagaaaataacgtcactcaggaaaatctttgagagagtgattgaagggaaagaagatctcccatccatagtcgatgaagctgcccaggatcactatgcatgcctgaaaagagatctcactgaaggggaaggtcgacaaattcaaaagatccgagagatccgcaggacccactcacaaaaaccatcaaaacaatggacaataaaaagggccagaaaacgagggcagttcctacggttccagcggctgttctacttggatagagggaaattggccggtataatcctggacgacgtggaatccctcaaatgtggtattccacttgacgtggtgcatgaagtattcaagtcaagatgggaatcacccggaacattcaagggcctgggtacttttaagaccattggtcaggcagacaattctgctttccaagctatgattaccatgaatgagattaagaaaaacatccgagaaatgaataaaaatgcggctccagggccggatgggatttccttgcgggacctcatgaagactgatccccagtgtgcgaaattaatggaattatttaatttgtggttgttaaccgggtatataccggatggggttaaaaattgtagaacaatattgataccaaaatcaactgtaccagaaaagttaaatgatgtgaataattggagacctataacgattggctcgattatattgagactattttcaaaaatattaacggcacgattaactaaggcatgccctattaacatacgacagaggggttttataaagtcatctggttgttctgaaaatctgaaattattacaaactataattcaatatgcaaaaagagaacaccagccccttggggtggtctttgtcgacctggctaaagcatttgatacggtgagccactctcacatactgtcggtattaaaacaaaagggtgtggatgaacatataataaaactaattgaaaactcgtattataacatcaaaacctatattgatttgaaaaatgaaaaatctgactctattggaattcgaattggcgtaaaacaaggcgatccaatgtctccaattttgtttaacttatctgtcgatcctctattatgtaaacttgaagaaatgggtaatggatttcaatgtcatggacaaaatgtaacagcactggccttcgccgacgatttagtattactaagtgggtcctgggaggatatgcaaaataatataacaattgtagagaccttttgtgagctcactggtctcaagatgcagggggaaaagtgccacggcttttatatcaagccaacaaaagattcctatacgatcaatgactgtcccgtgtggactatcaatgacaccccccttaatatgattgaaccaggtagttctgagaaatacttgggtctttatgtcgacccgtggataggaatatctaaaccagaactactggagaaagttgacagatggcttgtgaaagtgggcaaggcaccattaaaaccttttcagaaagtcgacatcttgaaaggatacctgatcccgagagtaatatacctcgcggatcaagcaaatttaaaaccaacatatttagaatccattgacttggctatacgaactggagtcaaggaatggttgcacctaccagcgtgcacgtgtgactccatcctttattcgaatactcaggatggagggttaggaatcagcagattggcagcactgattccgagtgtgcaggttcggagactgcacagaattgcccaaacctctgacgaagttttaaaaactatcgtcaaaagagaaggaatagaaagagaatttgagaaattatggttgatggccggtggtgataaggaaaggataccatctatatgggacccaaaaactgttatgataatatcggaaacgggcggtgaccaaatattgtcggaatgggagattcccaatccaaaactaatttatccaaaaccctgtaactggagaaaaagggaatttaataattggactaaattactgatgcaaggccgaggtattgtaaattttgaaaaagataaaataagtaataattggttaatacactataggggcattcctcaaaggaaattaattacagcattacaattacgggcgaatatatacccgacgagggaatttttagctagaggacggtcggaaacttatattaaatcctgccgtcactgtcaggccgataatgagacttgcgcacatataattggctactgtccatctgtacaagatgcgagaattaaaagacataatcaaatctgtcatatattggcagaagaagctaagagaaaagattggttggtatatcaagaaccattattaagagatcaacaaaatgaattatataaaccggatttaatttttgttaaagggaatcgagcaatagtaacggatataacaataagatatgaaacaactattaaaacgttggaagaggctgccttagaaaaagcaaagaaatatgtacatctagaatcgcaagtccaggatctgacaaatacatctgttataaattttacaggctttcctttgggatctcgtggcaaatggtaccaaggtaacaacaaaatactaaatgaactgggtctctccaactcccgacaggagaaggtcgccagacgattatcaaactatgctttattcagctcggtggatatcattcacatgtttgcgagtaaagcgagaacggaggtaagatgaattactttgaatttgcttaattgtaatgtttagatatgataagtagatgtattagtggtagtataagtagtatatagaattgtagcttgtattgtagtatgttaataaaaacggactgggatctcgtgatgattacctttaatcatgacgctcactggatggacttggtaggtggacgggccaccttcataaaacccggaaaaagttcacatacttgttatgtgttcgtaaa

SEQ ID NO: 558 - DNA, 4471 bp, Melierax canorus
  source 1..4471: mol_type = genomic DNA
gacgggatcatagttactaactgggcagagctgcagaggttacacctcctcgtggtcccgctggatgcccttcggggtaaccaagttaacctctgccccagtctgggaattatagctacttcccccctatcgtctggcctcaccaaccattcgatagattcggcctggtgatccaaattcctggcaacgatttttcgtcgctgcccaaagccttgcctacgggcacagttgggctcagtcatacagcacttgagggggtgttgtttgacttatactactcctctaactggactggcaaaatgggtcggccgacgcgaatttctttcgtgtcggtggccacacaaacaagtcctttggacttgcgtgacaatttggtctcttgttccaccaaagaccatgggggattgctggaagtaagatttgaaataaggggattggagtttgttaactctgatctggtgggtccaaaaggccagcaatctcccaccctgactgactacctggctttacttcctgaggtgtatgagatatctaactctttgagtctcagggacgagaacacctgtccaactccggtggagatcgagaacgaagaggaggagtcctcacctctcggggctacggccaggacctctccattgccatcgactccggtctcgcgatcccgtgacgatctcccgacggagagtactcctgtggtgaagatcccggacaggaatacatcatgtccgtgttgcggtaatgtgaccggtaaattgtcgggtttaattgaacatctgaaaagagcacatgggaagaaaaagatcttattccaatgcgctcggtgtgggagaactgatgtaagacaccatagtattgcctgtcattttcctaaatgtaaggggcctgtggaagcctctcccgagaggagttggaagtgtgaggtctgtgagaaaacatttgaaacaaaaatcggcctggggcagcataagcgcttggtccatccagtcacaagaaatctcgagcggattgccactacacgccccaaggcaggtacaatgaggggggcacatcgtcggtgctggaccgaggatgagattgaactattgaggaagttggataaacaatatgaggggcagaaaaacatcaacaagttgattgcggagcatattccgaccaagacaacgaagcagataagcgataaaagacgggaccttcataagagcccggtgaagaagggaaaagaccatgggcggaagaaacatctagaattggaaggggaacaccttgccgaaggagaacatctcgtgtgcattggatcggagttggaggagggactgcggtcccgataccggaagacaatcgctgagtgggttacatctggaaaattgtccattctccatggaatgtttgagcaggtgatcgaaggggaagaagatccagcaatagttgctgacagggcaatgaaagactgtttcgcatgccttgcctctaagtccgtcgagttgaaagctggccagggtcgaccgtgccagagggcccaaactgctcggccttcggaaccaccaaaggggtggatgaagaagagagctgtgaaacgggggcggttcctacggttccagcggctgttctacctggatagggggaaactggccggtattatcctggacgacgtggaatccctgaagtgtggtatcccacaagacgagatacacgacgtgttcaagtcgagatgggaatcaccgggaacattcaagggcctgggtgcgttccggtccaagggccaggcggacaactcggcattcgaagccatgatcacggcaagagaaatctctaagaacatcacagagatgaataagaacagtgcgccaggaccggacagactaagtctgcgggatatcattaagatagacccccattgtgtccagttaatggaagtattcaatctatggctggtgactggcatcgtaccggacgtggtgaaagaatgtcggactgtgttaatatcaaagtcatctctgccggagcgccaaatggacatcaataactggcgaccaattaccatcggatcgatcatcttgaggctgttctcaaggatcctgacggcaaggctggcgaaggcatgccctattaacccacgacaaaagggctttattagatcagcgggatgtgcggaaaacctgaagctgttacaactattgataaagaatgcaaaaaaggaacatcgacccttgggcgttgtcttcattgacctggccaaagccttcgacacagtaagtcaccatcacctgattgcagtgcttaagcaaaagggtgtggaccatcacattatcaccctgatttcaaacatgtatcaaaataccagaactcgcattaccatgaagaatgaacagtcggatcccattgggattcaaattggtgttaaacaaggcgatccaatgtcacctttactatttaacttatctgtggaccctctgttgtgtaagttagaggaagaagggaatgggtaccatcacggctcgaagtgtgtaacatctatggcttttgcagacgatctggtgttgctaagtggatcatgggaaggaatgcaaagtaatattaaaatcctagaggccttttgcgatctgaccggcctcaggactcaaggggagaaatgccatggcttttatatacaacctactaaggactcgtataccatcaatgactgtcccccatggcagattaacgataccccactaaatatgatcgaacccggtagttcggaaaaatacctgggactgagaatagacccatggactggaatatcgaaacccgaactactcatgaaaataagagattggctacaacggattggagaagcgccactgaaaccgtttcagaaagttgacatcttgaagggatatactatcccgcgactgatttacttagcagaccaggctgatgtaaaagcaatgtacttagaagaacttgacctggcaattcgaactacggtcaaggagtggttacatctacctcctagtacctgcgatgccatcctgtattccagcacacgcgatggaggcctaggcatcactagactctcgggtctgatccccagtatacaagctcgaagactgcacaggattgcgcagtctccggacgatgtgataagatcaatagtgaaacaagaggggatcgataaagagtttgaaaaattgtggttgatagctggaggtgataaaagtaaaataccatctatttgggacccgagtgcgattagggtaacatctgaagaattgggcgaggaggaacttgtttcagaatgggaaataccaactcccaaaaccatctttcctaaaccttgtgactggcgtaaacaggaatttaaaaactggaccaagctacagtcccagggccgtggtattgccaactttgagaaggacaaaatcagtaataattggctcgaacgatacagaggcattcctcaccgaaaactcctcacggcactacaattgagagctaacgtgtaccccactagggaattcctggcaagggggagacaggagtcgcatataaaatcctgtcgacactgtcaagcagaaaacgaatcaagcgctcatataattgggtactgccccgcagtgcaagatgccagaattaaaagacacaaccaattgtgtgatttacttacagttgaagttaaaaggaaggattggatcgtatttcatgagcccatactaaaagatgaacaaaatgagatttacaagcctgatcttgtatttgtaaaaggagaccaggcgatagttattgatgtaacaattcggtatgaaagtaaattgtcatcattggcagacgcggcggcagaaaaagttaaaaaatattgccatctcaaaagtcaaattcaggaattgacgaatgctaaaaatattacatttaagggattccctgtgggcgcacgaggtaaatggtactctggcaattacgaagtgttgaaagcattaggaatctcaaactcccgacaagacaaaatagcacgatgtatgtcaagaaaagctttatttacctctgttgatatcatacatatgtttgtgagtcattcgagatctattgtaagaacctaattatctatactgttctgctttatatattgtttctgctgtattactatatgttgttttattgtaattattgttttgtttcatattggtcttgctctgttatatattgctcttgtcgcatggttacttattgttttgctgtgttactatcaattctttaataaaactacccctggtactcctgctctgttaccttggcactggaaaggtcgagacagtaagttggaactcgtattcatgacgtgtcacattcacctaaatttacacaaaatactaattggacttgtcaaaattttctaccaaattggacaattttaccggattggacataggtggacgggccacctttacttaactcggaaaagaaacatatataattttatgtgtttgttaaa

SEQ ID NO: 559 - DNA, 4410 bp, Myiozetetes cayanensis
  source 1..4410: mol_type = genomic DNA
gatgagagcatagttacaaactgggcatagctgcagaggtcgcacctcctcgtggtcccgctggataccccttgtgggtaaccgagccgaccttctgccccagttcggagaagtggttagagcctctctctccctatcgctcggcctcgccaaccggcgatagtacagcgcttggtgaaacaaacttatggtaacagttgtctctggacctgttacccggagccttgcccgctggctttagttgggcacagctcaacagatatctgagggtgctctgtcgggttctacaaccctcactttgatttactctttttaccgaatttgtcaaaatggttaggtccatgaaattgctgcacatatcggcagctacacagaccagtccttatgactgggtggaaacccccgccaagaaattagcctacttggcaggggaggatttggaactgcaggatttagagttttttaattcaagtatgtttaatgaattgggggggtaccatcctcctatccggtgggaaggtttggagaaatatcctgaggtgtatgaagttcctttttcagatcctgactcaggagagatcacccgtgaacccccggaggaaccccagcaggacatcagggaagagagccacccctcgttaacacctgcttcgcctatccagagggaaattcctgaccagtcacctgagaaaacacccgtggtgaaggtccctgacaccaacccaccgtgtcctgtttgcaacgaccggatagctggagtaccggggctggtagaccatcttaagagggttcacgggaaaagaaaagtaaagtttcaatgtgcaaaatgtggaaaggaaaatgtaaaatgtcatagtattgcttgtcacttccctcactgtacaggacctgcagaaactgctgcggctgggggatggacctgtgaggtatgcgggaggagtttcagatctaaaattggcctgggacaacacaaaagattggcacaccctgccgaaaggaacaaagaaaggattgctgcctcccacccaaaaactgcatctcagcgaggagcccaccgccggtgctggactaaagaagaggagctgctgataaggctgatggatcagtacaaaggtaaaaagaacataaataaactgattgctgaacacattccttccaaaaccacaaagcagattagtgataagaggcggttgctagagcctgggaaaaaactcggtgggaaagaactggacttaaattcccagggagaggataatggggaacagctggctggcgatgactcatcggggccggggctcctgagggctcattatctcggaactgtcagggactggttatcagggcagaaacttcacacctttcaaggggcattcaggaacatgattgatggactgcaggagccgctgtcgattgtgaatgactccaccagggactgctttgaatgcctgggtgtgagctaccagatcaataagccatctaattccaaactgcaacagcagaaaaagcagaattcccgacccgggaaaccggccaaaaactggatgaaaaagagagctataaagagaggactatttttacgtttccagcgattatttcatctggacagggggaagttagcacggatcatcctggacgacttggactccatgaggtgcgagataccactccaggacattcactctgtgttccgaaccaggtgggaaacacccgggaagtttaatggccttgggggatttatatcaaaaggacaggctgataacagcgcctttcaagccatgatcacagacagggaaatctccaaaaacatcacggagatgagtaagaactctgccccaggaccggatgggattacactgagggacctgaggaatatggaccccaagttctcccagacggctgagatctttaatttatggttaacatcggggatgattccagacatgatgagaggctgccggactgtgttaatacctaaatcgagcaagcccgagcgcctgaaggacattaataactggtgccctattacaatcgtatccatcatcctgaggctgttttccaggattctgactgctcgactgtctaaggcatgccccatcaacccaaggcagagaggatttataagagctgctggctgctctgagaacttgaaactgttacaacttttaattcgcaatgcgaaaagggaacacagagagattggagtggtgttcgtggacattgcaaaggcttttgacaccgtaagccaccagcacatcctcatgggactgaggcaaaaaggagtggatccccacatcgtcggcctcatacagaatatgtatgaggacatctacacccagatcgatacaaaggatggtaaaaccgaccagatcaagatgctggtcggggtaaaacaaggagacccgatgtcacctctcctcttcaacctggcaatagaccccctgctctgtaagctggaagaatatggaaacggattccaacagggaaagaacaccgtcacagcgatggcctttgctgatgacctggtgctactaagcggttcctgggaagggatgaacactaacatcaagatcctggagaccttctgtgaacataccggtctccggacccaaggggaaaagtgtcacggcttctacatcaagccaggagctaagaactcctataccatcaatgattgtccggcatggactgtgaatggcactcccctcaacgtgatcgaccctggcagttctgagaaatatttgggccttcaggtagacccttggactggtatagcaaagccggaattatcggcgatggtagaacattggctgcaacgcctcgagagggcaccgctgaaaccactccagaaagtggacattttaaaaacatatgccatcccaaaaataatttatttagcagatcacacaggtacaaaaactacatttctcgagtctctggatcttcagattcgtacaactgtcaaagaatggttacaccttccgccgtgcacctgcgatgccgtcctgtattccagcgtgaaggacgggggcctgggcattaccagattggctggactgattccgagtgtgcaggcccagagattgcatagactcgctcaatcttcggacgagaccatcagggcaattcttaaagaagaacaaattgaaatggaatatgaaaaactgtgggttaaagctggaggtgataaagatataatgccatcaatctgggagcccggaccggcaccattaccacccgaacagagggacgaaacaacaccatcggagtgggaggtaagcgcacccaaaattaaatacccgagaccctgtaattggcgaaaaattgaatttaataaatggaccaaacttacatcccagggccggggggttgagaactttgaagcagataaaatcagtaacttttggattgagcattacagaggcatacctcacaggaaactcctcacagcccttcaattaagagccaacgtttaccccacaaaggaattcctggcaaggggtaggcgggataaatgcagcactttctgcaggcactgccgagcaccaaacgagtctctctcccacatcatcgggacctgcccaatcgtgcaagatgcaaggattaagagacacaattacatctgtggcatgctatctgaacaagcgaaaaaggccgattgggtggtgtttcaggaaccaaatctgcgagatgacaataatgaactttacaagccggaccttatatttgttaaggatacacaggcatacgtggtggacgttacaatcaggtacgaacaaaatttaatgactctagaaacggcggcgagagagaaagtagagaagtatcagcatctccaaaagcaggttcaggacttgacgaacgctgcaaaggttttctttgttggttttccccttgggtcgcgggggaaatggtttaataagaactatgaactgttgggtgccctgggcctctctaaatccagacaagagaggacagccagggcgttggcgtccagagcgctcctaacttctgtagatattgtacatatgtttgcaagcaggagtcgaactgcagtagtttaagtaagtgtgtattttatttaagtatttttatttaagcatgcttatctttagtgcaattgtattaaccttagctttatttttagtgcatttatagttataattttgtgattgtaatagtgtttgtattttaagttttcaataaagacagcgaccgctagggtgtagggccgccacaagacagttagagtaggctagatagtttgtagggacttgaatgtgggacttaactcatgacgtgtcttttaccaccgattttgggccaaatctttaccgattttgaccaaggtggacgggccacctttacttaacccggaaaaggaacatatattaattatatgtgttcgtaaaa

SEQ ID NO: 560 - DNA, 4430 bp, Otis tarda
  source 1..4430: mol_type = genomic DNA
gtcgggatcatagttactagctgggcagagttgcagaggtcacacctccacgtggtcccgctggatgcccttcggggtaaccaagttgacctctgccccagtgtgagagggagttatagttccttcctccctatcgattggcttcgccgacctgtcgatagtattccaggtgaaacaaatttctggcaattgattcggtatcattgcccaaagccttgcccacgggtataaagttgggcagagtctgatagcggctggagggggctgctatccggcttataagacccctcacattgcaggacaaaatgggccggccgatacgagtggccttcgtatcggtggcaacacagacaagtcccttggacttgagagacgatgtggtcattaaatccatcatcgaccacagggaagtggtgggagaggaaattgaatatagaggactggagtttataaactcacagattgttggggtgatggcccaccctcccactccgattgagactttggccatgttaccagatgtgtacgaggtccctgatgtgggtcctaggggcgctacaactagcccccatttagtggaggtggagagtgaagaggaggaggtactctcacctccgggtgcaacggctcacccaattcagataccatcaacgcctatccttggtgctggaagcgagcatccaaccgagggcacaccggttgtgaaggttccggacaataatccaccttgtccctgctgcggcaaccggatgggaaaaatgtcgggactgattgaacatctccggagagcgcatgggaagagaaagatcctgttccagtgtgcccgatgtggacggaccaatgtgaaacatcatagtattgcctgccattttcctaagtgcaaaggggatattacatctcccccaaaaggtgattgggtctgtgaggaatgcgggaaggcatttgaaacgaaaatcggcctgggacaacataagcgtttggtccacccagctgcgaggaatattgagcggattatcgcctcccgccctaaggaaggtaccgctagagggttacaccgacaatgttggacggaagaggaggttgagttgttgaaaagattggataagcagtatgagggaagtaagaacatcaataaactgattgcggaacatattccatcaaaaaccgctaaacaaataagtgataaaagaaggggacttcataagagtccaataaagagaggtgggaaagaacaaggtgggaagaaacttttggaagaggaaggagaacatcttgtggagactggttcgcatgaaaacgggggtttaagatctcattatagaaggacggtttcggaatggataacatcagagaagttacccattcttcaggggacctttgagagcgtgttggaaggatcgggagagccatcaaccctggttgatgaagcggtggacgaatcctacgcacgcatgttcagaacatccatcgaattgaaagcttgccaagagagaaagcagcggatggcccgcagggctcgtccctcggaaccaccgaaagggtggatgaagaggagggccaagaaaagggggcaatttctacgattccagcggctgtttcacctagatagagggaaacttgccggtattatcctggatgatgtggaatccctgaagtgtgaaatcccactggatgaggtgcacagtgtgttcaagtcgagatgggaatcaccgggaacattcaagggcctgggtgctttcaggaccaacgtgcaggcggacaattccgcattcgaggccatgattacggcaaaagaaatctcaaagaacatcaaagagatgagtaagaacgcagcaccaggaccagatggactgactttaagagatcttattaagatggatccagagtgtgatcaattgatggaggtgtttaatttgtggctggtcactggctctataccgaacatggtgagagaatgccgaacagtattaatatctaagtcagccttgcctgagcgtcagagggacatcaataattggcgccctattactatcggttccatcctcttgagactattctcaaggattttaactgcgaggctgaccaaagcgtgccccattaatccaagacaaaggggatttattaaatctgctgggtgtgcagagaatttaaagctattacaactgttaattaagaacgcaaaaaagaaccatcgacccctggggatagtattcgttgacttagcaaaagcctttgacacggtgagccatcatcacatcattatggctcttattcaacggggcgtggacaatcatattattgccctaattaagaacttgtacagtaacatcagtactcgaatttacctgaagaatgagcagtctgatcccattgggatccacattggtgtaaagcaaggcgatccaatgtctccgatattatttaatttggccatagaccctctgctgtgtaagttggaaaaggaagggaatgggttccaacactgttcgaggacaataacagcattggcttttgcagacgacctggttctgctgagtggatcatgggagggtatggagagaaatattgaaattttagaggcattttgtcacctgactggcctcaaaacacaaggtgaaaagtgccatgggttttacatcaaaccgactaaggactcatatacgatcaatgactgtccagcttggattataaacggcacgccattgaatatgatcgaaccgggggaaactgagaaatatctgggtctacagattgatccatgggttggtatatctaagcccgaattacgtatgaaaattgaagattggctccaacggattgggagggctcctttaaagccgtttcagaaggttgacatcttgaaagggtataccattcctcgcttgatctatctggcagatcaggccgatgtgaaagtcacatatcttgaatcccttgacctgattatacgaactacggtcaaggagtggctacatttaccaactagcacttgcgacgccatactctactccaacactcgagatggcggcttggggattgtgagacttgtgggcctgatccctaatatccaggcccgaagactgcaccgaatagcgcagtcatcggacgaactaattcgatctgtcgtccaagaagagggcatagagagagaatttgagaaactgtgggttacagctggaggaaaagtggacaaaattccatcgatatgggacccagggacggtcatgataatatcagagggagtgggcggtgaggaaccagcctcggaatgggagatagccgctccgaaagccatctttccgagaccttgtgactggaggaaacaagaatttgcgaactggaccaaactcttatcccagggccgtggtatttccaactttgaaaaagataaaatcagtaacagttggcttgaatattacaggggcattccccacagaaaactaatcacggcattacaactaagagcaaatgtctgccctacaagggaattcttagcgagaggcagacaggaattacaaattaaagcgtgccgacattgtctggcggaaaatgaatcatgttcccatattataggcttttgtcctgcggtacaggacgcaaggataaagcgtcataatcaattgtgcgaaacgttggcaaatgaagccaaaaagaaaaattggattatttttaatgaaccagtactcagaaatgagcaaaatgaattatacaaaccagatttaatatttgtcaaggaaaatcaggccatggtggtagatataacaataaggtatgaaagtaaaatcacttcccttgtagatgctgctaatgaaaaagttaaaaaatacgaacctttaaaaatacaaattcaagatttgactaattgtgagaatatcaaattttatggatttccaattggtgcacgcggaaaatggcatcaaggcaattatcaattattaactgaactgggactctcctcatcccgacgagagaaggtggctcgacaaatgtcaaagcgagcgttgtttacatctgtagatattatgcatatgtttatgagcaaatcgagaagcgtcgtgagatcataattgtaatgaattgtatattatgaattgggaataaagtatttattgtctgtttactaaagggaaagggagccgaggtggtggccccggaggcgatttcgacacaatagtaacatcctggtacgacggtctaaactatgatctattagtgggtgatctatgaatgtaattaacatcaatgatagtatgtagggatatctctggaatcagaatcatgacgtgtcacttaacaacaatttgacaccaaattactggtttgactttaaactgaatttgacactaaattactggttttgtcctaggtggacgggccacctatatttaacccggaaaaggaacatgtataaattatatatgttcgataaa

SEQ ID NO: 561 - DNA, 4211 bp, Prinia subflava
  source 1..4211: mol_type = genomic DNA
ggtagccggagagagctagttactaactgggcatagctgcagaagtcacacctccgcgtggtcccgctggatgcccgtaaagggtaactgagttgacttctgccccagtgtgagtgagggtgcacaagttgccccctccctatcggttggactcgccacccagcggtagtttcacaatttgcagaaaaaccggtttggcgcagccgttcgctgttgcccgaagccttgtccacgggctaagttggacacagtctgcagctggtggagggttctggctgtggacttggacaaccctcaattgattgtgacagtgaccaattaccatctttcggtcttacaatggtacagtctttggctttacggttggtatcaacgggcactcaaactgacccgttacatctgtgggtcagtagggctgaaattccacctcctcctgtggtgttgtgtgaggaaagttacgatctggtgacactggaatttgtgaattccaatgtgtgttttgaaggaggatttcatctgggtaacgccagggagtgcttggcccgcttccctgaaccttatgacatcttgccctctgggcttgttcgggaagagcgatttgagtgtgagataaatgaatcaggaggtccagtaacaccagtggttcctccggtgtgcagtggggctggatcacctccgaaaactccggtggtgtccgtcccggacaaaaatccatcctgtccgcgctgctccaccagattcactaggatgttggggctgattgaccatctaaagagagtccatggtcagagtaagatcttttttcggtgctctaagtgtggtaagcaacatcttaaataccacagtatcgcctgtcatgtcccccggtgtaaggggatggtcagtgtggttccaacgggcgaatggtcctgtgaggtgtgtcaccgcggttttgcaaccaaggtgggcctgggtcagcacaagagacttaaacatcctcttgtgcgaaatgaggaacggatcgcggcctctcgccccaaagagtcatctttgagaggagcccacaaaaaggtatggactgaagaggaggaggctctcctgaaacaactggtggagaggtttgctggtagtaggaacatcaatcagctgataatggagcatattccatctaaaacggccaagcagattagtgataaaagacgccttctgagtaaaagtccctcaaagaaacatctaggagaaggcgagaaagtcgggagtgaacatcctccccaatctgctaaagggccacaagagggacagttaaagctccattatattgggaccatcaggcggagactatcagctggcgggttcactagttgtaaggaggccttcttaaaaatcttagatgggcaagatccgcagaaagtggtgaatgaggaatatgagatgtttcgggatagcctgagtaggcttggccctaggactcccaggggtccgaggttgcgaaggctgcatggcccagacgcatccaaaataacagctaaatggatgcgtaaacgtgctgagaaacgtggaaaatatcttcgatatcagaggctgtttcaggtgcatagaggaaggttagcacgtgtcatattggatgacacggaagccctgcaatgccaaataccatctggcactgtccatagtgcttttaaggcaaggtgggagtcatcggtttgttttaagggtcttgaaacgttccctgtttacagggacgcggataacatcaagtttcaagacctgattacggagaaagagattggtaaaaacttggatgagatgaagacaacctctgctcctgggccagatgggattactttgggtcacctttccaaattggacccgaagttctcccggttgactgagatcttcaacctctggctcgttaccggaacggtaccggatgcactccgggaatgccggacagttttgatacccaagtcctcccgggaggagcgtcttggtgatatcaataactggaggcctatcaccattgcatctgtggtgcttaggttgttctccaggatcgctaccgcgaggctgtcgcgggcatgtcccatcaaccccaggcagcgggggtttattagtgcgtctggctgttccgagaacctaaagctgttgcagcttatggttaagtgtgcgaagcaggagcggaaaaatctgggggttatgtttgtggacattgccaaggcttttgacaccgtgtgtcatggacacattctggcgggtctggctcagaggggggtcgacccccatattgtggggttggttggtgagatgtacaacaacatcaaaacgtacatcgtcaccaggaaagggagaacagacccaattaccatcagttctggtgtcaagcagggcgacccaatgtcaccagtgttgttcaacctggcacttgaccctcttttatgtaaacttgagacagagggcaaagggttccatcatggtgggtttaagattacggccatggccttcgccgacgatctggtactgctgagtgattcctgggaaggcatgtgctataacatcaagattctggagaccttttgtgagcttaccggtctccggactcagggggagaaatgccacggcttttacatcaagccgacaagggactcttataccatcaatgactgtccagtttggcaaattaatgggaccccccttaacatgatcgacccagggacctctgagaaatatctaggcgtccagatcgacccttgggttggcttcgctgactcaggcttatccgcgaaactggaagagtggcttgatcggattgggcaagcaccactcaaacctcttcagaagctggatatactcaggacctataccatcccgaggctgatatatctagcagaccataccgaggtaagatcggggctcctcgagtcccttgacttggccatcagaaggaaagtcaaggagtggctgcatctccctccaagtacatgtgatgccatcctgtattcgagatttaaagacggtgggctgggtatcatcaagttggcggcgctgattcctaacatccaggcgcgaagattgttcaagttggctcaatcttcggatgtggctcttgtctcatttctgaaaggggaacaactagagaggacttttgagaaactgtggttgagagctggggggactagagagtccatcccgccaatttgggagcccatccccatggacgaaggggttgcagagggagataaagccttatcggagtgggaggccccccgttcccgattccacgctccaagaccttgtgattggagaaagttggaatttaagagatggatacagctggtttcccagggtcacggtgttggtaactttgagaatgacaagatcagtaattggtggatggtacaataccgcggcattcctcacaggaagctaataacggcgctacaattaagagcaaatgtctacccgactcgtgagttcctggctaggggtaggcaagatgtctgtgtaagatcatgtagacactgtggcgcgcagttggaaacaaccgcccatatcatcggaacctgtccaatcactcaggaggccaggattaaacgtcacaattccatctgtgagactcttagcggtgaagctaagagggagggttggacagtgtttgaggaaccacacttgagggatgaacagaatgaattatttaaaccggatttgatctttgttaaaggtgaaaaggcacttgtggtggacgtgacagttagatacgagcacagcagctcatctctcaaagaggctgcggccgagaaggccaagaaatatcaacgccttctaccgcaaattcgagatcttacaaatgcggcggccgtccagtttgttggtttccccttgggagcgcgggggaagtggtatgagagaaacgctgagttgctgttggccctgggtctctctaaagcgaggctagggaggatagcccgggccctagcatccaaggcgctcctctcatccgttgatatcgttcatatttttacaagtaaggctcgtgctctgtaccatgaaataaattaaggccccttccctgcatggtgagatctggatagtgggaattggttttgggagggaggggttcatcagttcataacgtgtcttgccctttgtgggctacaaattccaatctggtcaggtggacgggccacctttacttaacccggaaaagaaacatataattttatatgtttattaaa

SEQ ID NO: 562 - DNA, 4237 bp, Scolopax minor
  source 1..4237: mol_type = genomic DNA
gacgggatcatagttacaactgggcatagctgcggggggtcacacctccccgtggtcccgccggataccccttgtgggtaaccgagttgaccccctgccccagtgtgagcagagctatggttacttcctccctatcaagtggcctcaccaaccacttgatagtatctccctaaggtgaaacaaagttcagactttgtgtctaaattcctgggcccacggtaagagttgggcaactctgacaagttcggtggggtactgtcggaggggttaaatccccacaattcggactttcgagatgggatggtcagggcgaatgagattcgtctcagtggccacccagactaaatattcggattgggcatttacggttccttccatcctgaaccctgagctggcaggggatgagattgcgaatattagtgcgaatatcagtggatgggagtttgtaaactcggagaaagggtacgatgtggggctttctccatcccggtccagcctcctggctacattaccggagccttacgagtctccgagagtcatgggcatagtcatcagcccgcgttctgagcagaccgaatatgaaggagagagaacatcctctccaccaagaacaccatcacctcccgttcttgaagccggggcagacctccctcaggagggcacacctgtggtgaaggtcccggacaacaatccagcatgtccatgctgcggtaatcgaatgggaaggattacggggcttattgaccatctaaagaggacccacgggaagaaaaagatcttgtttcgatgtgcccaatgtggaaagacggacgtgaaacatcacagtatcgcttgccacgtcccaaagtgcaaaggcgccaaggagtccagcccgttaagagggtggacctgcgaggaatgcaatcgaacgtttgggagtaagattggcttgagccaacataaaagactggcccacccagttgcaagaaacatagaacgaataacagctgcccgcccaaaggaggaaagtgcaaggggtgcacaccgtcggtgttggtcggaagaggaggtggaattacttaaaaggcttgaaaaacaatatgaagggaataagaacattaataaattgattgcggagcatttaccaacaaaaacagcaaagcagataagtgacaagagaaggggactggcgaaaagtccacctaagaagaaagggaaagatctggcgctgcgagaacaattgatacaagagggggaacacctggtaccgagtggctcacatgaagttgggggactacggtcccaatatcgaaaggtgattgccgaatggttaagatctcagaaaataaccactctccggaagacctatgagagagtgattaaagggaaagaagaccttccctcgctagtggatgaagctgcccagaaccactatgcatgcctgagaaaagatctaattgaaggggaggtccatcaaatacgaaagatccgagaaatccgcaggccccgtccgcaaaagccatcaaaacaatggacaataaaaagggcccgaaaaagggggcagttcctacggttccagcggctgttccacctggatagagggaaacttgccggtattatcctggacgatgtggaaaccctcaaatgtggtttgccactcgaggcggtacatgaggtattcaaatcgagatgggaatcacccggaacattcaagggcttgggtacattttgtaccgttggacattccgataactcagcattccaatccatgataaccgcgaatgagattaagaaaaacatccgagaaatgaataaaaacgcggctccaggaccggatgggattaccgtgcgggatctccttaaatgcgactcccaatgtattaaactaatggaattattcaatttgtggttgttaaccgggtatataccggatgatgtgaaaagttgtaaaacgatattgttaccaaaatctaatgtaccagaaaagttaaatgatgtgaataactggagacctataaccatcggttcgattattttaagactgttttcaaagatattaacggcacgtttaagtaaggcatgcccaattaacaccaggcagagggggtttataaaatcgcctggttgttccgaaaacttgaaactattacaaacattgattcgatatgcaaaacgggaacaccaccccctcggggtagtctttgtcgatctggctaaagcatttgatacggtgagtcactcccatatattggcggtattgagacaaaagggagttgatgaacatataatacgattgattgaaaactcatatcaaaatatccatacttatattgacatgaaaaatgaaaaatcagaacctattggcattcgaattggcgtaaaacaaggcgatccgatgtctcctattttgtttaacttatctgttgatcctctactatgtaaactggaagaaattggtaatgggtttaaatgtcattcacaaaatgtaacagcactggccttcgccgacgacttagtgctattaagtggatcctgggaaagtatgcaaagtaacatcgaaattgtcgagaccttttgcgaacttactggtctcaaaatgcaaggggaaaaatgccacggctttcttattcagccgacgaaggactcgtataccatcaatgactgtcctccatggactatcaatggcacccctcttaatatgattgaaccgggtagttctgagaaatacctgggtctttacattgacccatggactggaatatctaaaccagaactattggagaaagttgacagatggttggagcgagtgggaaaggctccgttaaaaccttttcagaaggttgacatcttgaaagggcacttgatcccaagattggtatatagtgcggatcaagcaaacttaaaaccagtatatctggaacatattgacttggctataagaaatgctgccaaggaatggttgcacttaccagcgtgcacttgtgatgccatcctatattcgaacacacaggatggggggctaggaattagtagattaacagcactaattcctagtattcaaacccggagattacacagaattgcccagacatctgacgatgtgctaaaagagattgtaaaacaagaaggaattgaaagggaatttgagaaattatggttgatggccggtggtgataaagaaaagataccatcaatatgggatcctaaaacaattatggtaatatcagagacgggcgatgacgaactatcagaatgggagatgcctaatcccaaattaatctatccaaaaccttgtaactggagaaaaagagaattcactaattggaccaagttgctatcacagggccgtggtattgttaatttcgaaaaagacaaaataagtaacaattggatcacacaatacaggggcattcctcaaagaaagctaataacagcattacaactgcgcgctaatatttatccaacaagggaatttctagccagaggacgtgcagaaacttatatcaaatcctgccgtcactgccaggccgataatgagacttgcgcacacataattgggtactgtccatctgtacaagatgcgagaataaaaaggcataaccaaatttgccaaatactggcagaggaagcaaaaagtaaagattggctggtatatcaagagccattattaagagacgaacgaaatgaactgtataaacctgacttaatatttgttaaagggaatcaggctattgtaacagacgtaacattgagatatgaaacaactgtaaaaatattggaagaggcggcattagaaaaagctaaaaagtatgcacacttaaaaacgcaagtccaagacctgacaaatgcatctattgtaaattttacaggctttcctttgggatctcgtggcaaatggtaccaaggtaattacaaggtactaaaggaattgggcctctccagctcccgacaagagaaggtcgccagacgattatcaaactatgctttattcagctcggtggacattgttcacatgtttgcgagtaaagcgaggacagaggtaagataaatttgaatttgtctttttgtagagtaataagtagatgtattagatgtagaatgtagtattgtagattgtaatgtagtatgcaataaaatctggactgggatctcgtgatgattaccttaatcatgacgcgcactggatggacttggtaggtggacgggccaccttcataaaacccggaaaaagttcacatacttgttatgtgttcgttac

SEQ ID NO: 563 - DNA, 4519 bp, Serinus canaria
  source 1..4519: mol_type = genomic DNA
gtctagttacaactgggcatagctgcagagatctcacctcctcgtggtcccgctggtaagcccttaacagggtgactaagtagatctctgccccagtcaaggagccgctgggaatcaccagcccagcgattcctttcaaatttaggtgaaacaaatttctcggtgtgggtcgcaagacttactacctaaaacatggccccacggtctgacaggggcaacgggttcggagatgggccggccacccatcccgttcccgtcaatgaaattggccaagaaccgattgatcccgacccgttcctcggaggggagaactgtgggctgccgctacgcctgttcggtgtatcggtgggcactcagacttcccaagaggacttaacgcctataccaaccaaattggcagtaaatgaattggatgtactggtgaatttttcttttgaggtttatagatcagatctgaagggttatgttgggggggttcattttcctgttaatttggaggtactggaagggtttccggaggtgtatgaacatcttgaacctcaaccatgccagggggacaatttagatcctagtccccctgacgacggtgtacaggttgtgcttgggagggaggagggtaaaaaggagagggagggtgcacctgaggcgctgcctccagtgcaaaggggccacagcgaacaggtaccggatgacatcgtgaaggtaactgttcccgacaaaaatccaccttgtccctgctgtagtacccggctaaactcggtgttggccctgattgatcatcttaaggggtcgcacgggaaacggagggtgtgctttcggtgtgccaaatgcgggagggagaactttaaccatcacagtactgtttgtcattttgcgaagtgcaagggtccatcggaggaaaagcccccggtgggagagtggatttgtgaggtatgcggtagggattttacaactaaaataggtctgggacaacataaaagattggcgcatccaatggttagaaatcaggaacggatcgatgcttcccagccgaaagagacgtcaaatcgaggagcccacaaaaagtgctggacgaaggaggaggaggaacttctggctagattggaggtacagtttgagggacacaaaaacatcaataagcttatcgcggaacatattacaactaaaacaaataagcagattagtgacaaaaggagacaaatgaccaggaaggataaaggagagggtggagcagctgggaagctaggaccggacactgggaggggaaaccactcccaggcgaaggtcgggaacaatggacttggtgggaaccaactgccgggaggaccagctgctacaaaagataaggcaggatgtcatcttgataaggaggaaggtaaccggatagccattagccaacaaaagaaggggcggctgcagggtcgttatcacaaagagatcaagagacgcttagaggaaggggtaattaacacctttaccaaagcctttaaacagctattagagtgccaggaggtacagcctttgatcaataagacagcgcaggattgttttggcctcctggaatcagcgtgccacatacgaacggcactccgtgggaaaaacaaaaaggagacacaggaaaagccaacaggaggacagtgtttgaagtggatgaagaaaagagcggtcaaaaagggtaattaccttcgcttccagcggctttttcatctagacagggggaaattagcaaggataattttggatgacatagaatgcttgtcctgtgatatagcacccagtgaaatttattcggtgtttaaagccagatgggaaacacccggacagtttgctggccttgggaactttaaaagtaccgggaaggctgataacaaagccttcagtgacttaattacggctaaagaaattaaaaagaatgtgcaggaaatgagcaagggttcggcaccaggtccagatgggattgccattggggacatcaaagggatggatcccgggtattcccggaccgccgaactcttcaacctgtggttaacatctggtgagatcccggacatggtgagggggtgcaggactgtattaatccctaaatcgacgcagccggaacgcctaaaggacatcaataactggagacccatcacgatcggttccatcttgctgaggctgttctccaggattataacggcgaggatgacgaaggcgtgccccctcaacccaaggcaaagaggcttcatcagagcggcgggatgctctgaaaatttaaaactcctgcaaactataattcggactgctaaaagtgaacatagaccactgggtgttgtattcgtggacattgcaaaggcttttgacaccgtaagccatcagcacattttacatgttctacagcaacggggtgtcgatccccacattatcggactggtgagcaatatgtacaaggacatcagtacatttgtcaccacaaagaaggacacacatacggacaaaatccagatccgggtcggagtgaagcaaggtgacccgctgtcaccccttctgttcaacctggcgatggaccccctgttgtgcaagctggaagagagtggtaacggattccatcgaggaggacacacgattacagcgatggcattcgccgatgaccttgtcctgctgagcgactcctgggaaaatatggagaagaacatcgagatactggaggccttttgcgatctcaccggcctcaaaacacaggggcaaaagtgccacggcttttacatcaagcccacaaaggactcttacaccgtcaacaactgcgctgcatggaccatctacggcacacccctgaacatgataaaccccggagactcggagaaatacctcggcctgcagattgacccctggactggtatagcgagatccaatatctcgtcaaaattggactcctggcttgaacgcatcaatcaagccccactcaaacccctacagaaactcgacattctcaaaacatacaccatccctcggctgacctacatggtggaccattcggagatgaaagcaggggctctggaagcacttgacctgcaaattcgatcagcggtcaaggactggttgcacttaccatcgtgcacctgtgatgccatcttatacgtgagtacgaaggacggcgggctgggcgttactaaattggcaggtctgattcctagtatacaggctaggaggctacatcgaatcgctcagtcccctgacgagacgatgaaagcgttcctggacaaggagcagatggagaagcagtatgctaagctatgggttcaagctggagggaagagggagaagataccgtcaatttgggatgcactaccgacacctgtactgctcaccactagcgacactctttcggaatgggaagcaccgaaccccaaaagtaagtaccccagaccgtgtaattggcggaggaaagaatttgaaaaatggacaaaattacaatgtcagggcaggggaatccaaaattttaagggtgatgtgattagtaacaattggattcaaaattatagacgcatacctcacaggaaactcctcaccgcagtacaacttagagccaatgtataccccacaagggaatttctcgggcgggggaggggcgatgactgtgttaagttttgtaggcactgcgaggtggaccttgaaacctgcggccacatcatcagctattgcccggtgacgaaggaagccagaatcaaaaggcacaatcgcatctgcgagaggctgattgaggaggctgaaaagaaggactgggtggtgttcaaggaaccgcacataagggacgctgtgaaggagctattcaaaccggacctgatattcgtgaaggaggaccgggcacttgtcgtggatgtgacagtacggttcgaggcaactacaacatcgttggaggaggcggctattgagaaggtggacaagtacaagcgcctggaaaccgaagtacggagcctgaccaatgcaaaggacgttctttttatgggctttcccctaggagcgcgggggaagtggtaccaagggaactttaaacttttagatatgcttggcctctctgaatcaaggcaggtcactgttgcaaagactttatccacagacgcgctcatctcctctgtggacattgtacatatgtttgccagtaaggctaggaaaatgaatttagtgactgtttagagtaggattttttatttgatattatgtatgttttataccttgtacttttgttttttatattgtattggggggattttttgtagcatgggattgtttttattgtatgacctttttgatattttttaataaactagacggtagctatgggggttagggcacgccacaagccagttagggcgctcatagtgagtagggacagtaattttaattcacaacgcgtcaattaccatctgattcggaccaatcttacctgacttgtactaagttaccggatttgtcccaggtggacgggccacctttacttaacccggaaaaggaacatgtattttatatatgtgttcgaaaa

SEQ ID NO: 564 - DNA, 4212 bp, Setophaga kirtlandii
  source 1..4212: mol_type = genomic DNA
ggggagtatagttacaactgggcatagctgcagagatcgcgcctccccgtggccccgctggtaagccattaaaagggtgactaagtcgatctctgccccagtgtgagagaggagggctatctatcctccctgtcattggactcgctacccagtggcagcttcacgagttgcagaaaccacaaaatttggcacagctactccgctgttgcatagagccttgtccacgggctactgttggacaaagctgatagtttggaggagggacagctatcagctaatactaccctcacttggattttctgcactgacattatggtacaatctctagctttgcattttgtctcgatcgcaactcagactgacccattagatctgcgggtcactgaggttaaagttccatctataccctctgtgcccagggtagagggattccaactggtatgtttggagtttataaactccagcattattagagagagtggtatacatcaaacagatgtatgggaaggattggcactgttccctgaggcctatgagaccgcccctatagggccggctcaggacatgccagagggtgcggtcgggaataccggaagcactgatgagccaaaaacacctgaagctcctcccgagtcagacagcacaacagtgaaaacatctgttgtgtcgtcccagacaaacaaccatcatgtccaatatgtgagactcggtttactaggatgttggggctcattgatcatcttaaaagggctcacgggcagaaaaaaaaagatcattttcagatgttcgaaatgtggtaaacaaaatcttaaataccacagtattgcctgtcacgttccacgatgtaaaggtgtggtgtgtatggttccaactggagaatggatttgtgaggtatgtcacagtgggtttgccaccaagattggccttgggcaacacaagaggattagacatcctcttgtgagaaatgtggagagaatagttgcctcccatcccaaagagtcatctgctcgaggggcccacaagcgggtatggactgaggaggaggaggctctcttggtacaattggtgggcatgttcgctggtaaaaggaacatcaatcagttaattgcagagcagattccatcaaaaacggcaaagcagatcagtgataaaaggcgccttctatttaaaactccctctacaaaacatcggttagaaaaagggggtgccttcggcgttgaacatcaagccgagtctgctgtgttgccaaaggagggaaaattaaggctccgctaccacgaagcgatcacagcgggactactggagggcaagtttactgtgtatccggaagccttcaagaaagttttggaagggcaaaatctgggtcaggtggtgaatgatgtatatggtgatttctgtggtgttcttgaggtgcatagcccaactaaatctgtcaagggtcggaagtcgcgatcatcccatagccccaaagcatccaaaaatccaactaactggatgcgcaaacgagcaataaagaggggtaaattcttgagatatcaattgttatacgagttgcatagaaggcgcctcgcacgtatcatcttggacagtacggaggccgtccaatgccaattaccatctggcgttgtccatgagcactttaagaaaaggtgggatatctctggtttatttgttggcctacagaactttcctccctatgaggaggctggtaacacctggttcgaggccctgataactgagaaagagattgaaaggaatgtgagcgagatgtgtaaaacatctgctcccgggccagatgggattactttgggtcatcttgttaaaaaagaccctaagttttccctgttgtgtgagatcttcaacctctggctcattaccggcactattcctgatgcactgcgggactgcaggacagtcttgatacccaagtcttcagcggtagagaagcttggtgatatcaataactggaggcccatcaccataggttctgtggtgattaggttgttctccaggatcgctacggcgaggctgtccaaggcatgtcccattaatccccggcagcgggggtttatttgtgcatcaggttgtgctgagaacctcaagctattgcagcttgtggttaaaagagctaagcgagagaggaaacatctgggtatggtgtttgtggacattgctaaggctttcgacactgtatgtcatctgcatgtaattgaaggtctgatccagagaggtgtggattctcaggtgattgagttggtaagggaaatctatcaggacattaggacctacatttccatgggaaaggaaaggacagaccacatttacatccgctctggtgtcaaacaaggcgacccgatgtcacctttgctattcaacctggcgatggatccccttctatgtaaacttgaaaaagaaggtgaaggtttccatcatgctggttggaaaatcacggctatggctttcgctgacgatttggtgctgctgagcgactcatgggaaggcatgtgtcataacatcagaattgtggaggctttttgtgagcttacgggccaccggacacagggggaaaaatgtcatggcttttacatcaagcctactagggactcatataccatcaatgactgtcccacttgggtaattaatggatccccacttaacatgatcgacccagggagctcagagaaatatcttggcacatgggtggacccttggacgggctttgcggatcatggactatcagagaggtcaacagattggctccaccggattggtgaatcacccctgaaacctcttcagaaagtcgatatactcagatcctataccatccagaggctgatatatttggctgaccatactgaggtaaatatgggctttctcgaatcccttgacctgtcaattcggaatgcggttaaggagtggcttcaccttcctccgagtacatgtgatgcgatcttgtattcgagttttaaagacgggggtttgggacttatcaagctggcagcgctggttcccagtgttcaagcgcgaaggctgcataggttagctcagtcttcggatggagttcttgtgagttacttaagagagatacacctggaaagtttatttgagaaattatggttgaaagccggtggggatcaagaatccatcccgtcaatttgggagcccttaccattgagtgaagtaggagatgttggtgatggccggtttggatgggatgcacctctcctgaaaatccgctatccgaaaccctgtgattggcggaaaaatgaatttcggaaatggtgtcatctggtcagccaaggtcacgggattgagaattttgaaaatgatgagatcagtaatgcatggattaagaggtttaaaggcatacctcaccgaaagttgataacggctctacaacttagagcaaatgtctacccgacaagagaattcctggctaggggtagacaagatgatgcggttcgatcatgtaggcattgtggcgctacatttgaatcagttgctcacattgtcgggaactgtgcaatcactcaggatgccaggattaaaagacacaatgctatctgtgaagtcctgagtgaggaagcaaagagagaaaaatgggttgtgtttcaggagccacacctaagagatgatgaaaatgaattatttaagccagatttaatcattgtgaaaggatctaaggcgatggtagtggatgtaacagtgaggtatgaacattctgtcacctcattgaaagaagctgcctcggagaaggccaagaaataccagcgccttcacttacagatacagagactaactaatgctaaagacattgaatatgttggcttccctatgggggcccgtggtaaatggttcagcaggaatactcagttgctgaccgcccttggtctctctaaaacgaggctagagagaaccgcaagggccctagcatccagagtactctttgcttctgtggatattgttcatatttttgctagcaaaggtagatcgattgtaactgtttaatttgttattaataaaatttaggcccctcccctctgtggttgctggacagtggaattggttttgggtgggaggggttcatccatcataaccatgtcgtgcccatatttgggcaataaattctgattggactatcaggtggacgggccaccttacttaacccggaaaaggaacgtgtacattttgtgtatgtttaattaaatagcc

SEQ ID NO: 565 - DNA, 4370 bp, Tyto alba
  source 1..4370: mol_type = genomic DNA
gacgggatcatagttactaactgggctcagctgcagaggtcacgcctcctcgtggtcccgccggataccctcttgggtaactgaagtggcctctgccccagtgtgatgagatatggttacttcctccctatcaagtgacttcaccgaccacttgatagtatctaattggtgatacaaaatttcggagtcttaattgactacccagagcctggcccacgggcctatgttgggcgcagtctgacagctcgtaagggagtgctgtctggcttaaatttgacccttacctggatttgacaaaatgtgtctagcagcacgaatagccttcgtgtctgtgggcacccaaacaagtcttttagacttgcgtgacgatgtggtccctcgtaccatcagagaccacgccaaattggtggacgttgggataaattttagaagattggagtttgttaactcagatgtggaaggattggaagggggagatctatccaccgtgactgagagtttagccatgttgccggaggtgtatgaggaaccttccccttctgcactggagggcaaggacatcagccccctccttcgggagagtgagtcagaaggcgagggggagctctcgcccccaggggccgtggctcaactcttcccattgccatcgtcgcctatcctggcttccgggggagaaccttcaccggaaggtacacctgtggtgaaggttccggacaaaaatacatcttgtccatgttgtggaaccaggataggaaaagtgtcgggactggttgaacatctaaggagagtgcatgggaggagaaagatcttgtttcagtgtgcgctgtgtgggaaaacgaatgagaaacatcatagtattgcttgccacgttcccaaatgcaagggagccatagaggcaaccccaaaagaagggttggcgtgtgaggagtgcggacggacatttgaaacaaaaatcggcctgggacaacataagcgtttggcccatccagtcactagaaatctggagcgaattatggccgcacgccctaaggagacttccgcgagaggggtacaccgaaagtgttggacggaagaggaagtcgagatcttgcgtaagttggagaagcagtatgaaggaaacagaaacatcaataagctgattgcggaggaattgcccttcaagacagcgaagcagataagcgacaaaagaaggattctgcacaagagtccggttaagaagagggaagaagaccaagagtggaagaaacatctgagagaaggggaacatctggtgagcattggaccccggaaaagaggtggggggctgaagtcccattatcgaaagactatctcaaaatggataacagctggaaaactgcgcattcttcatgcgacatttgagaaggtgatcgaaggcggagaagatctgccaacgacagttggtggtgcggtggaggactgttacgcacgcctgttcaagaggtcctccgagttggaagcgagtcaggggaggaaactccagacggcccgcacggcacgctcttcggaaccaccgaaggagtggatgaagaagagggccaggaagagaggggagtttctacggttccagcggctgttccacctggacagggggaaactagccggcataatcctggacgatgtagagtccctgaagtgcggtctgccgcttgacgaggtgcactgtgtgttcaagtcaagatgggagtcgccgggaacattcaagggcctcggaggtttcaagaccctgggtcgcgcagacaactcggcattcgaagccatgatcacgtcgaaagaaatctcgaagaacatcaaggagatgagcaagaactcagcaccaggaccagatggtcttagtttgaggggtcttatggctattgacccccactataccatgctggcggaactgtacaatctgtggctgctgactggtaccatcccggacatggtgaaagaatgtcggaccgtgttaatatctaaatcagccctgccggagcgccagaaggatattaataactggcgccccattaccatcggctcgacggtcctgagattattctcaaggatcatcacagcgaggctgaccaaggcgtgcccgatcagtccacggcaaagggggtttataagatctgctggctgcgcggagaatctaaagttgctgcaacttctgattcggaacgcgaagagagaaaagcatcccctgggtgtggtgtttgtcgatctagcaaaggccttcgacacagtaagccataatcacattattgaagtgttaaaacaaaagggtgtggacaaccacataatttctttgatttccaacatgtacagtaatactcatacatatatcgacatgaagtctgagcagtcggatcccatcgggattcggattggtgtgaaacagggtgatccaatgtctcctatattgtttaacttatctgtggatcctctactgtgtgtattggagaaggaggggagtgggtaccaacattattcgacgagtataacatctatggcttttgcggacgatctggtactgctaagtgggtcctgggaaggaatgcggagaaatattgaaattgttgaggctttttgtgatttgacgggtctgaaaacacagggagagaagtgccacggcttttatatacagccgactaaagactcgtataccatcaatgattgtcctgcatggaccattaaaggcactcccctcaacatgattgagccaggcagctcggagaaatatctgggtctgaaaatcgacccgtgggttggtatatccaaaccggaactgctggccaaaattaaagattggttacatcggattgaccgggctcctttaaaacctatgcagaaagtagacatcttgaaagtgtataccattccgcgcatgatctacttggcagaccagtccgatgtaaaagtctcgtaccttgaatcgctagatttgacaattagaactgctgtcaaagagtgggtacacttgccacctagtacctgtgacgccatcctatattccagcacaagggatggcggtctgggactcaccaggctatcggggttaattcccagtgtgcaggctcgaagactgcacagaattgcgcagtcttcggatgaggtgatcagggaaattgtaagtaaagagggtatagagaaagagtatgagaaattatggttagcggcaggaggaaataaggaaaagattccatctatatgggacccgagttcggccatggtgatcacggaagtgttgggcgggatagatcaatattcggaatgggaaaggcccgctcctaagaccatatttccgaaacctagtgattggcgtaagcaagaatttataaagtggaccaaattggcttcccagggccgtgggattaccaactttgagaaggataagatcagtaacagctggttagaaagatataggggcattcctcagagaaagatcgtcaccgctttacaactacgggccaatgtctaccccacaagagaatttctagcgaggggtaggcaagagacacatgtaagatcgtgtcgtcactgtggagcggaaattgagagctgttcgcatatcatcggatactgcccggcggtgcaagacgcgagaataaaaagacataaccaaatttgtgaattactaattgaggaggcaaagaaaaaggaatggatagcattccaagaaccattgattcgagacgagaaaaaagaattattcaaacccgatttggtatttgtaagagaagaaatagcaatagtagtagatgtgaccattagatacgaaagtaaagaaacatccctagaggatgcggccaaagagaaaattaagaaatatcagcatttggaagatcagattcaggaattgactaatgcaacaactattaaatttatgggctttcccttgggggcacgtggcaagtggtaccagggcaattacaccttgttaaaggaattgggactctctagttctcggcaagataaagttgcacgtcgattgtctaatcgtgcattgttttcttctgttgacatcattcatatgtttagtagtaaagtaagaactgtagaaaatgtttaattgtatcatcacattgtagttgtaatatctgtgcactgtattacttttaattaataaaataaagtggtatgaagagccgacatggaaggatcgtgggggggttagatcaggagagaaaacgatcagagtattgggatttcaacatagtaggtgggaatcttgttctttttatgacgcgtctcaaccgaaattgacattaacaattggacttgacaaaatttttcaccaatttggacccaggtggacgggccacctttacttaactcggaaaagaaacatatataatttatatgtgtttgataaa

SEQ ID NO: 566 - DNA, 4189 bp, Aphelocoma californica
  source 1..4189: mol_type = genomic DNA
gagggcgttgttactaactgggcatagctgcagaggtcgcacctcctcgtggtcccgccggatacccgtaagggtaactaagtcgacctctgccccagtgtgagtgagggggaaatatctcccctccctattgctggactcgccacccagtggtagattcacgaaacgcagaaacaaatttattggcgcagctcttcgctgttgcccaaagccttgtccacgggcattagttggacacagtctgcagattggttgggggttccacctgcagactttgacaacccctttctgatttgaccaaacgccatcttggtctcgaccatggtacagtcagtggctttgcggtacgtatctacagccacccaaactgacccattagacctctgggtcagagaagccaaaattccatcaccatctgtggtgatagaagaggaaagatttgatctggtatctttggagtttaataactccaaaattgcctttgaaattgggagccatctgggtaacaccgcagattgtttggccttgtttcctgaaccttatgaaaccttgcccgctgggctggtccaggaagaaacgattgggtgtgaaataagagaatcagaggagccaacaacacctaggactcctcccggggacaaaaggggcggaacaaatacgggaactcctgttatgtctgtcccggacaaaaatccatcatgtccaagatgtatgacccggtttacaaggatgctggggttaataaaccatctaaagacggcccatggctgcaataagatctggttcaggtgctctaaatgtggtaaacaaaatctgaaataccacagtatctcttgtcatgtcccccgatgcaaaggtgaaggatttgtggctcctacggggtgctgggtctgtgaggtatgctctagaggttttgccacgaaaattggactgggtcagcacaagaggttacaacatcctcttgtgcgcaatgtggaacggatagctgcctctcaccctaaagaaacatctttgcgaggggcccataagaaggtatggactgaggaggaggaggctctcctgaacgaattggtgataaagttcgccggtagcaggaacatcaatcagctaatagcggagcacataccatctaagacgccaaagcagatcagtgataaaagacgccttctaaagagtccctcaaagaaagttcaatctaaagaaggcggggctatagggagtcaagaacttccccgatctgctgagcagcaaagtgagggacgcttggtgctccactatcataacatcattaagctgaagctatcggcaggcgagttcaccatgtgtcgggaggcctttgaaaaatgtatacaggggcaagatccgcagttagtggtgaatgggatatatgaaaagtttcgggatagcctggagaggcttgaccacaaaaggtctaagccgcgaaggtctcgggggcctcgaggccaaaaagcatccggggcaacaactagatggatgcagaaaagggccgtcaagaaaggaaaatatctgagatatcagagactgtttcagatacatagagggaggttggcacgggttattctggataacacggaagccctgcagtgccaaataccatctggtattgtccacaaagcatataaagaaagatgggaaacatcggtttgttttaatggtcttgaatccttcccagtgtatagggaggctgataacaccatgtttcgagacctgatttcggagaaagagattggcaagaacctgaatgagatgtgtaaaacctccgctcctgggccagatgggattactctgggtcatcttatgaaaaaagaccctaagttttcccagttgaaagagatcttcaacctctggcttgccactggaactttacctgatgcgcttcgggactgccggacagttctgatacccaagtcatccaatgaggagagacttggtgatatcaataactggcggcctatcaccatagcctcagtggtgtttaggctgttttccaggatcgtgaatgcgagactggtacgtgcatgtcccattaaccctagacaacggggtttcatcagcgcgtcaggttgttccgagaaccttaagctgttgcagcttttggttaggaaggcaaaacaggagcatactagcttgggggtagtgtttgtggatattgccaaggcatttgataccgtgtgccaccagcatatattagctggtttggttaagaggggagtcgactcccatgtagtccatcttatcggtgagatgtacagaaatatcaaaacgtacatcgtcaccaagagtgggaaaacggaccccattaacatctgttccggtgtcaaacagggcgacccgatgtcacctctgttattcaacctggcgctagatcctctcttatgtaaactggaaacagaagggtgtggattctatcatggaggattcaagattacggctatggccttcgcagacgatctggtgcttctgagcaactcttgggaaggcatgcgtaataacatcgaaattttggagaccttttgtgaacttactggtctccgaactcaaggggagaaatgccacggcttctacatcaagccgactaaggacgcatataccatcaatgattgtcctgcgtggctaattggagggactcccctaaacatgatcgacccaggtagctcagagaaatatcttggcacacagatcgatccttggaccggttttgccgacccaggccttcctacgaaactggaggaatggcttcatcggatcggtgatgcaccacttaaacctcttcagaaagccgatatactcaggacttataccatccctaggctgatatatctggccgaccataccgatgttaagatcgggctccttgaatcccttgacctgatgataaaaaaatcggtcaaggagtggcttcatctcccaacttgtacgtgcgatgccatcttgtattccaggtttaaggacggagggctggggttcatcaaattggcggcgcttatacccagtatccaagcgcgaagattgcataagttagcacaatcttcggatgggactttggtttcgtttttgaaggaggaacatctagaagtgatgtatgagaaactgtgggttaaagctggaggtgtaagagagtccatcccccaaatttgggaccccatcccattgacggaagttgttggtgagggggatgaagccttgtctgagtgggaggcacctcgttccaagcttcgccttcctaggccatgtgattggaggaaggtggaatttaataaatggaaacatctggtcgcccagggccacggaattgataattttgagaacgataagatcagtaacgattggttggtgcattaccgtggtattcctcacagaaaactcataacggcattgcaattgagagcgaatgtctaccccactcgtgagtttttagcaaggggtagacacgatgtcagtgttcgatcttgcagacactgcggtgccgaatatgaatcagcatcccatgtcatcggaaaatgcccaattactcaggatgcccgaattaagaggcataattccatctgtgaaactcttagccgagaagctaagagggagaattggacggttttccaagagccgcatctgagggatgaagaaaatgaactatttaagccggatttgatctttgtgaaagatgctaaggcattcgtggtggacgtcacagtgagatacgagcacagcaattcttcattgaaagaggccgcggtggagaaggcgaaaaagtatcaacgccttctaccacagatttgtgacctcacaaatgtgacatccgtagagttcgccggtttccccttaggagcgcgggggaaatggtttgagaagaactctgaattgcttgaggccttgggtctctctaaaacgaggctagggagactagcccgggccctagcatccagagcgctcttctcttctgtagatattgtacatatgtttgcaagcaaagctagattgttagtaccttttaaataaaggccccttccctgcgtggttccatctggacagtggaattggtattgggtgggaggggttcattcgtcataccgcgtcttgcccatatttgggccataaattcggattcgaccaggtggacgggccacctttacttaacccggaaaagaaacatataatttatatgtttattaaa

SEQ ID NO: 567 - DNA, 4666 bp, Erithacus rubecula
  source 1..4666: mol_type = genomic DNA
ggcggcttgggagagtatagttacgaactgggcatcgctgcagagatcgcacctcctcgtggtcccgctggtagccctgcgtagggtgactaagtcgatcttctgccccagtacggagccgttgggaatcgccagcccaacgtcctcccgccaaaattcggtgaaacaaattcctcggtaaaagccgcgtggcttattgcccaaaacctggccccccggtttcataggggcaatgtctctggcaagtggactgaccacccactgccaacccaccgcccaaggtggtcccattccgatgggttatggctctgatttggggggggggggtctggtttagagcgccggtacgcctgtccagggtatcggtcggctcccagacctcccccggagactgggtagacctggtgtcctggaattttaattttccaggctccaagtctaattcccagtgggttgacctgttgcccaggcacggggttgacctgttatccaaatttgaccaggtagacctggtggctcgaaatttaccatctaaattgtcccccgatttggcagaaaatgaattggctttgctggcgaacttagagttctatagatcggacttgtatgtgtatgagggtgttcatttctttgccgatcgggagggattgagcgggttgcctgaggtgtatgaacaactagcaccacaaccgtgtgcgggagatggttcacattctgatctcccgagagatactaaactgtttgtgcttgagcaaaagggcagcgaggagaaggagaaggtggacgcgccaaaaacatcgcctccgtcgcccaggaagccaggggagcagaagcctgaggagacggtgatggtgactgttcctgacaaaaacccaccttgtccttgctgtggtacccgggaaaactctgtgttggccctaattgaacatctgaaggggtcgcacgggaaaaagaggatttgttttcggtgtgttaaatgtggaaaagagggtactaactatcacagtattgtttgtcattttcccaaatgcaggggtcctgtaactgaagcggctccagctggggagtggatctgtgaggtatgcggaagagattttcaaactaaaattggcctgggacaacataaaagacatgcacacccattgataagaaatcaagaaaggatagttgcttcccacccgaaagaaacatctaaccgtggtgcccacaaaagatgctggacaaaagaggaggaagagatgctgataaagttagaggcgcagttcgagggacagaaaaacatcaataagctcatcgcggaacacatcacaaccaaaacagctaagcagataagcgacaaaaggagattgctgcccaggaaaccagataaggaggttgaagaggaacctgctgtgagtactcgcaccaggagagcagctgcgggcctgagaaaggaacctgagctgagtcatcaaagccaggctgcagtcgaggacaatggacctgggcggagtgaaccgctgggtaagccagctgccggaaagaaaacaataggtgtgaaaagccgcggccttgaggaggctaacggccggaggggaaccatcaagcagcagatggccgggcaattgcaggcccattatcaccggacactcggggagaggctatcagctggggcaattaacaccttccccggggcattcaagcagttaatggaaggccgggagatgcaagagaccgttaatcaatcagcgcaggactgcttcggatgcctggaatcgataagccagataagaacagcaacccgagataagaacaacaaaggggcccaggagaagcaacccaggaaaccttttcaaaagtggatgaaggacagagcgattaagaagggtgattaccttcgcttccagcgattattccatcttgacagggggaaacttgctaaaattattttggacgatatcgagactttgtcctgtgatattccacccagtgaaatttattcggtttttaaagacagatgggaaacacctggtaattttaacggccttggggacttccaaaataatgggaaagccgacaatagcgctttcagggacttaattacgcctaaagaaattgagaaaaatgtgcaggaaatgagcaagggctcagctcccggtccagatgggattactctcggggacatcaagaagatggaccctgagtactcccagacggccgagatcttcaacttatggttaacatctggaaaaatcccggactcggtgaggggctacaggactgttttaattccgaaatcaacagaacctgaacgtttaaaggacgcaaataactggagacccatcacgatcggttccatcttgctgagacttttctccaggattgtaacagctaggctgagcaaagcctgccccctcaacccaaggcaaagaggcttcatcagagcggcgggatgctctgaaaacctgaaactcctgcaatctttaatgcggtctgccaaaaaagaacacaggccactgggtgtagtattcgtggacattgccaaggcttttgacaccataagccaccagcacatcatacaagctttgcagcaaagagaagttgacccccacatcattagcctggtgagcaatatgtacaaggacaccagtacttatatcaccgtgaagaagaacacacgcacacaacaaatccatttccgggttggagtaaaacagggtgaccccatgtcaccccttttatttaatctggctatggaccccctgttgtgcaagctggaagagagcggcaaagggtaccatcgaggccggagtagtattacggcgatggcattcgcagacgatctggtcctggtgagcgactcctgggaaaacatggtaacaaacatcaagattttggagaccttttgtgatctgaccggtctcaaaacacagggagcaaagtgccacggcttttacatcaagcccacaaaggactcttacaccgtcaatgactgcgctgcttggaccatcaaaggaacacccctgaaaatgattgaccctggcgaaaccgagaaatacctaggcctgcaaattgacccctggactgggatagcaaaatccaatctatccacaaaactagaattttggctccaaaggattgatgaagctccacttaaacctctgcagaaaattgacatcctcaaaacatacaccatccctcgactgacgtacctggccgaccactcagacctgaaggccgggttccttgaaagcctcgaccaaaaaattcgaacaacagtgaaggactggctgcacttaccttcgtgcacgtgtgatgccatcttgtactcgagcacgaaggacggcggtttgggcatcaccaaattggcagggctgatccccagcgtgcaggcccgaagactgcatcgcatcgctcagtcttctgatgaaacgatgaaaatgttcctggagaaagatcaaatgcaagaaatgtataagaaattgtggattcaagctggaggtgacagggagaagattccttccatttgggatgcactaccaccgagcgaaccatccaatgatgcaggcacaacttcggagtgggaagcaccatccttgaaaactaaatttccaaaaccgtgcaattggaggaaaaatgaatttaaaaattggataaaattagtgtcccagggccgtggaattgcaaactttgaaggggataaaattagcaaccattggctacaatattacagaagcatacctcacaggaaactcctcactgctgtacaactcagagccaacgtataccccacaagagagttcttagctagagggaggcaagataaatacatcaaatcttgtaggcactgtgatgcggacattgaaagctgcgccgacatcatcggcaactgcccagtgacgcaggacgcccggatcaagaggcacaattacatctgcgaggtgcttcttgaggaggcgaaaaagaaggactgggtagtgtttaaagaaccgcaccttagggacaccaccaaggaactgtacaagcctgatctgatattcgtgaaagacgcctgtgcacttgtggtggacgtgacagtacgatacgaagcagccaaaacatcgctagaggacgccgctgcggagaaggtgaacaagtacaaacatttagagactgaggtacgaaacctcactaacgcaaaggatgttgttttcatgggctttccccttgaagcgcgggggaaatggcaccagaaaaactttgaacttttggaaactctgggcctctctaagtcgaggcaggagaaaattgcaaggactctatccacaacagagctcatgtcatctgtggacattgtacacatgtttgctagtaggctagaaaattatgtagtcaggaatagtttatttttgtttgtagctgttttaattttgtagttgtattattgtatttttgcattttgttttgttatatgctttaattaaaaaaaaaaaaaaaaaaaaaaaaaaaaaaaaaagacggcagctagggacgtaggccagccacaagccagttaggtagctgatagtgagtagggacagaactttttatttcataacgcgtcaattaccacccgaactggaccaatttaccggatttgtccaaggtggacgggccacctttacttaacccggaaaaggagcatatatttttatatgtgttcgaaaaa

SEQ ID NO: 568 - DNA, 4206 bp, Geothlypis trichas
  source 1..4206: mol_type = genomic DNA
gatgagggcatagttactaactgggcttatcagcggaagtcgcacctcctcgtggtcccgctggatacccttgtggtaactaagtcgacttctgccccagtgtgagtgaggacgtacatctgtcctccctgtcgttgggctcgccacctaatggtagtttcacaaattgctgaaacccaatagtttggcacagttagtttgctgttgcacagagctttgtccacgggctattgttggtcacagctggtagtttaggagagggccaactatcagctattacaaccctcacttagaatttctggatggacaatatggtgcaatctctggctttgcattttatttcgatcgctactcaaactgacccattagatttacaggtcactgaggttgaagttccatctataccctctgtgcccagggaagagggattacaactggtgtgtttggagtttgtgaactccagaattgttaaagaaggtggtatacatcacgcagatgtgtgggaaggattggcacaattccctgaagcctatgagatctcccctatggggttggcccaggatgtgcccgagggtgtggtcggaggtactggaggcattgacgagcctaaaacgcctgaagctcctcccaggtctgacagcacaacggtgaagtcacctgttgtgtacgtcccggacaaacaaccatcttgtccacgatgtgagactcggtttacaaggatgttggggctgattgatcatcttaaaagggtgcacgggcagaaaaagatcattttcagatgctcgaaatgtggtaaacaaaatcttaaataccacagtatctcttgtcatgttccgtggtgtaaaggtgtggtgtgtgtggttccaaccggcaaatggatttgtgaggtatgccaccgtgggtttgccactaagattggccttggtcaaaacaagagaattagacatcctcttgtgagaaacgtggagaggatagttgcttcccatcctaaagagtcatcctctcgaggagcccacaagagagtatggactgatgaggaggaggctctcttggtgcaattggtggacatgtttgctggtaaaagaaacatcaatcaattaattgcggagcaaattccatctaaaacggcaaagcagatcagtgataaaaggcgccttctgttcagagttccctccgcaaaagatcatgtaggaagagggggtgccatcggcattgaacatcaggccgagtctgctaaattgccaaaggagggaaaattaaagcaccggtactgcgaggcaatcaaagcgggactatcagcgggcaagtttaccatgtatcgggaggcctttgagaaaattttggaagggcaaaatccgggtcaggtggtgaatgatgtttataaggaattctgtggtattctagatgtgcctagccaaattaaatctgccaagggtcggaaagcgcgaccgtcccgtagccccaaagcatccaaaactccaacaaattggatgcgtaagagagcaataaagaggggtaaattcttgagatttcagttgttatacgagttgcatagaaggtgctttgctcgtattatcttggacagcacggaagtcgtccagtgccagttaccatctagcgttgtccaggatcactttaaaagaaggtgggatatatctggtgtatttggtggcctacagaactttcctccttatgaggaggctgataacaccttgttcgaggccttgataactgaaaaagagattgaaaagagtgtgagtgagatgtgtaaaacctccgctcccgggccagatgggattactttgggtcaacttgttaaaaaagaccctgagttttcccggttgtctgagatcttcaacctccggcttattaccggcactgttgcagatgcgctgcgggactgcaggacagtcttgatacccaagtcttcagtgtcagagaagcttggtgatatcaataactggaggcccatcaccataggttcggtggagattaggttgttctccaggatcgctgcggcgaggctgtccaagacatgtcccattaatccccggcaagggggctttatttgtgcatcaggttgtgctgagaacctcaagctattacagcttgtggttaaaacagcaaagcgagagcgaaaacatctgggggttgtgttcgtggacatcgctaaggcctttgacactgtacgtcatcagcatgtaattgaaggtctggtccaaagaggtgtggatccacatgtggttgagttagtgagggaaatgtatcgggatatcaggacctacatttccatggaaagggaaaagacagaccacatttacattcgctctggtgtcaagcaaggcgacccgatgtcacccttgctgttcaacttggcgatggaccccctactatgtaaacttgagaaagaaggtgaaggtttccatcatgtgggttggaaagttacagctatggcctttgcggatgatttggtgctgttgagggattcttgggaaggcatgtgtaataacatcaaaattttggaagccttttgtgaacttatgggcctccgtacacagggggaaaagtgccatggcttttacatcaagcctactagagactcgtatactatcaatgattgtccctcacggataattaatagatccctccttaacatgatcgacccagggagctctgagaaatatcttggcacatgggtggacccttggactggctttgcagatcatggattatcagagaagttaatagattggcttcatcggattggtgcttcaccccttaaacctcttcagaaagtcaatatactcagaacttacaccatccaaagactgatatatctgcctgatcatactgaagtgaacgtaggccttctcgagtcccttgaccaggtaattcgtaatgcggctaaggagtggcttcatctccctccaagtacgtgtgatgcaatcttgtattcgagttttaaggatgggggtttaggacttatcaagctggtggcgcttattcctagtattcaagcacgaaggctgcatagattagctcagtcttcggatgaggctcttgtgagctatctaaaagaggtacatctggaacggttatttgagaaattatggttgaaagctggtgggagacaagagtccatcccgtcaatttgggagcccttactgttggttgaagtaggagatgtgggtgaggcccggtcagaatgggaggcacccgtcccgaaaatccgctacccaaaaccatgtgattggtggaaaattgaatttcagaaatggtgtcatttggttacccaaggtcacgggattacgaattttgagaatgatgcaatcagtaatgcttggataaagtggtttaagggcatacctcaccgtaaattgattacagctctacaacttagagcaaatgtctacccgacgagagaattcctggctaggggtagacaagaggatgtggttcgatcatgtaggcattgtggtgccacatttgaaacagtcgcacacattgtcgggaattgtgttatcactcaggatgccaggattaagagacacaatgctatctatgaaaccccgagtgatgaagctaagagggaaaaatggatggtattccaagagccacaccttagagatgatgttaatgagttctttaaaccagacttaatctttgtgaagggttccaaggcggtggctgttgatgtgatggtgaggtacgagcattctgtaacctcattgagtgaagctgcctcagagaaggctaaaaaatatcagcgccttcatttgcagatacaacaattaaccaatgctgtggataatcgactatgttggcttccctatgggagcccatggtaaatggtttggcgagaatactcagttgctaaccgccctcggtctctctaaaacaaggctagagagaatcgcacagggccctggcatccaaagtactctttgcctctgtagatattgtacatatttttgttagcaaagctagatcgattttacctatgtaatcatgtatcaataaaattaggcccctcccctcagcgggttcgctggacagtggaatcggttctgggtgggaggggctcatccgtcataaccacgtttagcccatatttgggcaataaattctgatttggtcattcaggtggacgggccaccttacttaacccggaaaaggaacatatatgatttgtgtatgtttattaaa

SEQ ID NO: 569 - DNA, 4716 bp, Lichenostomus cassidix
  source 1..4716: mol_type = genomic DNA
ggcggcttttgagagtatagttacgaactgggcatcgctgcagagatcgcacctcctcgtggtcccgctggataccctgcatagggtaacgaagccgatctctgccccagacaaggtctcgttggaatcaccagccaacgaggacctccgaattggtgaaacaaatttcaggtaggagccgcgcggcttttttacctaagaccttgcccacgggtgtttgcagctgggcaaagaccggcaagcggtttgaggggtgccgctgccgatctcaatccttccccaccaaaaactgtctttcctagccagatccgacaatggggccgtcgatacgcctgtaccaggtatcgattggcacccaaacttctcatttggactgggtagacctggtgtctgaaaattttaaaacagactcctcgtctgccagacgggtagacctggtctcccgaggggttgacctggtctcccgaggggtagacctgttctcccgaaatttaccatctggaccccccgattcggcgaaaaacgaaattgaactggtgaatttggagttttgcaggagtgataggttatgctttgctaacgagaatgttcgtttttctatgaattgggagtgtttgagcaggttacccgaggtgtacgaacagctgacaccgcagccgacagcgggagactctgacagcggtctcccggggacttgtgtacttgaaaacgagagggagagcggcgagagcgagggggcttgtgcttcggaaccgttgcctcccgagccggagaatgccagcttaccggcgactcccccagcccctccggagagcagcgggaacgggacacctgaggacatccccacggtgaccgttccggacaaacatccaccctgtccacgctgcgggacccggcaggacagcatgaggggcttgattgaacacctgaaaagagcccacggggagaaaaggactcgattccgatgctcaaagtgtggtagggaaggttttaacttccacagtatcgcctgtcacgtcccaaaatgcaaagtcacaacggtggaaacagctccggccaaggagtggacttgtgaggaatgcggccgtgacttcaaatcaaaaatcggcctgtcacaacacaaaagacacgctcaccctttgatcagaaatcaggaacgcattgaagcttcccgaccgaaggaaattaacaacacgggagcacacaaaaagtgctggactaaggaggaggaggagatgttggtaaaattggtaactcagttccgggactgcaaaaatattaataaactcattgcggaacagatcacaacaaagacagcaaaacagatcagtgatcaacggaggttgctgcccaaggaaccagctggggaggataacgaccctggggtgagccatcgcaccaggagagcagctgcggactcgaaaacaatggcccgggggtgtgaacgacccggggagatagaggcgggcggggagcccgagatgagtcatcaaagcaggggagcaactgcaggcgtgagaacaatacctgaggcaggtcatcagcctagggagtcagctgggagcgtgggaactggctctgggaagaaccaccgcccagataagaggaggaaacacctggagaagttaacgaccagtgaccaccagcagagagaggggcagctgcgggcccattaccagaggacactcggtgaatggctttcctccgggaagattaacaccttcccggaggccttcaaacaggtacttaacggccaggaagtatcatcactggtcaatgaaacagcgcaggactgttttgaagacctcgaactgataagccaggcaaggacatcaacccgaggaaattccaacaaaaaggggacccaggaggtacagtccaggagacctcgacagaagtggatgacaaagagggccattaagagaggtaattacctccgctttcagcgattattccatctcgacagggggaaactagctaagattattctggatgatgtggaaagcttgtcttgtgatatcccacccagcgaaatttattcggtttttaaagccagatgggacacacctggaggatttgatagccttgggaacttccaaattaatgggaaagccgacaacagtgctttcagagacttaattacggccaaagaaattgagaaaaatgtacaggagatgagcaaaagctctgctcctggcccagatgggatcaccctgggagacatcaagaagatggacccggactattcccggaccatggagcttttcaacttgtggttaacatcaggaagaatcccagatacggtgagggggtgcaggactgtgttgattcctaaatcaaccagaccggaacgcttaaaggacattaacaactggagacctatcacgatcggttccatcttgctgagactgttctccaggatactgacagcaaggctaacgaaggcgtgccccctcaacccaaggcaacgtggctttattaaagcggcgggatgctctgagaacttgaaactcctgcaaaccataattcgatctgctaaaaagaatcacagaccgctgggagtggtattcgtggacatcgcaaaggcttttgacaccgtgagccacgagcacattctgcacgtgctacggcagagggaggtcgacccccacatcgtcgacctggtgagcaacacgtacgagaacatcagtacgtttattgacaccaagaaagcacagacagaacacatccagatccgtataggagtaaaacagggcgacccgatgtcccctcctttatttaatctggctatggaccccctcctctgtaagctggaagaatgcggcaagggattccaccagggacgagacagcgtcacggcgatggcatttgcagacgacctggtcctcctgagtgactcctgggaagacatgaagcggaacatcgagatacttgagaccttctgtcacctcactggtctcaaaacgcagggggcaaagtgccatggctttttcatcaagccgaccacagactcttataccatcaataactgctctgcctggaccatcaatggcacgcccctgaacatgatcgaccccggcgactctgagaaatacttgggcctgcagtttgacccctggactggcgtggcaaaatccgaattatccactaagatcgacttttggttacaacgaatcggttcagcccccctcaaacctctgcagaaaattgatatcctcaaaacatacaccatccctcgactaacctatctggctgatcactcggaactgaaagagtcgttcctggaggcacttgaccagacgattcggtcggcggtcaaggagtggctgcacttacctgcctgtacctgtgatgccatcttgtactcgagcacgaaagacggaggtttgggactcaccaagctggcgggactgatccctagcgtgcaggcccgaagactgcatcgacttgcccagtcctcagatgagaccatgaaggcgttcctggagaaagatctaatggaacggaggtatgagaaattgtggatacaagctggaggagataaggggaacataccgtcaatttgggagaccaaacctgtgagagaaccgactggctcgtacagcgcagacactacttcggaatgggaagctccatcgctgaaaaataaatttcccaaaccatgcaattggagaaaaattgaattcgagaagtggactaaattaatatcccaaggccgagggatttcaaattttgaaggtgacaaaattagcaaccattggctggaaaattacagaggcattcctcacaggaaactccttacggcattacaactgagagcgaacgtctaccccacgagagagtttctagcgaggggtagacgggacaagtgcaccacggcatgtaggcactgcaaagcggacaacgaaaccctggcccacatcatcggcaactgcccaatcacgcaggacgcaaggatcaagaggcacaattacatctgcgaggtgctgatcagggaggcgaaaaagaaggaatgggtagagtttcaggagccgcgcttgagagataccaacaaggagctgtacaaacccgatttagtattcgtgaaggatgaccgtgcattagttgtggacgtgacagtgcgatacgaatcagccgaaacatcgctggaggaggccgccgccgagaaagtgaacaagtacaagcacctggaaacggaaatacgagaacttactaacgcgaaggacgttctgtttgcgggctttcccctaggagcgcgggggaaatggttccacgagaactttgaagttttgggggctctcagcctatccaaaacaaggcaggagaaggttgcccggtctctgaccaccattgcgctcacctcctctgtggacattgtgcacatatttgccagtagggctaagagttctgcatagttatgacttgtttttgaatctgttgcatgtttttgaacctgttgcttgttcttaaactgttgtaactttttttctgtaaccagtttacattatttctaaataaaatttcggcgggttctagggacgcagggcagccacaagccagaaggtcgcacatagtaagtagggacaggacagaatattttcataacgcgtcaattaccacctaacttggaccaatctaccggatttggccaaggtggacgggccacctctacttaacccggaaaaggagcatatagaaatatatgtactcgaaaaa

SEQ ID NO: 570 - DNA, 4672 bp, Oenanthe melanoleuca
  source 1..4672: mol_type = genomic DNA
aagagtatagttacaacctgggcatagccgcagagatcgcacctcctcgtggtcccgctggtaaccctgccaagggtgacaaagtcgatctctgccccaggacggagccgttgggactcgccaccccaacgaactccagccaaaactcggtgaaaccaatttctcggcaaaagccgcacggctcattgcctgaaacctggccccccggtttcataggggcaatgcctcccaccgcccaaggtggtcccattgagatgggtgagaattctggatctgattttggggggggggtctggtttagagcgccggtacgcctgtccagggtatcggtgggctcccagacctcccccagtgactgggttgacctgttgtcctggaatttaaatctatttccaggatctaaaacccagtgggttgacctgttgcctgtgcacggggtcgacctggtgtccaaaaatgaccgggtaaacctggccgctcgaaatttaccatccaaattgtcccccgattcggcagaaaatgaattggctttggtggcgaacttggagttctataggtcggacttgcaggagggtgttcatttttctgctaaccgggagggattgagcgggctgcccgaggtgtatgaacaactaacaccacaaccgtgtgcgggagatagtttacatgctaacctcccgcgagacgctaaactgtttgtgcttgagcaaaggtgcagcgaggagaaggagagcgaggaagcgccggagacatcacctccaacgcctgggaagcccggggggcagacacctgaggggaccgtgacggtgactgttccggacaaaaatccaccttgtccttgttgtggtacccgggtgaactctgtgttggccctaatcgaacatctaaaggggtcgcacgggagaaggagggtttgttttcggtgtgtgaaatgtggaaaggaaggttctaactatcacagtattgtttgtcattttcccaaatgcaggggtgcagagactgaagcggctccagctggggagtggatctgtgaggtatgcggaagagatttccaaactaaaatcggcctgggacaacataaaagacatgcacacccgtcagttaggaaccaagaaaggatcgttgcttcccacccgaaagaaacatctaaccgaggagctcacaaaagatgctggacaaaggaggaggaagagatgctgataagattagaggcgcagttcgagggccacaaaaacatcaataaactcatcgcggaacacattacaaccaaaacaaataagcagataagcgacaaaaggagattgctgcccaggaagccagttgaggaccttgaagaagaacctgctgtgagtactcgcaccaggagagcagctgcgggtctaagaaaggaacctggggtgagtcatcaaggccaggctgtagccgagaacaatggcccaggcaggagccgcctgccaggggagccagctgccggagaggaaacaatggacgagataaggcgccgccctgataagggtaagggccggaggggagccatcaagaagcaaaaggaggggcaactgcaggcccattaccaccggacactcggggaacggctatcagctgggacaattaacaccttcccccgggcattcaagcagttaattgagggtcaggaaatgcaagcaacgatcaaccagacagcgcaggactgcttcggatgcctggaagcgataagccagataagaacagcaacccgagataagaacaacaaaggggcccaggagaaacaaccaaagagaccttttcagaagtggatgaaggacagagcaattaggaagggtgattaccttcgcttccagcgattattccatctcgatagggggaaacttgctaaaattattttagacgatattgagacattgtcctgcgatatcgcacccagtgaaatttattcggtttttaagaacagatgggaaacacctggtaacttcactagccttggggaattccaaattaacgggaaagccgacaatagcgctttcagagacttaattacggccaaagaagtcgagaaaaatgtgcaggaaatgagcaagggctcagctcccggtccagatgggattactcttggggacatcaagaagatggatcccgagtactcccggacagcggagatcttcaatctgtggttaacatctggaaaaatcccggacacggtgaggggatgcaggactgttttgattcctaagtcgacagaacctgagcgtttaaaggacactaacaactggagacccatcacaatcggttccatcttgctgagactattctccaggattataacagctaggctgagcaaagcctgccccctcaacccaaggcaaagaggattcatcagagcggcgggatgctctgaaaacctgaaactcctgcagtctttaatgtggtccgccaaaaaagaacacaaaccactgggtgttgtattcgtggacattgccaaggcttttgacaccataagccaccagcacatcattcaagctttgcagcaaagggaagtggacccccacatcatcggcctggtgagcaatatgtacaaggacaccagtacatatatcaccgtgaagaaaaacacacgcacagacgaaatccatttccgggttggagtaaaacagggtgacccgatgtcaccccttttatttaatctggctatggaccccctgttgtgcaagctggaagaaagcggcaaagggtaccatcgaggagggagcagcatcacggcgatggcatttgcggacgatctggtcttgctgagtgactcctgggaaaatatgaaaactaacatcaagatattagagaccttttgcaatcttaccggtctcaaaacacagggagtaaagtgccacggctactacatcaagccgacaaaggactcttacaccgtcaatgactgcgctgcgtggaccatcaatggcacacccctgaaaatgattgaccccggagaaactgagaagtacctcggcctgcagattgacccctggactgggatagcaaaatccaatctctccacaaaactggaatattggcttcagcgaattgatcaagctccacttaaacccctgcagaaagttgatatcctcaaaacatacaccatccctcgactgacatacctggccgaccattcagacctgaaggctgggttcctggaaagcctcgaccaaaaaattagaacgacggtcaaggactggctgcacttaccttcgtgcacgtgcgatgccatcctgtactcgagcacgaaggacggtggtttgggcattgtcaaattggcgggactgatccccagcgtgcaggcccgaagactgcatcgtatcgctcagtcttcggacgaaacgatgaaaatgttcctggagaaagatcaaatggaacaaacatataggaaattgtgggttcaagctggaggggacagggagaagatcccttcaatttgggatgcaccaccggtgagcgaaccagctgacagtgcagagacatattcggagtgggaagcaccgtccttgaaaactaaatttccaaaaccgtgcaattggaggaaaaatgaatttaagaattggactaaattagtgtcccagggccgtggaattacaaattttgaaggcgataaaattagcaaccattggctacaatattacagaagcatacctcacaggaagctcctcactgctttacaacttagagccaacgtataccccacgagagagttcttagctagggggagacaggataaatacatcaaggcatgcaggcactgcgatgcagctattgaaagctgcgcccacatcatcggcaactgcccagtaacgcaggacgcccggatcaagaggcacaattacatctgcgatgtgcttcttgaggaggcgaaaaagaaggactgggtggtgttcaaggaaccgcacataagggataccaccaaggaactgtacaagcctgacctgatattcgtgaaggacgcccgtgcacttgtggtggatgtgacagtacgatacgaagcagccaaaacatcgctggatgacgccgctgcagagaaggtgaacaagtacaagcatttagagaccgaggtacgaaacctcaccaacgcaaaggacgttgcttttatgggctttccccttggagcgcgggggaaatggcaccagaaaaactttgagctattgggagctctgggcctctccaagtcgaggcaggagaaaatcgcaaggactttatccacaacagcgctcatgtcatctgtggacattgtacatatgtttgccagtagggccagaaaattaggtaaccaggagtagtttatttatttttattcttgttattgttataggttgttttactttttgttgtatttttgtctttttgtattttgttgcaatgttttgtatgttttcttattatttaaaaaaaaaaaaaaaaaaaaaaaaaaaaaaaaaaaaaaaaaaaaaaaccaataaaaaagacagtagctagggacgcagggcagccacaagccagttaggtagctgatagtgagtagggacaggactttttatttcataccgcgtcaattaccacccgaactggaccaatttaccggatttgtccaaggtggacgggccacctttacttaacccggaaaaggaacatatattatttatatgtgttcgaaaaa

SEQ ID NO: 571 - DNA, 5083 bp, Phylloscopus trochilus
  source 1..5083: mol_type = genomic DNA
tgccggattggcgggaacagccgatcctagtaaggctggatgaattcatgcgggctgaagcagcggttctcccataaaataggggctttggggaaggtgggggacgtcgggggggcccctggagggacccctgtaccgataggggatccttgttttttcccctctacctggggcttttgtggggaggcgagggcacgtggtgagtgggggatggctgactggggaaagttaccaaggtatccccaaaacctgttttggtaggggtagggatacatactgggcacaactgtaattctctagcccaggaccgagaagttgggactcaccaacccaactttctcttgaaatttcggtgaaacaaatttaaggtataggtcatttgacttaatacccaaaacctggcccctgggtttttagagggcaaagtttggtagtttggcagggagggccgctactactcctgcttcaccctcccaccttgctaagactaatattttccggacatgtcaaaacctgaccctttaaacgtaaatatgtccactccattcttggggacacaaatgcgcctgctcagggtttcaactggaactcaaacatctatgtcagactgggcagactgggcacagaggctctgtggtacagctaccaggtctgcactgtgtaaggtggtcccggtgtccttactatccagacatcagacagaattactagctatgggccatgggagtcagatgcctctaaatgcaccccttaacaccccggacttaacagaaagtgaattggcttgtttggttttggactgggagttttacagaacagatttgtccgctagtagttttaaccttgttcaattttctgctaaccgagagagtttgagtgggctgcctgaggtgtatgaacagccgactccgtttcaacctgaaggggagaaaatctgccccccaagagactgtgaagcagttttggtcggggaaggggaggggagcagtgaggaggtcacaccagaaccatcgccccctgaaccagagacaacctccgtggcagcatctccaactctgcctgtaaccaacgtggaacagtcgtcggagagccccatcacagtaattgtgccggataaaaatccttcatgtccctgctgtggtattcgagcgagcggggtatcgggtttgattgagcatttgcgggaggttcacaggaggagggaggtttgctttcggtgttctaaatgtgagaaagaaaatactaattaccatagcattatttgtcattttcctaaatgcaagggtaaagaggaaacatctgcgccagccggggaatggtcctgtgaggtatgtggacgagattttaatactaaaattggcttgggacaacataaaagattggcacacccagctgttagaaatcaggaaagggtcgctgcttcccacccaaaagaaaattctaaacgaggagctcataaaaaatgttggactgaagaagaggaaaaattattaatagaattaatagctcagttcgaggggcatgcaaatattaataaattaattgcggaacatattacaaccaaaacagctaaacaaattagtgaaaaaaggagactgctctccaaaaaactaatggtagtggaggcagaatgtgaacctgggccaagtcatcggaccaggagagcagctgcagagataaggaagggagctgagatgaatcaccataatgaggatgctgctgaggacaatggagctgggaggggtcccctgaccaggagagcagctgcccggggggaaacaaaagaagagataagccagtttcctgataaggccaacgatcagcaggaggccagtagcagtgggaggggcccagtgaccaggagagcagctgcaggaaagaaaacaaaaaagagtattgatcaccctactgataaggccaacggccagcaggtagccatcagcactagaaggggttgtttgaatagaggagtgactgccggggtagaaacaatagagggctcgagtcacctccctgataaggacagtgacggacagggcacccccagccgggagaaggagggacaattacaagatcactatcaagaagtcatcggagcctggttatcagatgggaggatcaatacctttccagaggcattcaaagggttgttagggaaacgagagatacaggcaacgatcaatcagtcaatactggattgttttgggggcattgattcaaaaagccaggtgaacaaaatgactcgagataagaaagataaaaagccagggagacctccccagaagtggatgaaaaagagagccatcaaaagaggtagctatcttcgcttccaacgtcttttccatcttgataggggaaaattagccaagattgttttggacaatatcgaatgtttgacgtgcgatatcccacccagtgaaatttattccgtttttaaggccaggtgggaaacagcaggcaaatttaccagtcttggggactttaaatttactgaaaaggtggacaatagtgcattcagggatttaattacagctaaggaagtagaaaagaacatgcaagaaatgagcaaaggctcggctcctggtccagatggaattactctgagagacattcaaaaaatggatcctaagctctccaggaccacagagattttcaacctttggttggctgcaggcaaaattccggatggggtgagggaatgcaggactgtcttaattccaaaatcaacaaaaccagaacgcttaaaggacattaacaattggagaccaattacaatcggatccaccttgcttagattattttccaggattttaacagccagactaagcaaggcatgccccctcaacccaagacagaagggcttcattcaagcagccggatgctcagaaaacctgcaactcctgcaatccataatttggtcagcaaaacgggaacacaggcccctgggtgtcgtatttgtggacatcgcaaaggcttttgacacagtaagccacaagcacattctacacgttctgcagcggaggggagtggatcctcacatcatcggcctggtgagtgatatgtatgaaaacattcatacttctatcaccacgaagaaagcacgtacggatcgcatccagatccgagttggagttaaacagggcgacccgatgtctccccttctattcaatctggcaatggaccccctgctgtgcgaactggaaacgaacggcaggggacaccaccgcggcacaaattgcatcacagccatggcgtttgctgacgacctggtcctactgagtgactcctgggaggacatgaagagcaacatcaagatattggaggccttctgcgatctcaccggcctcaaaacgcagggagagaagtgccacggcttttacatcaagccgacgaaggactcgtacacggtcaacgactgtgctgcttggactataaacggcactcccctgaacatgattcttcccggtgagtccgagaaatacctgggcctgcagatagacccatggactggattggcaaaatcggacctctctacaaaactcgactcatggctcgagcaaatcgatagagttccactcaaaccgctgcagaaaattgaactcctgaaaacatacaccatccctcggttgacatacgtggctgaccattcggacttgaaagttagtttcctggagacattggatcagaagattcggacaatagttaaagattggctacacctgcctgcatgtacctgcgatgccatcctatactctagcacgaaggatggcggcctgggcatcactaaattagcaaagctgattcctagcgtacaggctaggagactacacagaatagcccaatcatcggacgaaaccatgaagcaatttctccacagggacaagatggaagcaatgtaccagaaactgtgggttcaagcgggaggagatagggagaaagttcctgcaatctgggaagctagacctacgatcgagtcacctaatttacaagaggtaggggtttcttctgagtgggaagcaccgactctgaaaaacaaatttcccaagccgtgcaattggagaaagatagaatttgaaaaatggaccaatttgatatctcagggacggggaatagggaatttcaagggggaccaaataagtaacaattggctgcaacactataggaacatacctcacaggaaactccttactgctgtacagctgagggccaatgtatatccaactagggaatttttagccaggggtaggcaggataaatacatcagaacgtgcagacattgcgacgcggccaacgaaacgtgcgcacatattattggcaattgccccataactcaggacgcgagaatcaagaggcacaactatatttgtcaagtgttgtcggagaaagcaatagggaaggactggatagtatataaagaaccgcacatcagggactccaacaaagaactttataaaccggacctgatatttgtgaaagacaaccgagcgtacgtcgtggatgtgaccgtgcgatacgaatcggacgagacctctttggagatggcggccacggagaaagtggacaagtacaaacacctgaccaaagagatacgaacgatcaccaacgcgaaagacattgtttttatgggctttcccctcggagctcgggggaaatggtaccaagggaactttgaacttttgaaagcccttggactctccaaatcggatcgagaaaagactgcccggtccttgtcatccatagcactcatgtcatctgtggacatcgtccacatatttgccagcaaatccaggacttgcactacactgtaatgttgtttatttttgtacatattgttgttttatttatttccactgtacattcgattcaataaacttcgacgggtgctggggcgcggggcagccacaggccagatatcacaagccagaaggacgtggacagtaagtagggacgggacttattatttcataacgcgtcaattaccatctgatttggaccaatttaccgaatttgtccaaggtggacgggccacctttacttaacccggaaaaggagcatatatatttatatatatgtgttcgaaaaa

SEQ ID NO: 572 - DNA, 4257 bp, Melospiza georgiana
  source 1..4257: mol_type = genomic DNA
gaagaatagttactaactgggctcagctgcagaagtcgcacctcctcatggtcccgccggatgcccttgtggtaactaagttgacttttgccccagtgtgagtgagggcatttaccagccctccctattgttgggcttgccacccaatggtagtatcacgatctgctgaaacaaagagtttgccgcagcctgttcgctgttgcacagtgccttgtccacgggccgttgatgttggacaaaagttggtagctcgagagagggtcgactactgactatttctaccctcacttggactggtcatttctttaacttaccggactgacataatggtgcaatctctagctttgcgttacatctctactgcaactcagactgacccattagatctaagggtcaatgatgccaaatctgtgccctctctgcccagggaagaggggttcaatcttgtaagtctagagtttgttaactctggaattgtcaaaggagatggtatacatcatgcagatgtctgggagtttctggggcaactccctgagccatatgagatctcccctatggggctggcccaggaagaggctgtgagtgcagagggaagtttcgaagagcccagaacacctgaggccgaaagtaggaggggggatactgaagagcccaaaacacccgaggctccttacgggtccaaagctattggtagtatgccaaaaacaccggtcgtatcgatgccggacaaacagccatcttgtcctcaatgtgagacccggtttactaggatgctggggctgattgatcatcttaaaagggtgcacgggcagagaaagatcattttcagatgtgcgaagtgtggtaaacaaaatctaaaataccacagtatctcatgtcacatcccgcgttgcaagggaatggtgtgtgtggctcctacaggtgactgggtctgtgaggtgtgccatcgagggtttgccaccaagattggcctgggtcagcacaagaggataagacatcctcttgtgcggaatgaggagcggattattgcttcccatcctaaagagtcatcggcccgaggggcccacaaacaagtatggactgaagaggaagaggctctcctgatacaactggtggacaagtacaccggtaaaaggaacattaatcaacctttagcggagcatattccaatgaagacagcaaagcagataagcgataaaaggcgccgtctagtgaaaggtccctccgcagaagaacatgaaggcctagtaggcgccgtggggatcgaacatccacccgagtctgctaaattgccgaaggagggacagttaaagctccaataccgcaagatgatcaaagcgggactatcggttggaaagttcaccatgtatcgggaggcctttgagaaaattgttgatgggcaagatccaggtcgtgtggtgaatgacgtatataacgagtttctcggtattctgggggagcctagccagagcaaatctatctgtaagggtcgaaaaaagcaggcaccccgtggcgaaaaaacatccaagactacaccaaattggatgtgtaaaagagctatcaagaggggcaaattcttgcgatttcagttgttgttcaagtcacatagaaggcgcctcacgcgtatcatcttggacaggacggaagccattcagtgccaggtaccatcgagcgttgtccacgatcactttaagaatagatgggatacatctggtacatttggtggcctcttaggtttccctccttataaggaggcgaacaatgtggtgttcgaggccctaattacagagaaagaggtggataagaacttgaaagagatgtgtaaaacctccgctcccgggccagatgggattactctgggtcaaattattgcaaaagacccaagattttcccggttgactgagatcttcaacctctggcttattaccggtacaattccagatgcgctgcgggactgcaggacagtcttgatacccaagtcttcagatgtagagaagcttggtgatatcaataactggaggcctatcactattggttcaatggtgattaggctattttccaggatcgccacggcgaggctgtccaaagcttgtcccattaacccccggcaacggggttttatttgcgcatcagggtgtgccgagaacctcaagttgttacaacttgtggtaaaaacagcaaaacgagagcacaaacatctgggggtcgtgttcgtggacatcgctaaggcatttgacaccgtgtgtcatgagcatgtatttgagggtctggtccagagaggtgtggattcacacgtgattgatttagtgagggaaatgtatcgtgatgtcaggacgtacatttccgttggaaggggaagaacagaccccatatacatttgctcaggtgtcaaacagggcaaccctatgtcacctctgctgtttaatttagcgatggacccccttctatgtaaacttgaacgtgaaggtgaaggtttccatcatgggggttggaaaactacagccatggcatttgccgatgacctagtgctcctgagtgattcctgggaaggcatgtgttgtaacatcaaaattctggaggccttttgtaatcttactggcctcagtacgaagggtgaaaaatgtcatggcttttacatcaagccaacaagggactcatatactatcaatgattgtcccgcatgggtaataaacggatcccctcttaacatgatcgacccaggttcctcagaaagatatcttggcacatgggtagacccctggactggcttcgcagaccctagattatcagagaagctaactgattggctccatcgaattggtcgttcgcctttaaaacctctccagaaagtcgatatactcaggacttatactattccgagactgatatatttggctgaccatactgaggttaaggtgggcctcctcgaatcccttgaccagttgattcgtaatacggtcaaggaatggcttcatcttccacaaagtacgtgtgatgcgatcttgtactcgagtttcaaagatggtggtttaggtctcatcagattggtggcgctcattccaagtatacaggcgagaagactgcatagattggcacagtctttggatgagactcttgtgaattatttgaaggaaatccatctggaacggttatttgaaagattgtggctaaaagcaggggggacacaagagtccgtcccatcaatttgggagcctctaccggcggtagagttggggggtgatgatgaagcccggcttgaatgggaagcacccgctcctaaaatttgctatccaaaaccgtgtaattggaggaaattagaatttcaaaagtggatccacctggtatcccagggtcatggaattgaaaattttgaaaatgatgagatcagtaatgcctggataaggtggtttgggggcatacctcaccgaaaattaatcacggccctacaattaagagccaatgtctacccgacaagggaattcctggctaggggtagacaggagaatgttgttcaatcctgccgacattgtggagctagatatgagactgtggcccacattgtcggcaactgcgccatcactcaggaagccaggattaagagacataacgccatctgtgaaactcttagcgaagaggctaagagggagtgttgggcagtatacgaggagccacacattagggatgaggcaaacgaattgtttaaaccggatttgatctttgttaaagggtctaaagcagtcgtggttgatgtgacagtgaggtacgagcactctgaaatctcattgagtgaagccgcctcggaaaaggccaagaaatatcagcgccttcataagcagattgaacaattgacgaatgcaaaggaaattgaatatgttggcttccccatgggagcctgtggcaaatggttaggcaagaatactgagttgctgactgcccttggtctctctaaaacgaggctagagagaaccgcgagggccctagcatctaaagtactcttcgcctctgtcgatattgcacatatttttgtaagcaaagctagatcgactgtatctgtaaatacattgtaaataaacaaggcccctccccttggctgggtccgctggacagtggaatcggttttgggtgggaggggttcatccctcataaccgcgtcttagcccatatttgggttaaaaattctgatttggacatcaggtggacgggccaccttacttaacccggaaaaggaacatatacagtttgtatgtgtttaataaa

SEQ ID NO: 573 - DNA, 4206 bp, Geothlypis trichas
  source 1..4206: mol_type = genomic DNA
gatgagggcatagttactaactgggcttatcagcggaagtcgcacctcctcgtggtcccgctggatacccttgtggtaactaagtcgacttctgccccagtgtgagtgaggacgtacatctgtcctccctgtcgttgggctcgccacctaatggtagtttcacaaattgctgaaacccaatagtttggcacagttagtttgctgttgcacagagctttgtccacgggctattgttggtcacagctggtagtttaggagagggccaactatcagctattacaaccctcacttagaatttctggatggacaatatggtgcaatctctggctttgcattttatttcgatcgctactcaaactgacccattagatttacaggtcactgaggttgaagttccatctataccctctgtgcccagggaagagggattacaactggtgtgtttggagtttgtgaactccagaattgttaaagaaggtggtatacatcacgcagatgtgtgggaaggattggcacaattccctgaagcctatgagatctcccctatggggttggcccaggatgtgcccgagggtgtggtcggaggtactggaggcattgacgagcctaaaacgcctgaagctcctcccaggtctgacagcacaacggtgaagtcacctgttgtgtacgtcccggacaaacaaccatcttgtccacgatgtgagactcggtttacaaggatgttggggctgattgatcatcttaaaagggtgcacgggcagaaaaagatcattttcagatgctcgaaatgtggtaaacaaaatcttaaataccacagtatctcttgtcatgttccgcggtgtaaaggtgtggtgtgtgtggttccaaccggcaaatggatttgtgaggtatgccaccgtgggtttgccactaagattggccttggtcaaaacaagagaattagacatcctcttgtgagaaacgtggagaggatagttgcttcccatcctaaagagtcatcctctcgaggagcccacaagagagtatggactgatgaggaggaggctctcttggtgcaattggtggacatgtttgctggtaaaagaaacatcaatcaattaattgcggagcaaattccatctaaaacggcaaagcagatcagtgataaaaggcgccttctgttcagagttccctccgcaaaagatcatgtaggaagagggggtgccatcggcattgaacatcaggccgagtctgctaaattgccaaaggagggaaaattaaagcaccggtactgcgaggcaatcaaagcgggactatcagcgggcaagtttaccatgtatcgggaggcctttgagaaaattttggaagggcaaaatccgggtcaggtggtgaatgatgtttataaggaattctgtggtattctagatgtgcctagccaaattaaatctgccaagggtcggaaagcgcgaccgtcccgtagccccaaagcatccaaaactccaacaaattggatgcgtaagagagcaataaagaggggtaaattcttgagatttcagttgttatacgagttgcatagaaggtgctttgctcgtattatcttggacagcacggaagtcgtccagtgccagttaccatctagcgttgtccaggatcactttaaaagaaggtgggatatatctggtgtatttggtggcctacagaactttcctccttatgaggaggctgataacaccttgttcgaggccttgataactgaaaaagagattgaaaagagtgtgagtgagatgtgtaaaacctccgctcccgggccagatgggattactttgggtcaacttgttaaaaaagaccctgagttttcccggttgtctgagatcttcaacctccggcttattaccggcactgttgcagatgcgctgcgggactgcaggacagtcttgatacccaagtcttcagtgtcagagaagcttggtgatatcaataactggaggcccatcaccataggttcggtggagattaggttgttctccaggatcgctgcggcgaggctgtccaagacatgtcccattaatccccggcaagggggctttatttgtgcatcaggttgtgctgagaacctcaagctattacagcttgtggttaaaacagcaaagcgagagcgaaaacatctgggggttgtgttcgtggacatcgctaaggcctttgacactgtacgtcatcagcatgtaattgaaggtctggtccaaagaggtgtggatccacatgtggttgagttagtgagggaaatgtatcgggatatcaggacctacatttccatggaaagggaaaggacagaccacatttacattcactctggtgtcaagcaaggcgacccgatgtcacccttgctgttcaacttggcgatggaccccctactatgtaaacttgagaaagaaggtgaaggtttccatcatgtgggttggaaagttacagctatggcctttgcggatgatttggtgctgttgagggattcttgggaaggcatgtgtaataacatcaaaattttggaagccttttgtgaacttatgggcctccgtacacagggggaaaagtgccatggcttttacatcaagcctactagagactcgtatactatcaatgattgtccctcacggataattaatagatccctccttaacatgatcgacccagggagctctgagaaatatcttggcacatgggtggacccttggacaggctttgcagatcatggattatcagagaagttaatagattggcttcatcggattggtgcttcaccccttaaacctcttcagaaagtcaatatactcagaacttacaccatccaaagactgatatatctggctgatcatactgaagtgaacgtaggccttctcgagtcccttgaccagttaattcgtaatgcggctaaggagtggcttcatctccctccaagtacgtgtgatgcaatcttgtattcgagttttaaggatgggggtttaggacttatcaagctggtggcgcttattcctagtattcaagcacgaaggctgcatagattagctcagtcttcggatgaggctcttgtgagctatctaaaagaggtacatctggaacggttatttgagaaattatggttgaaagctggtgggagacaagagtccatcccgtcaatttgggagcccttactgttggttgaagtaggagatgtgggtgaggcccggtcagaatgggaggcacccgtcccgaaaatccgctacccaaaaccatgtgattggtggaaaattgaatttcagaaatggtgtcatttggttacccaaggtcacgggattacgaattttgagaatgatgcaatcagtaatgcttggataaagtggtttaagggcatacctcaccgtaaattgattacagctctacaacttagagcaaatgtctacccgacgagagaattcctggctaggggtagacaagaggatgtggttcgatcatgtaggcattgtggtgccacatttgaaacagtcgcacacattgtcgggaattgtgttatcactcaggatgccaggattaagagacacaatgctatctatgaaaccctgagtgatgaagctaagagggaaaaatggatggtattccaagagccacaccttagagatgatgttaatgagttctttaaaccagacttaatctttgtgaagggttccaaggcggtggctgttgatgtgatggtgaggtacgagcattctgtaacctcattgagtgaagctgcctcagagaaggctaaaaaatatcagcgccttcatttgcagatacaacaattaaccaatgctgtggataatcgactatgttggcttccctatgggagcccatggtaaatggtttggcgagaatactcagttgctaaccgccctcggtctctctaaaacaaggctagagagaatcgcacagggccctggcatccaaagtactctttgcctctgtagatattgtacatatttttgttagcaaagctagatcgattttacctatgtaatcatgtatcaataaaattaggcccctcccctcagcgggttcgctggacagtggaatcggttctgggtgggaggggctcatccgtcataaccacgtttagcccatatttgggcaataaattctgatttggtcattcaggtggacgggccaccttacttaacccggaaaaggaacatatacgatttgtgtatgtttattaaa

SEQ ID NO: 574 - DNA, 4244 bp, Xenus cinereus
  source 1..4244: mol_type = genomic DNA
gacgggatcatagttactaactgggcacagctgcggggggtcacacctccacgtggtcccgctggataccccttgtgggtaaccgagttgaccccctgccccagtggcacggagctatggttacttcctccctatcgagtggactcaccaaccacttgatagtatctcccaaaggtgaaacaaagttctgaaacgctccgtttctaaattccttagcccacggtaatagttgggcacctccgacaagttcggtggggtactgtcggattgatcaaatcctcacaattggcacttcgaaatgggatggctcgggcgaatctggttcgtttccgttgctacccagactaattactcggattgggcatttacggttcattccatcacgaaccctgagctgccaggggatgggaatgcagaaataagagggttggagttttgtaactcggaaaagggctattatgttgggcactccccctcctggttcagtgtacttgatactttaccggaggtctatgagactccgatgttgcagggcaatgtcatcagcccacgttctgagccggccgaacaggaaggagaaagaccatcttctcctccgataacacctccacctcccattctggaaaccgaggcagacctcccgcaagagggcacacctgtggtgaaggtcccggacgaaaatccagcatgtccatgctgcgggaaccggatgggaaggatctcggggcttattgaccatcttaagaggacccatggaaagagaaagatcttatttcaatgtgcccgatgtggaaaaacaaatttgaaacatcaaagtatcgcttgccacgtcccaaagtgtaaaggcgtagagggattgagtccagtaagagcttggacttgcgaggaatgcaatagatcatttgggacaaaaattggtctgagccagcacaaacggctcgctcacccagttacaaggaatcttgaacgaataacagcttcccgcccaaaagaggagagtgcaagaggtgcacaccgtcggtgttggtcggaagaggaagtggaattacttaaaaagctggaaaaacaatatgaagggaacagaaacatcaataaattaattgcagaacatttaccatcaaaaacggctaaacagataagtgacaaaagaaggggactggtgaaaagtccatctaagaaatctccatctaaaagaaaagggaaaaatctggcgctgcgagaacaacttatggaagaaggggaacatctaccagagagtggctcacaagatggagggggactgcggccccattaccgaaaggttattgctgaatggataagatctcagaaaataacctccctcaaggatgtctttgagagagtgatcaaagggaaagaagatctcccattactagtggacaaagctgcccaggaccactatgcatgcctgaaaatggatttgattgaagagggggatcggcaaagtcaaaagatccgagaaatccgcaggccccgtccacagaaaccatcaaaacaatggactaaaagaagggccagaaaaagggggcagttcctacggttccagcggctgttccacctagatagagggaaacttgccggtattatcctggacgacgtggaatccctccaatgtggtattccacttgacgtggtgcatgaagtattcaagtcaagatgggaatcacccggtacattcaagggcctgggaacattcaatactattggacacgcggacaattccgcatttcaaaccttgattactgcaaaggagatcgtgaaaaacatccgagaaatgaataaaaacgcagcaccaggaccggacgggatttccctgcgggatctcatgaaaaccgacccccattgtactaaattaatggaattatttaatttgtggttgactactggttatataccagagggaataaaaaattgtagaacaatattgataccgaaatcatctgtaccagaaaagttaaatgatgtaaataattggagacctataactattggctcgattgtattaagattgttttcaaaaatcttgactgctcgattaactaaggcatgtcctattaacactcggcaaagagggtttataagatctcctggttgttccgaaaatttgaagttattacaattattaattcgatatgcaaaaagggaacaccttcccctcggggttgtctttgttgacttggcaaaagcatttgatacggtgagccactcccatataattgcagttcttaaacaaaagggagtcgatgagcatataataagactaattgaaaattcatatgaaaatattaatacatatattgatatgaaaaatgttaaatctgaccttattggaatacaaattggtgtgaaacaaggcgatccgatgtctccaattttgtttaacttgtctgtggaccctcttttatgtaaacttgaagaaatgggtaacggatttcaatattatacgaaagatgtaacatcactggccttcgctgacgatttagtattagtaagtgggtcctgggaaggtatgcaaagaaatatagaaatcgtcgagaccttttgtgaacttactggtctcaaaatgcaaggggaaaagtgccatggcttttacatcaagccaacaaaggactcatatacgatcaatgactgtccaccatggactattaacggcacccccctcaatatgattgaacctggtagctctgagaaatacctgggtctatatattgacccatggacaggaatatctaaacccgagctactcgagaaagtcgatagatggttgtcgaaagtgggaaaggcaccattaaaaccttttcagaaggttgacatcttgaaggggcacctgatcccaagattaatttatcttgcggaccaagcaaatttgaaatcaactcacttagagtcccttgacttagccatacgaattggagtcaaggagtggttgcacttaccatcgtgcacctgtgattccatcctttattctaatactcaggatggaggattagggatcagtagattggcggcactgatccccagtgtgcaagctcggagactgcacagaattgcccaaactacggacgatgttttaagaactgtagtcgaaagagaaggaatagaaggagaatttaagaaattatgggtgacggctggtggtgacaaagaaaagattccatctatatgggaccccaaaacaattatggtaatatctgaaacgggcggtgaccaatcactatcggaatgggagactcccaatccaaaaattttctatccaaaaccttgtaactggcgaaaaagggaatttaacaattggactaaattattaactcaaggtcggggtatcgctaactttgaaaaagataaaataagtaacaattggattatacattacaggggcattcctcaaaggaaattgattactgcattacaactgcgtgctaatatttatccaacaagggaatttttatctagaggacggtcagaaacttatattaaatcttgccgtcactgtcaggctgacaatgaaacttgttcacatataattggctattgtccatctgtacaagacgcaagaatcaaaaggcataatcaaatttgtcatatattggcagaagaagccaaaagtaaggattggctggtttaccaagaaccgttattaagggatcagcaaaatgaattatataaacctgatttgatttttgttaaagggaatcaggcaatagttaccgatataacaattagatatgaaacatctttaacaactttggaggaggcagcattggaaaaagcaaagaagtatgcacatttagttactcaaattcaggacctgacgaatacatctgttataaattttacaggctttcctttgggatctcgtggtaaatggtaccagaacaacttcaaaatattaaaggaattgggtctctccagctcccgacaagaaaaggtcgccagacgattgtcaaactatgctttatttagctcggtggacattgttcacatgtttgctagtaaagcgaggacagaggtaagataaacttattctgacttatttagatttgtaatgtttagatgtagtattgtagcatgtagttttgtagattgtaatgtagaatgtaataaaatggactgggatctcgtgatgattaccttaatcatgacgctcactggactgacttggttggtggacgggccaccttataaaacccggaaaaagtacacataccctgttatgtgttcgtaag

SEQ ID NO: 575 - DNA, 4699 bp, Aphelocoma californica
  source 1..4699: mol_type = genomic DNA
ggcggcttatgagagtatagttacaaactgggcatcgctgcagagatcgcacctcctcgtggtcccgctggataccctgcgtagggtaacaaagtcgatctctgccccagcacggagtcgttgggaatcaccagttcaacgatctcctgctaaattcggtgacacaaatttgaggtaaaagccacgcggccattgccctaaacctggccccagggtttaaaaaagagggcaaaagatcggtaggcggtgaagggggccactaccgttctcatggaaatctccaaaccatttttggggccgccgatacgcctgtaccaggtatcggtcggcacccaaacctccaattctgattgggttgacctggtgtcccgggatttcaaaccgggctccttgtctaagtcctgcggggtcgacctggcgtctttaatttctgaacgccgggtagccctgctgtctaaaaccgatcgggtagacctggtgtatttaacttctaaacgccaggtagacctgctggctaaaactaaccaggcagacctggtgcctcaaaatttaccatctggctctcctaattcggcagaaaatgaattagatctggtgaacttagagttttataggtcggattggtgtgttgataacgtgtgtggtcatttttctgtgaattgggtgggtttgagcgggctgcctgaggtgtatgaacaacctacaccacaaccgagtgcgggagggggcgaccatccccccaaggacagtgaagtgattgtgcttagcgacggggaggaaagcggcgagcacgagcgtgggagcgccttggagacttcgcctcctgagcccgagaccacctcggagacttcgcctcccgagccggggaccagcgctttaccggcaccatcccctcctccagcagaggaccacgggaagcaggcaccaggggacatcctagtggtgactattccggacaaaaatccaccttgtccatgctgtgggacccgggtggggggggtggggggcttaattgaacatctaagagaagcccacgggaggagggaggcctgttttcgatgtgctaagtgtgggaaagaaagtaacaactgtcatagtattgtttgtcactttcctaaatgcagggcaaagacagagacagctccggctggggagtggatctgtgaggaatgcgggagagacttcaaaactaaaattggcctgggacaacacaaaagattggcacaccctatgattagaaatcaggagaggattgctgcttcccacccaaaagagacctctaacagaggagcccacaaaaggtgctggacaaaagaggaggaagaactgttgataaaattggaaactcagtttgagggcaacaaaaatatcaataaactcatagccgaacatatcccaactaaaacagcaaaacagatcagtgacaaacggaggctgctgcccagaaaaccgacagaggatgtttgtgaggagcctggggtgagtcatcgcaccaggagagcagctgcggggctaaaaatagaacctgggctgagtactcagcctgggaaaggaacagaagacaaagaacctgagataagccagcgactcaggaggccggctgccgggaggagagcggaaccagagataaggcaccaccctgataagaggacaaaacagctgggaaccatcgaccagcagagggaggggcaactgcaggcccattatctgaagaaactcggtgaatggctttctgccgggacaattaagaccttcccacgggcattcaagcagttaatcaaaggccgggagatgcaacccctggtgaatgagacagcgcaggactgctttggatgcctggaggcaaaaagccaaacaaaaccaacagcccgagataaggacaagagggagacccgggaggggaaaccgacaagaccccttcagaagtggatgaaaaagagagcagttaaaagaggtaaatacctacgtttccaacgtttattccatcttgataggggaaaattagctaagattattctggatgatgtagaatgtctgtcctgtgatatctcacccagcaaaatttattcggacttcaaagccagatgggaaacagctggtaaatttgatggccttggggactttcaaattaatgggaaagccgacaatagtgctttcagggacttaattacggctaaagaaattgagaaaaatgtgcaggagatgagcaggaattcggctccaggtccagacgggattactctgagagacatcaggaagatggaccccgagttttcccagaccatggagatcttcaacctatggttaacatcaggaaaaatcccggacatggtgagggggtgcaggactgtgttaatcccgaagtcatccaggccggagcgcttaaaggacattaataactggagacccatcacgattggatccatcttgctgcgtctgttctccagaattctaacagcaaggttaaccaaggcgtgccccctcaacccaaggcaaagaggctttatcagagcggcgggatgctctgaaaacctgaaactcctgcaaactataattcgatcagccaaaagagagcataaaccgctgggtgttgtatttgtggacattgccaaggcctttgacaccgtgagccaccggcacattctacaaggtctgcagcaaaggtgcgtggatccccacatcgtcagcctggtgagcaatatgtacgagaacatccgtacatatatcaccacggggaaaacacagacagaccacatccagctccaggttggagtaaaacagggcgacccgatgtcaccctttttatttaatctggctatggaccccctactatgcgaactggaaacgagtggcaaggggtaccaccgaggacagagcagcgtcacagcgatggcatttgcggacgatctggtcctgttgagcgactcctgggaaaacatgaagcagaacatcaggatagtagagaccttttgcgacctcaccggtctcaaaacacagggggaaaagtgccacggcttcttcatcaagcccaccaaggactcctacactgtcaacgactgcgctgcttggactattaatggcacacccctgaacatgatacaccccggagaatcggaaaagtacctgggcctgcagattgacccctggactgggctagcaaaatccgacctatctacaaaactagaaaactggcttgagaaaataggtaaatctcctcttaaacctctgcagaaactagatatcctcaaaacatataccatccctcgactgacctacctggctgaccattcggatctgaaagcagggttcctcgaggcccttgaccagacggttcggacgacggtcaaggaatggctgcacttacctacgtgcacttgcgatgccatcttctactcgagcacgagagacggcggtttgggccttaccaaattggcaggactgatccctagcgtgcaggctcgaagactgcatcggctcgctcagtcttccgacgagaccatgaagatgttcctggataaagatcaggtggaacaactgcataagaagctgtgggttcaagctggaggggacagggagaagatacctgcaatttgggaagcaaagccggcgaatgtaccatctacctcatgcagtgcagacattacttctgagtgggaagcaccatccttcaaaagcaaatttcccaaaccatgcaattggcgtaagaacgaatttaaaaattggactaaattagtgtcccagggccgtggaattgaaaattttgagggagacaaaattagtaaccattggatacaatattacagaggcattcctcacaggaaactccttacagctttacaactgagagcaaatgtctaccccacgagagaatttctagccaggggtagaaaagataaatacaccaaggcgtgcagacactgtgaggcggacaacgaaacctgtgcccacatcatcggcaactgcccgataacgcaggacgcgagaatcaagaggcacaattacatctgtaaggtgctgtcagaggaggcaaagaagaaggactgggtagtgtttcaggaaccgcacctaagggataccaacaaggaactgtacaaaccggatctaatattcgtgaaagacgcccgtgcattcgtcgtggacgtgacagtacgatacgaagcaagcaaaacatcgctggaggaggccgccgcagagaaagtgaataagtacaagcacctcactgaagagatacgagaactgaccaacgcaaaggacgttgtgtttatgggctttcccctaggagcgcgggggaaatggtaccatgggaactttgaactgttgggtgctctcggcctttccaaaacaaggcaggagagggttgcccggactctatcctccattgcgctcacatcatctgttgacattgtacatatgtttgctagtagatctaggaactgtaaggtagtataggcagttccttactattgttttgtaaacttcctctgtagcacgttttcaataaagtttcggcggaggctagggacgcagggcagccacaagccagaacatcgctcatggtaagtagggacaggacggaacttttcataacgcgtcaattaccacccgatttggaccgatttacctgatttgtccgaggtggacgggccacctttacttaacccggaaaaggaacatatagtatttatatgtgttcgaaaaa

SEQ ID NO: 576 - DNA, 4221 bp, Cichladusa arquata
  source 1..4221: mol_type = genomic DNA
ggaagcttgagatggtcggttactaactgggcttagctgcggaagtcacacctcctagtggtcccgctggacacccgtaaagggtgactgagttgacttctgccccagtgtgagtgggggagattattctccctccctatcgtctggactcgccacccagcgatagtttcacgacttgctgaaacaaataatttggcacagttttttactgttgcccagagcctggtccacgggcttaagttggacgctgttggcagcgtggggtgagggccccgctgttgacattgacaaccctcacttggacgtgacgtatttaattttccggattgaccatggtacaaacgatttcgttgcgttacatatcaacgggcactcagacagacccgttagatctatgggtcataaaggccgatgtttcatccacaccccccacattgattgatgagaggttcgatctcgtatgtctagagtttgtgaactcctcctatagtgaggagagtggattccatccggaatgtatttgggagggcttggccaatttacctgaaccttatgagaccttgcctttgcggctggttcagagtgaggaatctgagtgtgttcaaacggttgtcgaagagcttaaaacacctgaggctcttcctgggcccagcggtgataggacaccagttggaacacctgtggtgtccgttccggacaaaaatccagcatgtccacgttgtgccacccgttttacccggatgctggggttgatagaccatctaaagagaaatcacgggcagaaaaagatctggttcaagtgctcgaaatgtggtaaacaaaatcttaaataccacagtattgcctgtcacttcccacggtgcaaaggggaggtatgtgtggttccaactggtgattgggtttgtgaggtgtgccagcggagttttaccaccaagataggcctgggccaacacaagaggctgatgcatcctcttgtgagaaacttggaacggattgaggcctcccatccaaaggtgtcatcattacgaggggcccacaagaaggtgtggacggaggaggaggaggctctcctgagtcaactggtggtggcatatgctgggaggaagaacatcaaccaactgattatggagcacataccatctaagactgcaaagcagatcagtgataaaagacgccttctgatgaaagttccctccaagaaagatcgacttgaggaggaaggtgcggggaaagaagaacctccccagagtgctgatttgccacaggagggacagttgaagctccaatactcggatgccatcaagagaaagttggcggcatgtgagttcactagctgccaggaggccttcgagaaatttattgatgggcaagatctgcagacggtggtgaatgaggtttatgagaagtttcttggtagcccatgtgggcttagccaggatgtgaaaccttccaggggccggaagttacagaaggtccagaaagcatccgggacaacaactaattggatgcgaaaaagggcaaagaggaaagggaaatatctccgatatcagaggctgttccatttacaaagagggagacttgcacggatcatattggataacatcgaagctatacagtgccaaataccatctgacattgtccatgctgcctttaaagctcgatgggaaacatcagttggttttaagggtcttgaatccttcccgccgcatgggaaggccgataacaccgtttttcaagccctgattaccgaaaaagaagtggaaaagaacttgaaagaaatggcaaagacctccgctcctgggccagatgggattactttgggtcagcttcttaaaaaagacccgaagttttccctgttgacggagatcttcaacctctggctggttactggaacgatacctgatttgctccgggactgccgaacagtcttgattccgaaatccaccgacttagagaaggtgggtgacatcaacaactggaggcctatcaccattgcctcgacggtgcttaggttgttttccaggattgtgacggcgagactgactcgagcttgtcccattaaccccagacagaggggatttattcgggcgtcaggatgttccgagaacctgaagctattgcagcttgtggtgagacatgctaaaagggagcattgtgacctgggggtcgtgtttgtggacattgccaaggcctttgataccatcagccatgaacatattattatgggtctgacgcaaagaggggttgatccccatgtgatccaactagttattgagttgtacaagaacatcagtacgtatattgatatgaaatctgagaggacagacccgattaagatcttaagaggggtcaaacaaggagacccgatgtcacctattttgtttaatcttgcgcttgatcctcttttgtgtaaattggagaccgatggttatggattccagcgaggacgtttaagacttacagctatggcctttgctgatgatttggttttgttaagtgattcctgggatggaatgtgtggtaacatcaagattttggagaccttttgtgaacttactggtctccagacaaagggggagaaatgtcacggcttctacatcaagccaactaaagatgcgtacaccatcaatgattgtccagcatggactattaatggttccccccttaatatgattgacccagggaattcagagaaatatcttggtatacaggttgacccctggactggctttgctgactcaggtctatcgaagaggctggaagaatggctccagcggattggggatgcaccactgaaaccccttcaaaaagtcgatatacttagaacgtataccatccctagactaatatatctggctgaccacaccgaagttaaaagtgggcccctcgaatcccttgacttgattgttcgaaatgaagtcaaggtatggcttcacctccctccaagtacgtgtgatgcgattctgtattcgagatgtaaggatggtggtttaggtattatcaagttatcggcgcttgttcctagtatacaagcacggagactgcacagattggctcagtcttcggatgagactctggtacaatttttaaagggggaacatctggaacttttatatgagaagttatgggtacgtgctggtggtgagaaggagtccatcccgataatttgggagcctattccaatggatgtaagtgttgggagtggaggtgaaggtttgtcagaatgggaggcccccgtccccaaaatccgctacccgagaccttgtaattggcggaaagtggaatttaatagatggaaacacctggtagcccagggccatggtattgaaaattttgagaatgataacatcagtaatggatggttaatccattacagaggcattcctcatagaaaattggttacagctttgcaattaagagctaacgtctaccccacaagagagttcctggccaggggtagaggggatgtctgcgtaagatcttgcagacactgtggtgccgattatgaaacaacagcccacataatcgggagttgcccaatcacaaaagaggccaggattaagagacataattctatctgtgagactcttagcaatgaggctaagagggagggttggtcagtattccaggaaccacatatacgggatgagaagcaggaattgtttaaaccggatttgatttttataaagggaaataaggcacttgtggttgacgtgacggtgaggtacgagcataacaactcctcattaaaggaggctgctgcggaaaaggctaagaaatatcaatgcctggtacatcaaattaaagatttaactaacgcagctgaaattgaatttataggctttcccattggggcgcgggggaagtggtatgaaaagaactctgagttgttaacggccctcggtctctctaaaacgaggctagggaagactgcccgggccctagcatccagagcgctccttacttccgttgatattgtacatatatttgccagcaaagcacgaagtgttgtatccaataaataataaacttgtcggccccttcccggctgtcggtgacctggacagtggaattggttttgggtgggaggggttcatccttctatcgtgtcaatttaccatcacccaaactttgggtccaaaattctaatctggaccaggtggacgggccacctttacttaacccggaaaaggaacatataatctttatatgtttattaaa

SEQ ID NO: 577 - DNA, 4450 bp, Erithacus rubecula
  source 1..4450: mol_type = genomic DNA
ggcagcttgagagggttggttactaactgggcttagctgcggaagtcacacctcctagtggtcccgctggacacccgtaaagggtgactgagttgacttctgccccagtgtgagtgagggggtttactctccctccctgttgtctggactcgccacccagcgacagtttcacgaattcgctgaaacaaataataattggcacagctattagctgtcgcccagagcctggtccacgggtctaagttggacgcagttagcagcgtgggggagggccccgctgttgactttgacaaccctcacttggacgtgtctcaattttttcctcctaatttgaccatggtacaattggtttcgttgcggtacatatcaacggccactcagacagaccctttagatctaagggttgcaacggccgctatctcatctataccccccacaagacacgatgagggttttcggcttatgtgtcttgagtctatacctcccacaagacacgataagggtttccagcttaagtgtcttgagtctataccccccacaagacacgataagggtttccagcttaagtgtcttgagtctataccccccacaagacacgataagagttttcagcttaagtgtcttgagtctataccccccacaagacacgatgagggtttcaagcttaagtgtcttgagtttgtaaactcctcttataacgaggagattggatatcatttgggaggtatatgggagggtttggcggatttacctgaaccttatgagaccttgccctttcggctggttcagggtgatgtgtctgagtgtgttcgaacggtggttgaagagcccaaatcacctgaagctcttcctgggctcagcagtgaggggacaccgtctggaacacctatagtgtccgtcccggacaaaaatccattttgtccatgctgtgccacccgttttacacggatgctgggattgattgaccatttaaagagaaatcacgggcagaaaaagatttggtttaaatgctcgaagtgtggtaaacaaaatcttaaatatcacagtattgcttgtcacctcccacggtgcaaaggagaggtatgtgtggttccgactggtgattgggcttgtgaggtatgccaaaagagttttaccaccaagattggcctgggccaacacaagaggttggcgcatcctcttgtaagaaacttggaacggattgaggcctcccatccaaaagtgccatcattacgaggggcccacaaaaaggtgtggacggaggaagaggaggctctcctgagccagctggtgatgatatatgagggtaaaaagaacatcaaccaacggattatggagcatttaccatctaagactgctaagcagatcagtgataaaagacgccttctgatgaaagttccctccaaaggtgttctatcccaagaggaaggcgtggggagtgaagatcttccccagagtgtagatctgcctcaggagggactgcctcaggagggacggttgaaactccaatactcggttgccatcaagaggatgtttgctacatatgggtttaccagctgccaggaggcctttgcgaaaattttagatgggcaagatccgcaaatggtggtgaatgaagtctatgaaaagttctttggtagcccgcttgagcttagtcaggatgggaaatctaccaggaggcgaaaatcacagaagggccagaaagcatccaagacaacaactagttggatgcgaaaaagggcaaagaaaaaagggaaatatctccgatatcagagattgttccacttgcacagaaggagacttgcacgcatcatcttagatgatgttgaggacttgcagtgccaattaccatctaacattgtccacgctgcttttaaagctcgatgggaaacaccggttggttttaagggccttcaatccttcccgccacatgggagggctgataacaccgcttttcaggccctgataacaccaaaggaggtggaaaagaacttgaaagaaatagctaagacctccgctcctgggccggatgggattactttgggtcagcttcttaagaaagacccaaagttttctttgttgactgagatcttcaacctctggctggttgctggaacaatacctgatttgctccgggattgccggacagtcttgattccgaaatccaccgatttggaaaaggtgggtgacatcaataactggaggcctatcaccattgcttcgacagtgcttaggctgttttccaggattgtgacggcaaggctgacccgtgcttgtcccattaaccccagacaaaggggttttattcgggcgtcgggatgttccgagaacctgaagctgttacagcttgtggtgagacatgcaaagagggagcattgtgacttgggggtcgtgtttgtggacattgctaaggcatttgataccatcagtcatgaacatattattatgggtctgagacaaagaggggtggattcccatatagtccagttggctgttgatttgtacaaaaacatcaatacgtttattgccatgaagtcaggaaggacagacccgattaagatcttaagaggggttaaacagggagaccctatgtcacctattttgtttaaccttgcgcttgatcctcttttgtgtaaactggagaaaaatggttatggatttcagagaggaaatttaagaattacagctatggcctttgctgatgatttggtgttgttaagtgactcctgggacggaatgtgtggtaacatcaagattttggagacattttgtgaacttacgggtctccagacaaagggtgaaaaatgtcatggtttttacatcagaccaactagggacgcatataccatcaatgattgtcccgcttggactattaatggtaccccccttaatatgattgacccagggaattcggagagatatcttggtatacagattgacccctggactggctttgctgattcaggcatatcgaagaagctagaagagtggcttcatcggattagggatgcaccactaaaacctcttcaaaaagtcgatatacttaggacatataccatccctagactaatatatttggctgaccacaccgaagttagaggtgggcctcttgaattccttgacttagttgttagaaatgaagtcaagggttggcttcacctccccccaagtacatgtgatgcgatcttgtattcgaaatgtaaagatggtggtctaggtattatcaaattatcggcgcttgtgcctagtatacaggcgcgaaggctgcatagattggctcagtcttcggatgaaactttggtgcaatttttgaagggagaacatatagaggttttatatgagaaattatggttacgggctggtggagtaaaggaatccatcccgacaatttgggagcctattccagtttctgtaagtgtcgtgagtggaggtggagatgtgtcggaatgggaggtccccgttcccagaccctgctacccgagaccttgtaattggcggaaaactgaatttaatagatggaaacacctggttgcccagggccatggtattgaaaattttgagaatgataatatcagtaatggctggttaacccagtatagaggcattcctcatagaaaattaataacagcattacaattgagagccaacgtctaccccacaagagaattcctggctaggggtaagaaggatgtgtatgtgacaacctgcagacactgtggagccgattatgaaacaacagctcacataatcgggagttgcccaattactaaagatgccaggattaaaagacataattccatctgtgagactcttagcaatgaagctaagagggaaggttggtcggtatttcaggaaccacacatacgagatgagaatcaagaattgtttaaaccagacttgattttcataaaagaaagtaaggcacttgtggttgatgcaacagtgagatacgagcacaacaattcctcattaaaggaggctgcggcggaaaaggttaaaaagtatcagtgtctgttacaacaagttaaagacctaactaacgccgaggatatagaatttattggctttcccattggggcgcgggggaagtggtatgaggagaactttgacctgctattggccctaggtctctctaaaacgaggctagggaagactgctcgggccctagcatccagagcgctcctatcttccgttgatattgtacatatttttgccagcaaggcacgaactgttgtatcaaattgaataaacttgtttaaacttgttggcccctacccagctgtcggttacctagacagtggaattggttttgggtgggaggggttcatccttctatcgcgtcttgtaccatcacccagatttgggtccaaatttctgatctggaccaggtggacgggccacctttacttaacccggaaaaggaacatataatttttatatgttcattaaa

SEQ ID NO: 578 - DNA, 4335 bp, Myiozetetes cayanensis
  source 1..4335: mol_type = genomic DNA
ggtgagagcatagttacaaactgggctcagctgcagaggtcgcacctccacgtggtcccgctggatgccccttgtgggtaactaagtcgacctactgccccagttcggaggaggggttttggcctctctctccctatcgtctggagtcactgcccagcgatagtattcaaaaacagtgatacaaatttttttttggtaatagcttacgaagcaaattacccaagcaccttgctcacgggttctagttgagcacaggttgacagatattgagggatactgttgaccttataccccctcacttgaattggcaattatatataccgcaagatggggttgttgatgcggcttatgcatgtatcgacagccacacagaccaatattaatgatttgaaacctgtgacaaccaaattaagtgaaactataacccccgtaacgttaccatcagatgatattgaattatgtcaactagagttctctaactcgaatgagatagaggactggcaaacaactaaatttgttgatcaacgggaaaaattggctttatacccggaagtttatgagtcattaccatcagactcagtaagagaaaataacatcattttatctgggaatgatattgatgccgacggagagggagaggactcctttgcgctggccactgaatttgtgttagactcccagaaagataatttgccaggagaaacaccactggttaagttaccggacaaaacgccatcttgtccttgttgtaaaattaagatcatgggaatagaaaagctcgtggaccaccttttaagatctcatggaaaaagaaagatcattttccaatgtgtcacctgtggcctacaaaatgagaattaccgctctatcgtttgtcactatccattgtgtaaaggtgcatctgaggtgattccatctggtgactgtgtatgtgaggagtgtggaaggagctttcaaacaaaaagaggcttgggacaacataaaaggcatgctcacccggaggttagaaatcaggaaaggattgatgctgcccgcctgaaagtaaaaacatctcgggaaccggcccgaaaatgttggtcgaaagaggaggaggaattactggaaaaattagtacaacaatacgagggagagagatgcattaataaattaattgctgagcatattccaactaaaacgctcaaacaaattagtgacaaacggcggtgtatgaagcctgtacgtaaggaaaaggaagatcaagaaatatgcgtacaggtggcaaaaagaaagaatcagccagcagttactgaaacatcaaacccggatcaattgagggcacattatgtggaaacaatcaagaaagggataaaattaagaacgattaacatctatcccagggcatttcgcaaaattgttgaaggaagtaaagatcaacttacattagttaatgatactacagaggattggtatggacaccttaaagctagatgccaagcagaaagaaaaattaaagtagggtcaaagaaaaagaaagcccaggaaacacaaagtaagagaaaagcaacaaattggatgaaaaagagagcaattaaaaaggggcaatatttgagataccagaaattattttataaggatagagggaaattggcaaatataattttggatgagattgaatctgtaaaatgtgaaataccactttcagaggtattttctgtgttcaaatctaaatgggaaacaactggaaagtttaaaggccttggacattttcaatccaagggaatggcagataacagcgcctttgaagttatgattacagagaaagaagtagctaaaaacatcaaagaagcaaataaaaatgcagcgccaggaccggatggaattataatgaaagatctaattaagatggattctaaatatactgagataacagaactttttaatttatggttaacatctggaaagatacctgattcgttgagaagatgtcgaactatattaataccaaaatcaactaagcccgatcgattaaatgacatcaataactggagacccattaccatcgggtctgccgttttgcgattattttcgaaaatattaactgcgagactagaaaaggcatgtccaataaatttaagacaaagaggatttattaaatcacctggctgctctgaaaatttgaaattgttagaacttattataagaaatgcaaagaaacaacacagagaactgggagtggtattcgttgatattgcaaaggccttcgatactgtaagtcatcaacatattattatgggtctaaagcaaaaaggagtagactctcatattattaatttaattgcgaatatgtatgaaaatatttatacagaaattggtacaaaggaagagaaatcagaaccgattcaaattaaggtgggtgttaaacagggtgatccgatgtctccaatattatttaatttggccatggatcctttattatgtgaattagaacaatatggaaaagagtatcattatgacactaagtcgataactgcgatggcctttgcagatgatttggtcttacttagtgattcctgggagggtatgaaagaaaatatagagattttagaggtattttgtgatttaactggtcttaagacacagggagagaaatgtcatggatttttcattaaaccaactaaagactcttatacaattaatgattgtcccccatggacagtaggaggtacaccccttaatatgatttgccctggaagttcagaaaaatatctaggccttcacattgatccttggatgcaaatagctaaaccagatttgtcatcaaaaatagatacttggctggatcgtattagtgaatcacctcttaaaccgctacaaaaggtagacatcttaaaaatatatatgatccctcgaataatatatctagcagaccatacggaaatcaaaacaggattcctggaagccctagatttaaaacttagggcaagggtaaagaaatggttacatctcccgaatgatacctgtgatgccatcttttattccagcatgaaggatggaggactgggcataataaaattacaatcattgatcccgagtgtacaagccagacgaatacatagactggcacaatcttctgatgagaccttaagagatatcttgcagcaggaaaacatctcgcagaagtatgagaaattatggataacagctggaggagataaggaccagataccggatatctgggcacccaaaccaacggtgcaaacatcatatctgggtgaagaagatacatcggagtgggaggtaacaacatcaaagaacacctacccacggccttgcaattggaggaagacagaatttcggaagtggaccaaattacaatcccaaggtattggaattgtcaactttgaaggggatacgatcagcaatagctggatcaaaaactaccgaggtatcccccataggaagctcctgacagccttaaagttacgagcgaacgtctatcccactcgagaatatctggcgagagggaaaaaagacggatggactacatcgtgtagacattgcaaggcggaaaatgaatcctgtgctcatgtcatcggccaatgcccagctgttaaggatgccaggataaaacgtcacaattacatctgtgaaatgcttctgaatgaagcgagaaggaaggactgggtagtttatcaagaacctaatataagggattcagacggggagttatttaaacccgaccttgtctttgtcaaagagaaacaggcactggttgtggatgtgacggtacgatatgagggagatgttaacaccctggagaaagctgcaaaagaaaaagttaagaaataccaacacctagagaaagaaatccaggaattgactaatactgaaaaggtcattttcgtaggttttcctctcggagcaaggggaaaatggtttaacaagaattttgatttgttacagactctgggactgtcatcatccagacgagaaagagtagctcgggccatggcatctagagcccttctcacctccgtcgacatcatgcatatatttacaagcaaggtgcgtacagctattaacaaataggtaatcttttattgttttattgttattatagtattttagtttttatagttttaatgtttagatatgttatgtttttatttcttttattgtgtggttatgttatagttttaaagttcttattaaaggctgtgcgttttaacccccttccccccagtggagaatctcgtgatgattacactctaagcgcgatcaccggacatgacgatggtggacgggccaccgttacttaacccgtaaaagggacacactctgtgtgtgttcgtataa

SEQ ID NO: 579 - DNA, 4713 bp, Phylloscopus trochilus
  source 1..4713: mol_type = genomic DNA
ggcggcttggagagtatagttaccaactgggcaaagctgcagagatcgcacctcctcgtggtaccgccggacgcccggtaaagggtgaccaagacgatcgatgccccaggatcggagccgtcgggaatcgccagcccgacgaactcctgcctaaaatcggcgacgcaaatttcacggtaaaaagccgcgcggcttcttgcccaaaacctggcccccgggtttctgcggaggcactgtcggggcctggccccccggttccgatgtctcaggtaggtggactgaccacccactaccgtcccaccgaacgcggcggtgggatcccggatttggacaaatctggctgtgatttggggggggggggggtctggtccggaccgccggtgcgcttggtccgcgtatcggtcggctgccagacctcccccggggactgggtagacctggtgtcctggaatcggaacttcgtaccgggctccaagtctaagtcccagcgggttgacctggtgtctagacaccgggttgacctgttctccaaaaatgactgggtagacctggtcgctcaaaatttaccatctaaattgccccccgattcggcagaaaatgaattggctagtctggcgaacttagagttttacagatcggatttgcatggggatgaggggattcatttttctgctgtttgggagggattgagcgggctacctgaggtgtacgaacatctagcaccactaccatgtgcgggagacaattcacatcctagtcccccgcgagacaataacatgtttgtacttgaggagaggttttgcagggagaaggacagcggagacgcgccgaaaacatcgcctccagagcctggggagcccggggagcagacacccgtggaaacggtgacagtgactgttccggacaaaaatccaccttgtccttgttgtggtacccgggtaaactctgtgttgagccttattgaacatcttaaggggtcacacgggaaaaagaggatttgttttcgctgtgttaaatgtgggaaagaaaatcctaattatcatagtgttgtttgtcacgtccctaaatgcaggggtccagagactgaagcggctccagctggagagtggatctgtgaggtgtgtgggagagatttcaaaacaaaaattggcctgggacaacacaaaagacacgcacacccgttaattaggaaccaagaaaggatcgttgcttcccacccgaaagaaacatccaaccgaggagatcacataaggtgctggacaaaggaagaggaagaaatgctgataaaattagaagcgcagttcgcgggccatagaaacatcaacaaactcattgcagagcacataacgactaaaactaataagcagataagcgacaaaaggagattgctgcccaggaaatcagataaggaggtggaggaggaacctgctgtgtgtactcgcaccaggagagcagctgcgggcctaagaaaggaacctgagatgagtcatcatgatcaggctgtaactgaggacaatggacctgggaagagccacctgccaggaaagccagctgccggtaagaaaacaagggacgagataagccagcgcccagataagggtaacggtcggaggggagccatcaagcaccagggggcggggcaactgcaggcccattatcaccagactctcggggaacggctatcagctgggacaattaacaccttcccccacgcgttcaagcagctaatggagggccaggagatgcagttaaccatcaataagacagcgcaggactgcttcggatgcttggaatcgataagccagataagaacagcaacccgagataacaacaacaaaggggcccgggagaaacggccaaagagaccttttcaaaagtggatgaaggacagagcaattaagaagggtgattaccttcgcttccagcgattattccatctggacagggggaaacttgcaaggattattttagaggatatcgaggcattgtcctgtgatattccacccagcgacatttattcggtctttaaggacagatgggaaacacctggaaactttaagtgccttggggaatttcaaattaacgggaaagccgacaatagtgctttcaaggacttaattacggccaaagaaattgaaaagaatgtgcaggagatgagcaagggctcggcccccggcccggacgggattactcttggggacatcataaagatggatcccgagttttccctgacggccgagatcttcaatttgtggttaacatctgggaaaatcccggacatggtgaggggctgcaggaccactctgattcctaaatcaacagacccagaacgtctgaaggacaccaacaactggagacctatcacgattggttccatcttgctgagactgttctcaaggattgtaacagctaggctgagcaaggcctgccccctcaacccaaggcaaagaggcttcatcagagcaccgggatgctctgagaacctgaaactcctgcactctataattcggactgctaaaaaagaacacaggcaactgggtgttgtattcgtggactttgccaaggcttttgacaccgtaagccaccaacacatcatacacgctttgcagcaaagaggagtggatccccacatcattggactggtgagtgatatgtacaaagacatcagtacgcatatcaccgtgaataaaaacacacacacagacaaaatccatttccgggttggagtaaaacagggtgacccgatgtcaccccttttatttaatctggctatggaccccctgttgtgtaagctggaagaatgcggcaaagggtaccatcgagacgggaacagcatcacgacgatggcattcgctgacgacttggtcttgctgagcgactcctgggaaaatatgaaaacgaacatcaagatattagagaccttctgcaatctcaccggtctcaaaacacagggagtaaagtgccacggcttctacatcaagccgactaaggactcttacaccgttaatgactgcgctgcatggaccatctacggcacacccctgaacatgatcaaccccggcgaatttgagaaatacctgggcctgcagattgacccctggactgggtttgcaaaatccaatctctccacaaaactggactattggctccaacaaattaatcaggccccacttaaacctctgcagaaagttgacatcctcaaaacatacaccatcccgcgactgacgtatctggccgaccattcggagctgaaagctgggttcctggaaagccttgaccagaaaattcggacgacggtcaaggactggctgcacttaccttcgtgcacgtgcgatgccatcctgtactcgagcacgagggacggtggtttgggcatcaccaaattggcgggactgatccccagcgtgcaggcccggagactgcatcgtattgctcagtctttggatgaaacgatgaaaatgttcctggagaaagatcaaatggaacaattgcatgagaaactgtgggttcaagctggaggggacagggagaaaatcccttcaatttgggaggcaccaccggtgagtaatccatctaacagtgcaggcgcatcctcggagtgggaagcaccggtcctgaaaaccaaatttccaaaaccttgtaattggagaaaaaatgaattcaaaaattggactaaattagtgtcccagggccggggcatcataaattttgaaggcgataaaatcagtaacaattggctacaacattatcgatccatacctcacaggaagctccttacagcactacaactcagggccaatgtctaccccacaagagaattcttggctagggggaggcatgataaatacagcaaatcatgcaggcactgtgatgcggacactgaaagctgcgcccacatcatcggcaactgcccagtaacgcaggacgcccggatcaagaggcacaatcacatctgcgaagtgcttcttgaggaggcgaaaaagaaggactgggtagtgttcaaagaaccgcatataagggataccaacaaagaactttttaagcctgacttgatttttgtaaaggatacccgtgcaattgtagtggacgtgacagtccgctatgaatcagccaaaacatcgcttgaagacgctgctagtgagaaagttgacaagtacaaacatctagagactgaggtacggagcctcactaacgctaaggacgtggactttatgggctttccccttggagcgcgggggaaatggtacccaaagaactttgaactgtttacagctcttggcctctccaagtcgaggcaggagaaaattgcaaggactctatccacgacggcgctcctttcgtctgtggatattgtacatatgtttgccagtagggctaggaaattttagtttgtaattaggagtagtttatttatgtttttctctttttttgcaatttctctcttgcttattgttttgtatttttgcatttctctgtattgcttttgtatgtttttaaaaaatttaaaatttttcaataaaaagacagtagctggggcgtagggcagccacaagccaggtaggtagctcatagtaagtagggacaagtatcttttttcataacgcgtcaattaccaaccggactggactaaattacctaatttgtccaaggtggacgggccacctttacttaacccggaaaaggaacatatattatttatatgtgttcgaaaaa

SEQ ID NO: 580 - DNA, 4237 bp, Scolopax minor
  source 1..4237: mol_type = genomic DNA
gacgggatcatagttacaactgggcatagctgcggggggtcacacctccccgtggtcccgccggataccccttgtgggtaaccgagttgaccccctgccccagtgtgagcagagctatggttacttcctccctatcaagtggcctcaccaaccacttgatagtatctccctaaggtgaaacaaagttcagactttgtgtctaaattcctgggcccacggtaagagttgggcaactctgacaagttcggtggggtactgtcggaggggttaaatccccacaattcggactttcgagatgggatggtcagggcgaatgagattcgtctcagtggccacccagactaaatattcggattgggcatttacggttccttccatcctgaaccctgagctggcaggggatgagattgcgaatattagtgcgaatatcagtggactggagtttgtaaactcggagaaagggtacgatgtggggctttctccatcccggtccagcctcctggctacattaccggagccttacgagtctccgagagtcatgggcatagtcatcagcccgcgttctgagcagaccgaatatgaaggagagagaacatcctctccaccaagaacaccatcacctcccgttcttgaagccggggcagacctccctcaggagggcacacctgtggtgaaggtcccggacaacaatccagcatgtccatgctgcggtaatcgaatgggaaggattacggggcttattgaccatctaaagaggacccacgggaagaaaaagatcttgtttcaatgtgccagatgtggaaagacggacgtgaaacatcacagtatcgcttgccacgtcccaaagtgcaaaggcgccaaggagtccagcccgttaagagggtggacctgcgaggaatgcaatcgaacgtttgggagtaagattggcttgagccaacataaaagactggcccacccagttgcaagaaacatagaacgaataacagctgcccgcccaaaggaggaaagtgcaaggggtgcacaccgtcggtgttggtcggaagaggaggtggaattacttaaaaggcttgaaaaacaatatgaagggaataagaacattaataaattgattgcggagcatttaccaacaaaaacagcaaagcagataagtgacaagagaaggggactggcgaaaagtccacctaagaagaaagggaaagatctggcgctgcgagaacaattgatacaagagggggaacacctggtaccgagtggctcacatgaagttgggggactacggtcccactatcgaaaggtgattgccgaatggttaagatctcagaaaataaccactctccggaagacctatgagagagtgattaaagggaaagaagaccttccctcgctagtggatgaagctgcccaggactgctatgcatgcctgagaaaagatctaattgaaggggaggtccatcaaatacgaaagatccgagaaatccgcaggccccgtccgcaaaagccatcaaaacaatggacaaaaaaaagggcccgaaaaagggggcagttcctacggttccagcggctgttccacctggatagagggaaacttgccggtattatcctggacgatgtggaaaccctcaaatgtggtttgccactcgaggcggtacatgaggtattcaaatcgagatgggaatcacccggaacattcaagggcttgggtacattttgtaccgttggacatgccgataactcagcattccaatccatgataaccgcgaaggagattaagaaaaacatccgagaaatgaataaaaacgcggctccaggaccggatgggattaccgtgcgggatctccttaaaatcgacccccaatgtattaaactaatggaattattcaatttgtggttgttaaccgggtatataccggatgatgtgaaaagttgtaaaacgatattgttaccaaaatctaatgtaccagaaaagttaaatgatgtgaataactggagacctataaccatcggttcgattattttaagactgttttcaaagatattaacggcacgtttaagtaaggcatgcccaattaacaccaggcagagggggtttataaaatcgcctggttgttccgaaaacttgaaactattacaactgttgattcgatatgcaaaacgggaacaccaccccctcggggtagtctttgtcgatctggctaaagcatttgatacggtgagtcactcccatatattggcggtattgagacaaaagggagttgatgaacatataatacgattgattgaaaactcatatcaaaatatccatacttatattgacatgaaaaatgaaaaatcagaacctattggcattcgaattggcgtaaaacaaggcgatccgatgtctcctattttgtttaacttatctgttgatcctctactatgtaaactggaagaaattggtaatgggtttaaatgtcattcacaaaatgtaacagcactggccttcgccgacgacttagtgctattaagtggatcctgggaaggcatgcaaagtaacatcgaaattgtcgagaccttttgcgaacttactggtctcaaaatgcaaggggaaaaatgccacggcttttatattcagccgacgaaggactcgtataccatcaatgactgtcctccatggactatcaatggcacccctcttaatatgattgaaccgggtagttctgagaaatacctgggtctttacattgacccatggactggaatatctaaaccagaactattggagaaagttgacagatggttggagcgagtgggaaaggctccgttaaaaccttttcagaaggttgacatcttgaaagggtacttgatcccaagattggtatatctggcggatcaagcaaacttaaaaccaacatatctggaacatattgacttggctataagaaatgctgccaaggaatggttgcacttaccagcgtgcacttgtgatgccatcctatattcgaacacacaggatggggggctaggaattagtagattaacagcactaattcctagtattcaagcccggagattacacagaattgcccagacatctgacgatgtgctaaaagagattgtaaaacaagaaggaattgaaagggaatttgagaaattatggttgatggccggtggtgataaagaaaagataccatcaatatgggatcctaaaacaattatggtaatatcagagacgggcgatgacgaactatcagaatgggagatgcctaatcccaaattaatctatccaaaaccttgtaactggagaaaaagagaattcactaattggaccaagttgctatcacagggccgtggtattgttaatttcgaaaaagacaaaataagtaacaattggatcacacaatacaggggcattcctcaaagaaagctaataacagcattacaactgcgcgctaatatttatccaacaagggaatttctagccagaggacgtcaagaaacttatatcaaatcctgccgtcactgccaggccgataatgagacttgcgcacacataattgggtactgtccatctgtacaagatgcgagaataaaaaggcataaccaaatttgccaaatactggcagaggaagcaaaaagtaaagattggctggtatatcaagagccattattaagagacgaacgaaatgaactgtataaacctgacttaatatttgttaaagggaatcaggctattgtaacagacgtaacattgagatatgaaacaactgtaacaagcttggaagaggcggcattagaaaaagctaaaaagtatgcacacttaaaaacgcaagtccaagacctgacaaatgcatctattgtaaattttacaggctttcctttgggatctcgtggcaaatggtaccaaggtaattacaaggtactaaaggaattgggcctctccagctcccgacaagagaaggtcgccagacgattatcaaactatgctttattcagctcggtggacattgttcacatgtttgcgagtaaagcgaggacagaggtaagataaatttgaatttgtctttttgtagagtaataagtagatgtattagatgtagaatgtagtattgtagattgtaatgtagtatgcaataaaatctggactgggatctcgtgatgattaccttaatcatgacgcgcactggatggacttggtaggtggacgggccaccttcataaaacccggaaaaagttcacatacttgttatgtgttcgttac

SEQ ID NO: 581 - DNA, 2383 bp, synthetic construct
  source 1..2383: mol_type = other DNA
agtaactatgactctcttaagacgggatcatagttactaactgggcatagctgcggggggtcacacctccacgtggtcccgccggataccccttgtgggtaaccgagttgaccccctgccccagtgtgaacggagctatggttacttcctccctatcaagtggcctcaccaaccacttgatagtatctccctaaggtgaaacaaagttcagaaacgcttcgtgtctaaattccttagcccacggtaatagttgggcacgtccgacaagttctggtggggtactgtcggactgatcgaaatccccacaaattcggacattcgaatactcgacggatcgatccgaacaaacgacccaacacccgtgcgttttattctgtctttttattgccgatcccctcagaagaactcgtcaagaaggcgatagaaggcgatgcgctgcgaatcgggagcggcgataccgtaaagcacgaggaagcggtcagcccattcgccgccaagctcttcagcaatatcacgggtagccaacgctatgtcctgatagcggtcggccgctttacttgtacagctcgtccatgccgagagtgatcccggcggcggtcacgaactccagcaggaccatgtgatcgcgcttctcgttggggtctttgctcagggcggactgggtgctcaggtagtggttgtcgggcagcagcacggggccgtcgccgatgggggtgttctgctggtagtggtcggccagctgcacgctgccgtcctcgatgttgtggcggatcttgaagttcaccttgatgccgttcttctgcttgtcggccatgatatagacgttgtggctgttgtagttgtactccagcttgtgccccaggatgttgccgtcctccttgaagtcgatgcccttcagctcgatgcggttcaccagggtgtcgccctcgaacttcacctcggcgcgggtcttgtagttgccgtcgtccttgaagaagatggtgcgctcctggacgtagccttcgggcatggcggacttgaagaagtcgtgctgcttcatgtggtcggggtagcggctgaagcactgcacgccgtaggtcagggtggtcacgagggtgggccagggcacgggcagcttgccggtggtgcagatgaacttcagggtcagcttgccgtaggtggcatcgccctcgccctcgccggacacgctgaacttgtggccgtttacgtcgccgtccagctcgaccaggatgggcaccaccccggtgaacagctcctcgcccttgctcaccatggtggcgaattcgaagcttgagctcgagatctgagtccggtagcgctagcggatctgacggttcactaaaccagctctgcttatatagacctcccaccgtacacgcctaccgcccatttgcgtcaatggggcggagttgttacgacattttggaaagtcccgttgattttggtgccaaaacaaactcccattgacgtcaatggggtggagacttggaaatccccgtgagtcaaaccgctatccacgcccattgatgtactgccaaaaccgcatcaccatggtaatagcgatgactaatacgtagatgtactgccaagtaggaaagtcccataaggtcatgtactgggcataatgccaggcgggccatttaccgtcattgacgtcaatagggggcgtacttggcatatgatacacttgatgtactgccaagtgggcagtttaccgtaaatactccacccattgacgtcaatggaaagtccctattggcgttactatgggaacatacgtcattattgacgtcaatgggcgggggtcgttgggcggtcagccaggcgggccatttaccgtaagttatgtaacgcggaactccatatatgggctatgaactaatgaccccgtaattgattactattaaattcctgcagttcaggttatttagatgcttagtttttgtacctttcttgttttgtttaggattttgatagtgttagtatttttatatttttgtacgattgcataatgttcttttttatacagttctgttttaataaaatagacgatagctagagacgttagggcagccacaagccagttaggtagcggatagtaggtaggaacagacttttactatttcataacgcgtcaattaccacctgatttggaccaattcacgggatttgtccaaggtggacgggccacctttacttaacccggaaaaggaacatatataatttatgtgtgttcgataaatagccaaatgcctcgtcatcaccggtaaaaaaaaaaaaaaaaaaaaaaaaaaaaaaacgttgactaaaaaaaaaaaaaaaaaaaaaaaaaaaaaaaaaaaaaaaaaaaaaaaaaaaaaaaaaaaaaaaaaaaaaaaaaaaa

SEQ ID NO: 582 - DNA, 2578 bp, synthetic construct
  source 1..2578: mol_type = other DNA
agtaactatgactctcttaatgccggattggcgggaacagccgatcctagtaaggctggatgaattcatgcgggctgaagcagcggttctcccataaaataggggctttggggaaggtgggggacgtcgggggggcccctggagggacccctgtaccgataggggatccttgttttttcccctctacctggggcttttgtggggaggcgagggcacgtggtgagtgggggatggctgactggggaaagttaccaaggtatccccaaaacctgttttggtaggggtagggatacatactgggcacaactgtaattctctagcccaggaccgagaagttgggactcaccaacccaactttctcttgaaatttcggtgaaacaaatttaaggtataggtcatttgacttaatacccaaaacctggcccctgggtttttagagggcaaagtttggtagtttggcagggagggccgctactactcctgcttcaccctcccaccttgctaagactaatattttccggactaccgtacgtcgacgcggcctactcgacggatcgatccgaacaaacgacccaacacccgtgcgttttattctgtctttttattgccgatcccctcagaagaactcgtcaagaaggcgatagaaggcgatgcgctgcgaatcgggagcggcgataccgtaaagcacgaggaagcggtcagcccattcgccgccaagctcttcagcaatatcacgggtagccaacgctatgtcctgatagcggtcggccgctttacttgtacagctcgtccatgccgagagtgatcccggcggcggtcacgaactccagcaggaccatgtgatcgcgcttctcgttggggtctttgctcagggcggactgggtgctcaggtagtggttgtcgggcagcagcacggggccgtcgccgatgggggtgttctgctggtagtggtcggccagctgcacgctgccgtcctcgatgttgtggcggatcttgaagttcaccttgatgccgttcttctgcttgtcggccatgatatagacgttgtggctgttgtagttgtactccagcttgtgccccaggatgttgccgtcctccttgaagtcgatgcccttcagctcgatgcggttcaccagggtgtcgccctcgaacttcacctcggcgcgggtcttgtagttgccgtcgtccttgaagaagatggtgcgctcctggacgtagccttcgggcatggcggacttgaagaagtcgtgctgcttcatgtggtcggggtagcggctgaagcactgcacgccgtaggtcagggtggtcacgagggtgggccagggcacgggcagcttgccggtggtgcagatgaacttcagggtcagcttgccgtaggtggcatcgccctcgccctcgccggacacgctgaacttgtggccgtttacgtcgccgtccagctcgaccaggatgggcaccaccccggtgaacagctcctcgcccttgctcaccatggtggcgaattcgaagcttgagctcgagatctgagtccggtagcgctagcggatctgacggttcactaaaccagctctgcttatatagacctcccaccgtacacgcctaccgcccatttgcgtcaatggggcggagttgttacgacattttggaaagtcccgttgattttggtgccaaaacaaactcccattgacgtcaatggggtggagacttggaaatccccgtgagtcaaaccgctatccacgcccattgatgtactgccaaaaccgcatcaccatggtaatagcgatgactaatacgtagatgtactgccaagtaggaaagtcccataaggtcatgtactgggcataatgccaggcgggccatttaccgtcattgacgtcaatagggggcgtacttggcatatgatacacttgatgtactgccaagtgggcagtttaccgtaaatactccacccattgacgtcaatggaaagtccctattggcgttactatgggaacatacgtcattattgacgtcaatgggcgggggtcgttgggcggtcagccaggcgggccatttaccgtaagttatgtaacgcggaactccatatatgggctatgaactaatgaccccgtaattgattactattaaattcctgcaggaattcgaagcttgattgttgtttatttttgtacatattgttgttttatttatttccactgtacattcgattcaataaacttcgacgggtgctggggcgcggggcagccacaggccagatatcacaagccagaaggacgtggacagtaagtagggacgggacttattatttcataacgcgtcaattaccatctgatttggaccaatttaccgaatttgtccaaggtggacgggccacctttacttaacccggaaaaggagcatatatatttatatatatgtgttcgaaaaatagccaaatgcctcgtcatcccggtagcgctagcaccggtaaaaaaaaaaaaaaaaaaaaaaaaaaaaaaaacgttgactaaaaaaaaaaaaaaaaaaaaaaaaaaaaaaaaaaaaaaaaaaaaaaaaaaaaaaaaaaaaaaaaaaaaaa

SEQ ID NO: 583 - protein, 9 aa, synthetic construct
PAAKRVKLD

SEQ ID NO: 584 - protein, 77 aa, synthetic construct
WKPGDECFALYWEDNKFYRAEVEALHSSGMTAVVKFIDYGNYEEVLLSNIKPIQTEAWEESGSETPGTSESATPEGS

SEQ ID NO: 585 - protein, 405 aa, synthetic construct
SASQDSRSRDNGPDGMEPEGVIESNWNEIVDSFDDMNLSESLLRGIYAYGFEKPSAIQQRAILPCIKGYDVIAQAQSGTGKTATFAISILQQIELDLKATQALVLAPTRELAQQIQKVVMALGDYMGASCHACIGGTNVRAEVQKLQMEAPHIIVGTPGRVFDMLNRRYLSPKYIKMFVLDEADEMLSRGFKDQIYDIFQKLNSNTQVVLLSATMPSDVLEVTKKFMRDPIRILVKKEELTLEGIRQFYINVEREEWKLDTLCDLYETLTITQAVIFINTRRKVDWLTEKMHARDFTVSAMHGDMDQKERDVIMREFRSGSSRVLITTDLLARGIDVQQVSLVINYDLPTNRENYIHRIGRGGRFGRKGVAINMVTEEDKRTLRDIETFYNTSIEEMPLNVADLI

SEQ ID NO: 586 - skipped

SEQ ID NO: 587 - protein, 289 aa, synthetic construct
DRKTRLSEPPTLALRLKPYKTAIQQLRSVIRALKENTTVTFLPTPSLILQTVRSHCVSKITFNSSCLYITDKSFQPKTINNSTPLLGNFMYLTSSKDLTKFYVQDISDLSAKISMCAPDFNMEFSSACVHGQDIVRESENSAVHVDLDFGVVADLLKWIGPHTRVKRNVKKAPCPTGTVQILVHAGPPAIKFILTNGSELEFTANNRVSFHGVKNMRINVQLKNFYQTLLNCAVTKLPCTLRIVTEHDTLLYVASRNGLFAVENFLTEEPFQRGDPFDKNYVGNSGKSR

SEQ ID NO: 588 - protein, 72 aa, synthetic construct
SNKSKNQKPKPQRGPRGRVRGQSRSGPVVFPSGAVLVGGRYIPPPKKAIRGPRRGLVQAPKSSERTSPRKRR

SEQ ID NO: 589 - DNA, 2277 bp, synthetic construct
  source 1..2277: mol_type = other DNA
gagtaactatgactctcttaagtctagttacaactgggcatcgctgcagagatcgcacctcctcgtggtcccgctggtagcccttcgaagggtgactaagtcgatctctgccccaggtacggagccgttgggactcaccagtccaacgtaatactcgacggatcgatccgaacaaacgacccaacacccgtgcgttttattctgtctttttattgccgatcccctcagaagaactcgtcaagaaggcgatagaaggcgatgcgctgcgaatcgggagcggcgataccgtaaagcacgaggaagcggtcagcccattcgccgccaagctcttcagcaatatcacgggtagccaacgctatgtcctgatagcggtcggccgctttacttgtacagctcgtccatgccgagagtgatcccggcggcggtcacgaactccagcaggaccatgtgatcgcgcttctcgttggggtctttgctcagggcggactgggtgctcaggtagtggttgtcgggcagcagcacggggccgtcgccgatgggggtgttctgctggtagtggtcggccagctgcacgctgccgtcctcgatgttgtggcggatcttgaagttcaccttgatgccgttcttctgcttgtcggccatgatatagacgttgtggctgttgtagttgtactccagcttgtgccccaggatgttgccgtcctccttgaagtcgatgcccttcagctcgatgcggttcaccagggtgtcgccctcgaacttcacctcggcgcgggtcttgtagttgccgtcgtccttgaagaagatggtgcgctcctggacgtagccttcgggcatggcggacttgaagaagtcgtgctgcttcatgtggtcggggtagcggctgaagcactgcacgccgtaggtcagggtggtcacgagggtgggccagggcacgggcagcttgccggtggtgcagatgaacttcagggtcagcttgccgtaggtggcatcgccctcgccctcgccggacacgctgaacttgtggccgtttacgtcgccgtccagctcgaccaggatgggcaccaccccggtgaacagctcctcgcccttgctcaccatggtggcgaattcgaagcttgagctcgagatctgagtccggtagcgctagcggatctgacggttcactaaaccagctctgcttatatagacctcccaccgtacacgcctaccgcccatttgcgtcaatggggcggagttgttacgacattttggaaagtcccgttgattttggtgccaaaacaaactcccattgacgtcaatggggtggagacttggaaatccccgtgagtcaaaccgctatccacgcccattgatgtactgccaaaaccgcatcaccatggtaatagcgatgactaatacgtagatgtactgccaagtaggaaagtcccataaggtcatgtactgggcataatgccaggcgggccatttaccgtcattgacgtcaatagggggcgtacttggcatatgatacacttgatgtactgccaagtgggcagtttaccgtaaatactccacccattgacgtcaatggaaagtccctattggcgttactatgggaacatacgtcattattgacgtcaatgggcgggggtcgttgggcggtcagccaggcgggccatttaccgtaagttatgtaacgcggaactccatatatgggctatgaactaatgaccccgtaattgattactattaaattcctgcagttattgctactgttctgtttatatatatcgtttttgctgtattactatttgttgttattattgtacttattgttctgtcttatattgtttcttgctatattatatattgctcttgtcgcatggttacttattgccttgctgtattactattcaattctttaataaaactacccctggtactcctgctctgttaccttggcactggaaaggtcgggacagtaagttggaactcgtattcatgacgtgtcacatcaacctaaatttggacaaaatactaattggacttgtcaaaattttctaccgaattggaccattttaccggattggacacaggtggacgggccacctttacttaactcggaaaagaaacatatataatttttatgtgtttgttaaatagccaaatgcctcgtcatcaccggtaaaaaaaaaaaaaaaaaaaaaaaaaaaaaaacgttgactaaaaaaaaaaaaaaaaaaaaaaaaaaaaaaaaaaaaaaaaaaaaaaaaaaaaaaaaaaaaaaaaaaaaaa

SEQ ID NO: 590 - DNA, 2129 bp, synthetic construct
  source 1..2129: mol_type = other DNA
gagtaactatgactctcttaagtctagttacaactgggcatcgctgcagagatcgcacctcctcgtggtcccgctggtagcccttcgaagggtgactaagtcgatctctgccccaggtacggagccgttgggactcaccagtccaacgtaatactcgacggatcgatccgaacaaacgacccaacacccgtgcgttttattctgtctttttattgccgatcccctcagaagaactcgtcaagaaggcgatagaaggcgatgcgctgcgaatcgggagcggcgataccgtaaagcacgaggaagcggtcagcccattcgccgccaagctcttcagcaatatcacgggtagccaacgctatgtcctgatagcggtcggccgctttacttgtacagctcgtccatgccgagagtgatcccggcggcggtcacgaactccagcaggaccatgtgatcgcgcttctcgttggggtctttgctcagggcggactgggtgctcaggtagtggttgtcgggcagcagcacggggccgtcgccgatgggggtgttctgctggtagtggtcggccagctgcacgctgccgtcctcgatgttgtggcggatcttgaagttcaccttgatgccgttcttctgcttgtcggccatgatatagacgttgtggctgttgtagttgtactccagcttgtgccccaggatgttgccgtcctccttgaagtcgatgcccttcagctcgatgcggttcaccagggtgtcgccctcgaacttcacctcggcgcgggtcttgtagttgccgtcgtccttgaagaagatggtgcgctcctggacgtagccttcgggcatggcggacttgaagaagtcgtgctgcttcatgtggtcggggtagcggctgaagcactgcacgccgtaggtcagggtggtcacgagggtgggccagggcacgggcagcttgccggtggtgcagatgaacttcagggtcagcttgccgtaggtggcatcgccctcgccctcgccggacacgctgaacttgtggccgtttacgtcgccgtccagctcgaccaggatgggcaccaccccggtgaacagctcctcgcccttgctcaccatggtggcgaattcgaagcttgagctcgagatctgagtccggtagcgctagcggatctgacggttcactaaaccagctctgcttatatagacctcccaccgtacacgcctaccgcccatttgcgtcaatggggcggagttgttacgacattttggaaagtcccgttgattttggtgccaaaacaaactcccattgacgtcaatggggtggagacttggaaatccccgtgagtcaaaccgctatccacgcccattgatgtactgccaaaaccgcatcaccatggtaatagcgatgactaatacgtagatgtactgccaagtaggaaagtcccataaggtcatgtactgggcataatgccaggcgggccatttaccgtcattgacgtcaatagggggcgtacttggcatatgatacacttgatgtactgccaagtgggcagtttaccgtaaatactccacccattgacgtcaatggaaagtccctattggcgttactatgggaacatacgtcattattgacgtcaatgggcgggggtcgttgggcggtcagccaggcgggccatttaccgtaagttatgtaacgcggaactccatatatgggctatgaactaatgaccccgtaattgattactattaaattcctgcagacattttcattatattactttgaatttgtttagttgtagagtagtagatgtaataagtagatgtattagtggttgtatatgtagtattgtagtattgtagattgtaatgtagtatgtaaaaaaatctggactgggatctcgtgatgattacctttaatcatgacgctcactggataggacttggtaggtggacgggccaccttcataaaacccggaaaaagttcacataccttgttatgtgttcgtaaatagccaaatgcctcgtcatcaccggtaaaaaaaaaaaaaaaaaaaaaaaaaaaaaaacgttgactaaaaaaaaaaaaaaaaaaaaaaaaaaaaaaaaaaaaaaaaaaaaaaaaaaaaaaaaaaaaaaaaaaaaaa

SEQ ID NO: 591 - DNA, 2205 bp, synthetic construct
  source 1..2205: mol_type = other DNA
gagtaactatgactctcttaagtctagttacaactgggcatcgctgcagagatcgcacctcctcgtggtcccgctggtagcccttcgaagggtgactaagtcgatctctgccccaggtacggagccgttgggactcaccagtccaacgtaatactcgacggatcgatccgaacaaacgacccaacacccgtgcgttttattctgtctttttattgccgatcccctcagaagaactcgtcaagaaggcgatagaaggcgatgcgctgcgaatcgggagcggcgataccgtaaagcacgaggaagcggtcagcccattcgccgccaagctcttcagcaatatcacgggtagccaacgctatgtcctgatagcggtcggccgctttacttgtacagctcgtccatgccgagagtgatcccggcggcggtcacgaactccagcaggaccatgtgatcgcgcttctcgttggggtctttgctcagggcggactgggtgctcaggtagtggttgtcgggcagcagcacggggccgtcgccgatgggggtgttctgctggtagtggtcggccagctgcacgctgccgtcctcgatgttgtggcggatcttgaagttcaccttgatgccgttcttctgcttgtcggccatgatatagacgttgtggctgttgtagttgtactccagcttgtgccccaggatgttgccgtcctccttgaagtcgatgcccttcagctcgatgcggttcaccagggtgtcgccctcgaacttcacctcggcgcgggtcttgtagttgccgtcgtccttgaagaagatggtgcgctcctggacgtagccttcgggcatggcggacttgaagaagtcgtgctgcttcatgtggtcggggtagcggctgaagcactgcacgccgtaggtcagggtggtcacgagggtgggccagggcacgggcagcttgccggtggtgcagatgaacttcagggtcagcttgccgtaggtggcatcgccctcgccctcgccggacacgctgaacttgtggccgtttacgtcgccgtccagctcgaccaggatgggcaccaccccggtgaacagctcctcgcccttgctcaccatggtggcgaattcgaagcttgagctcgagatctgagtccggtagcgctagcggatctgacggttcactaaaccagctctgcttatatagacctcccaccgtacacgcctaccgcccatttgcgtcaatggggcggagttgttacgacattttggaaagtcccgttgattttggtgccaaaacaaactcccattgacgtcaatggggtggagacttggaaatccccgtgagtcaaaccgctatccacgcccattgatgtactgccaaaaccgcatcaccatggtaatagcgatgactaatacgtagatgtactgccaagtaggaaagtcccataaggtcatgtactgggcataatgccaggcgggccatttaccgtcattgacgtcaatagggggcgtacttggcatatgatacacttgatgtactgccaagtgggcagtttaccgtaaatactccacccattgacgtcaatggaaagtccctattggcgttactatgggaacatacgtcattattgacgtcaatgggcgggggtcgttgggcggtcagccaggcgggccatttaccgtaagttatgtaacgcggaactccatatatgggctatgaactaatgaccccgtaattgattactattaaattcctgcagtcagttttttatttttgttctatattattgttttttgtaattgtttgtagaatttttcctctgtacattctttttgtatttttgtattttgttgcaatgttcaataaagtttaagacgggagctagggacgcagggcagccacaggccagatgtagcaagccagtaaggtcgctgatagtaagtagggacaggacttattatttcataacgcgtcaattaccacccgatttggaccaatttaccggatttgtccaaggtggacgggccacctttacttaacccggaaaaggaacatatattatttatatatatgtgttcgaaaaatagccaaatgcctcgtcatcaccggtaaaaaaaaaaaaaaaaaaaaaaaaaaaaaaacgttgactaaaaaaaaaaaaaaaaaaaaaaaaaaaaaaaaaaaaaaaaaaaaaaaaaaaaaaaaaaaaaaaaaaaaaa

SEQ ID NO: 592 - DNA, 2374 bp, synthetic construct
  source 1..2374: mol_type = other DNA
gagtaactatgactctcttaagacgggatcatagttactaactgggcagagctgcagaggttacacctcctcgtggtcccgctggatgcccttcggggtaaccaagttaacctctgccccagtgtgggaattatagctacttcccccctatcgtctggcctcaccaaccattcgatagattcggtctggtgatccaaattcctggcaacgattttcggtcgctgcccaaagccttgcctacgggcacagttgggctcagtcatacagcacttgagggggtgttgtttgacttatactactcctctatctggactggcaaatactcgacggatcgatccgaacaaacgacccaacacccgtgcgttttattctgtctttttattgccgatcccctcagaagaactcgtcaagaaggcgatagaaggcgatgcgctgcgaatcgggagcggcgataccgtaaagcacgaggaagcggtcagcccattcgccgccaagctcttcagcaatatcacgggtagccaacgctatgtcctgatagcggtcggccgctttacttgtacagctcgtccatgccgagagtgatcccggcggcggtcacgaactccagcaggaccatgtgatcgcgcttctcgttggggtctttgctcagggcggactgggtgctcaggtagtggttgtcgggcagcagcacggggccgtcgccgatgggggtgttctgctggtagtggtcggccagctgcacgctgccgtcctcgatgttgtggcggatcttgaagttcaccttgatgccgttcttctgcttgtcggccatgatatagacgttgtggctgttgtagttgtactccagcttgtgccccaggatgttgccgtcctccttgaagtcgatgcccttcagctcgatgcggttcaccagggtgtcgccctcgaacttcacctcggcgcgggtcttgtagttgccgtcgtccttgaagaagatggtgcgctcctggacgtagccttcgggcatggcggacttgaagaagtcgtgctgcttcatgtggtcggggtagcggctgaagcactgcacgccgtaggtcagggtggtcacgagggtgggccagggcacgggcagcttgccggtggtgcagatgaacttcagggtcagcttgccgtaggtggcatcgccctcgccctcgccggacacgctgaacttgtggccgtttacgtcgccgtccagctcgaccaggatgggcaccaccccggtgaacagctcctcgcccttgctcaccatggtggcgaattcgaagcttgagctcgagatctgagtccggtagcgctagcggatctgacggttcactaaaccagctctgcttatatagacctcccaccgtacacgcctaccgcccatttgcgtcaatggggcggagttgttacgacattttggaaagtcccgttgattttggtgccaaaacaaactcccattgacgtcaatggggtggagacttggaaatccccgtgagtcaaaccgctatccacgcccattgatgtactgccaaaaccgcatcaccatggtaatagcgatgactaatacgtagatgtactgccaagtaggaaagtcccataaggtcatgtactgggcataatgccaggcgggccatttaccgtcattgacgtcaatagggggcgtacttggcatatgatacacttgatgtactgccaagtgggcagtttaccgtaaatactccacccattgacgtcaatggaaagtccctattggcgttactatgggaacatacgtcattattgacgtcaatgggcgggggtcgttgggcggtcagccaggcgggccatttaccgtaagttatgtaacgcggaactccatatatgggctatgaactaatgaccccgtaattgattactattaaattcctgcagttcaggttatttagatgcttagtttttgtacctttcttgttttgtttaggattttgatagtgttagtatttttatatttttgtacgattgcataatgttcttttttatacagttctgttttaataaaatagacgatagctagagacgttagggcagccacaagccagttaggtagcggatagtaggtaggaacagacttttactatttcataacgcgtcaattaccacctgatttggaccaattcacgggatttgtccaaggtggacgggccacctttacttaacccggaaaaggaacatatataatttatgtgtgttcgataaatagccaaatgcctcgtcatcaccggtaaaaaaaaaaaaaaaaaaaaaaaaaaaaaaacgttgactaaaaaaaaaaaaaaaaaaaaaaaaaaaaaaaaaaaaaaaaaaaaaaaaaaaaaaaaaaaaaaaaaaaaaa

SEQ ID NO: 593 - skipped

SEQ ID NO: 594 - DNA, 2395 bp, synthetic construct
  source 1..2395: mol_type = other DNA
gagtaactatgactctcttaaccaaagccagctttggtaggagtacggttacaaactgggcacagctgtagagatcgcacctcctcgtggtcccgctggtaaccctgccaagggtgacaaagtcaatctctagcccaggacagagacgttgggactcaccaacccaacgatctcttgccaaaattcggtgaaacaaatttctcggtataagccatttggcttaatacccaaaacctggcccctgggtttcaaagggggccaaagtctggtggattggcagggggggccgctaccactcccgcaacacccccccaccttgcaaaaaccaatattttccggactactcgacggatcgatccgaacaaacgacccaacacccgtgcgttttattctgtctttttattgccgatcccctcagaagaactcgtcaagaaggcgatagaaggcgatgcgctgcgaatcgggagcggcgataccgtaaagcacgaggaagcggtcagcccattcgccgccaagctcttcagcaatatcacgggtagccaacgctatgtcctgatagcggtcggccgctttacttgtacagctcgtccatgccgagagtgatcccggcggcggtcacgaactccagcaggaccatgtgatcgcgcttctcgttggggtctttgctcagggcggactgggtgctcaggtagtggttgtcgggcagcagcacggggccgtcgccgatgggggtgttctgctggtagtggtcggccagctgcacgctgccgtcctcgatgttgtggcggatcttgaagttcaccttgatgccgttcttctgcttgtcggccatgatatagacgttgtggctgttgtagttgtactccagcttgtgccccaggatgttgccgtcctccttgaagtcgatgcccttcagctcgatgcggttcaccagggtgtcgccctcgaacttcacctcggcgcgggtcttgtagttgccgtcgtccttgaagaagatggtgcgctcctggacgtagccttcgggcatggcggacttgaagaagtcgtgctgcttcatgtggtcggggtagcggctgaagcactgcacgccgtaggtcagggtggtcacgagggtgggccagggcacgggcagcttgccggtggtgcagatgaacttcagggtcagcttgccgtaggtggcatcgccctcgccctcgccggacacgctgaacttgtggccgtttacgtcgccgtccagctcgaccaggatgggcaccaccccggtgaacagctcctcgcccttgctcaccatggtggcgaattcgaagcttgagctcgagatctgagtccggtagcgctagcggatctgacggttcactaaaccagctctgcttatatagacctcccaccgtacacgcctaccgcccatttgcgtcaatggggcggagttgttacgacattttggaaagtcccgttgattttggtgccaaaacaaactcccattgacgtcaatggggtggagacttggaaatccccgtgagtcaaaccgctatccacgcccattgatgtactgccaaaaccgcatcaccatggtaatagcgatgactaatacgtagatgtactgccaagtaggaaagtcccataaggtcatgtactgggcataatgccaggcgggccatttaccgtcattgacgtcaatagggggcgtacttggcatatgatacacttgatgtactgccaagtgggcagtttaccgtaaatactccacccattgacgtcaatggaaagtccctattggcgttactatgggaacatacgtcattattgacgtcaatgggcgggggtcgttgggcggtcagccaggcgggccatttaccgtaagttatgtaacgcggaactccatatatgggctatgaactaatgaccccgtaattgattactattaaattcctgcagttcaggttatttagatgcttagtttttgtacctttcttgttttgtttaggattttgatagtgttagtatttttatatttttgtacgattgcataatgttcttttttatacagttctgttttaataaaatagacgatagctagagacgttagggcagccacaagccagttaggtagcggatagtaggtaggaacagacttttactatttcataacgcgtcaattaccacctgatttggaccaattcacgggatttgtccaaggtggacgggccacctttacttaacccggaaaaggaacatatataatttatgtgtgttcgataaatagccaaatgcctcgtcatcaccggtaaaaaaaaaaaaaaaaaaaaaaaaaaaaaaacgttgactaaaaaaaaaaaaaaaaaaaaaaaaaaaaaaaaaaaaaaaaaaaaaaaaaaaaaaaaaaaaaaaaaaaaaa

SEQ ID NO: 595 - DNA, 2263 bp, synthetic construct
  source 1..2263: mol_type = other DNA
gagtaactatgactctcttaaggcggcttttgagagtatagttacaaactgggcatcgctgcagagatcgcacctcctcgtggtcccgctggtagccctgcgtagggtgactaagtcgatcttctgccccaggtacggagccgttgggactcaccagtccaacgaattcctaccaaattcggtgaaacaaattcctcggtaaaagccgctactcgacggatcgatccgaacaaacgacccaacacccgtgcgttttattctgtctttttattgccgatcccctcagaagaactcgtcaagaaggcgatagaaggcgatgcgctgcgaatcgggagcggcgataccgtaaagcacgaggaagcggtcagcccattcgccgccaagctcttcagcaatatcacgggtagccaacgctatgtcctgatagcggtcggccgctttacttgtacagctcgtccatgccgagagtgatcccggcggcggtcacgaactccagcaggaccatgtgatcgcgcttctcgttggggtctttgctcagggcggactgggtgctcaggtagtggttgtcgggcagcagcacggggccgtcgccgatgggggtgttctgctggtagtggtcggccagctgcacgctgccgtcctcgatgttgtggcggatcttgaagttcaccttgatgccgttcttctgcttgtcggccatgatatagacgttgtggctgttgtagttgtactccagcttgtgccccaggatgttgccgtcctccttgaagtcgatgcccttcagctcgatgcggttcaccagggtgtcgccctcgaacttcacctcggcgcgggtcttgtagttgccgtcgtccttgaagaagatggtgcgctcctggacgtagccttcgggcatggcggacttgaagaagtcgtgctgcttcatgtggtcggggtagcggctgaagcactgcacgccgtaggtcagggtggtcacgagggtgggccagggcacgggcagcttgccggtggtgcagatgaacttcagggtcagcttgccgtaggtggcatcgccctcgccctcgccggacacgctgaacttgtggccgtttacgtcgccgtccagctcgaccaggatgggcaccaccccggtgaacagctcctcgcccttgctcaccatggtggcgaattcgaagcttgagctcgagatctgagtccggtagcgctagcggatctgacggttcactaaaccagctctgcttatatagacctcccaccgtacacgcctaccgcccatttgcgtcaatggggcggagttgttacgacattttggaaagtcccgttgattttggtgccaaaacaaactcccattgacgtcaatggggtggagacttggaaatccccgtgagtcaaaccgctatccacgcccattgatgtactgccaaaaccgcatcaccatggtaatagcgatgactaatacgtagatgtactgccaagtaggaaagtcccataaggtcatgtactgggcataatgccaggcgggccatttaccgtcattgacgtcaatagggggcgtacttggcatatgatacacttgatgtactgccaagtgggcagtttaccgtaaatactccacccattgacgtcaatggaaagtccctattggcgttactatgggaacatacgtcattattgacgtcaatgggcgggggtcgttgggcggtcagccaggcgggccatttaccgtaagttatgtaacgcggaactccatatatgggctatgaactaatgaccccgtaattgattactattaaattcctgcagttcaggttatttagatgcttagtttttgtacctttcttgttttgtttaggattttgatagtgttagtatttttatatttttgtacgattgcataatgttcttttttatacagttctgttttaataaaatagacgatagctagagacgttagggcagccacaagccagttaggtagcggatagtaggtaggaacagacttttactatttcataacgcgtcaattaccacctgatttggaccaattcacgggatttgtccaaggtggacgggccacctttacttaacccggaaaaggaacatatataatttatgtgtgttcgataaatagccaaatgcctcgtcatcaccggtaaaaaaaaaaaaaaaaaaaaaaaaaaaaaaacgttgactaaaaaaaaaaaaaaaaaaaaaaaaaaaaaaaaaaaaaaaaaaaaaaaaaaaaaaaaaaaaaaaaaaaaaa

SEQ ID NO: 596 - DNA, 2325 bp, synthetic construct
  source 1..2325: mol_type = other DNA
gagtaactatgactctcttaaggcgacttgagaaggtctagttacaactgggcatagctgcagagatcgcgcctcctcgtggccccgctggtaagcccttaacagggtgactaagtcgatctctgccccagtccaggagccgctgggattcaccagcccagcgattccttccaaattcaggtgaaacaaatttctcggtgtaagtcgcaagacttattacctgaaacctggccccccggtttcagacaggggcaaagagttcggaagtggatactcgacggatcgatccgaacaaacgacccaacacccgtgcgttttattctgtctttttattgccgatcccctcagaagaactcgtcaagaaggcgatagaaggcgatgcgctgcgaatcgggagcggcgataccgtaaagcacgaggaagcggtcagcccattcgccgccaagctcttcagcaatatcacgggtagccaacgctatgtcctgatagcggtcggccgctttacttgtacagctcgtccatgccgagagtgatcccggcggcggtcacgaactccagcaggaccatgtgatcgcgcttctcgttggggtctttgctcagggcggactgggtgctcaggtagtggttgtcgggcagcagcacggggccgtcgccgatgggggtgttctgctggtagtggtcggccagctgcacgctgccgtcctcgatgttgtggcggatcttgaagttcaccttgatgccgttcttctgcttgtcggccatgatatagacgttgtggctgttgtagttgtactccagcttgtgccccaggatgttgccgtcctccttgaagtcgatgcccttcagctcgatgcggttcaccagggtgtcgccctcgaacttcacctcggcgcgggtcttgtagttgccgtcgtccttgaagaagatggtgcgctcctggacgtagccttcgggcatggcggacttgaagaagtcgtgctgcttcatgtggtcggggtagcggctgaagcactgcacgccgtaggtcagggtggtcacgagggtgggccagggcacgggcagcttgccggtggtgcagatgaacttcagggtcagcttgccgtaggtggcatcgccctcgccctcgccggacacgctgaacttgtggccgtttacgtcgccgtccagctcgaccaggatgggcaccaccccggtgaacagctcctcgcccttgctcaccatggtggcgaattcgaagcttgagctcgagatctgagtccggtagcgctagcggatctgacggttcactaaaccagctctgcttatatagacctcccaccgtacacgcctaccgcccatttgcgtcaatggggcggagttgttacgacattttggaaagtcccgttgattttggtgccaaaacaaactcccattgacgtcaatggggtggagacttggaaatccccgtgagtcaaaccgctatccacgcccattgatgtactgccaaaaccgcatcaccatggtaatagcgatgactaatacgtagatgtactgccaagtaggaaagtcccataaggtcatgtactgggcataatgccaggcgggccatttaccgtcattgacgtcaatagggggcgtacttggcatatgatacacttgatgtactgccaagtgggcagtttaccgtaaatactccacccattgacgtcaatggaaagtccctattggcgttactatgggaacatacgtcattattgacgtcaatgggcgggggtcgttgggcggtcagccaggcgggccatttaccgtaagttatgtaacgcggaactccatatatgggctatgaactaatgaccccgtaattgattactattaaattcctgcagttcaggttatttagatgcttagtttttgtacctttcttgttttgtttaggattttgatagtgttagtatttttatatttttgtacgattgcataatgttcttttttatacagttctgttttaataaaatagacgatagctagagacgttagggcagccacaagccagttaggtagcggatagtaggtaggaacagacttttactatttcataacgcgtcaattaccacctgatttggaccaattcacgggatttgtccaaggtggacgggccacctttacttaacccggaaaaggaacatatataatttatgtgtgttcgataaatagccaaatgcctcgtcatcaccggtaaaaaaaaaaaaaaaaaaaaaaaaaaaaaaacgttgactaaaaaaaaaaaaaaaaaaaaaaaaaaaaaaaaaaaaaaaaaaaaaaaaaaaaaaaaaaaaaaaaaaaaaa

SEQ ID NO: 597 - DNA, 2399 bp, synthetic construct
  source 1..2399: mol_type = other DNA
gagtaactatgactctcttaaccaaaggcggctttggtaagagtatggttacaaactgggcacagctgcagagatcgcacctcctcgtggtcccgctggtaaccctgcgtagggtaactaagtcgatcttctagcccaggtacggagacgttgggactcaccagcccaacgatctcttgctaaaattcggtgaaacaaattccaaggtataagccatttggcttaatacccaaaacctggccccagggtttcaaagggggggcaaaagtttggtagattggcaaggggggccactaccactcccgcaacacccccccaccttgcaaagaccaatattttccggactactcgacggatcgatccgaacaaacgacccaacacccgtgcgttttattctgtctttttattgccgatcccctcagaagaactcgtcaagaaggcgatagaaggcgatgcgctgcgaatcgggagcggcgataccgtaaagcacgaggaagcggtcagcccattcgccgccaagctcttcagcaatatcacgggtagccaacgctatgtcctgatagcggtcggccgctttacttgtacagctcgtccatgccgagagtgatcccggcggcggtcacgaactccagcaggaccatgtgatcgcgcttctcgttggggtctttgctcagggcggactgggtgctcaggtagtggttgtcgggcagcagcacggggccgtcgccgatgggggtgttctgctggtagtggtcggccagctgcacgctgccgtcctcgatgttgtggcggatcttgaagttcaccttgatgccgttcttctgcttgtcggccatgatatagacgttgtggctgttgtagttgtactccagcttgtgccccaggatgttgccgtcctccttgaagtcgatgcccttcagctcgatgcggttcaccagggtgtcgccctcgaacttcacctcggcgcgggtcttgtagttgccgtcgtccttgaagaagatggtgcgctcctggacgtagccttcgggcatggcggacttgaagaagtcgtgctgcttcatgtggtcggggtagcggctgaagcactgcacgccgtaggtcagggtggtcacgagggtgggccagggcacgggcagcttgccggtggtgcagatgaacttcagggtcagcttgccgtaggtggcatcgccctcgccctcgccggacacgctgaacttgtggccgtttacgtcgccgtccagctcgaccaggatgggcaccaccccggtgaacagctcctcgcccttgctcaccatggtggcgaattcgaagcttgagctcgagatctgagtccggtagcgctagcggatctgacggttcactaaaccagctctgcttatatagacctcccaccgtacacgcctaccgcccatttgcgtcaatggggcggagttgttacgacattttggaaagtcccgttgattttggtgccaaaacaaactcccattgacgtcaatggggtggagacttggaaatccccgtgagtcaaaccgctatccacgcccattgatgtactgccaaaaccgcatcaccatggtaatagcgatgactaatacgtagatgtactgccaagtaggaaagtcccataaggtcatgtactgggcataatgccaggcgggccatttaccgtcattgacgtcaatagggggcgtacttggcatatgatacacttgatgtactgccaagtgggcagtttaccgtaaatactccacccattgacgtcaatggaaagtccctattggcgttactatgggaacatacgtcattattgacgtcaatgggcgggggtcgttgggcggtcagccaggcgggccatttaccgtaagttatgtaacgcggaactccatatatgggctatgaactaatgaccccgtaattgattactattaaattcctgcagttcaggttatttagatgcttagtttttgtacctttcttgttttgtttaggattttgatagtgttagtatttttatatttttgtacgattgcataatgttcttttttatacagttctgttttaataaaatagacgatagctagagacgttagggcagccacaagccagttaggtagcggatagtaggtaggaacagacttttactatttcataacgcgtcaattaccacctgatttggaccaattcacgggatttgtccaaggtggacgggccacctttacttaacccggaaaaggaacatatataatttatgtgtgttcgataaatagccaaatgcctcgtcatcaccggtaaaaaaaaaaaaaaaaaaaaaaaaaaaaaaacgttgactaaaaaaaaaaaaaaaaaaaaaaaaaaaaaaaaaaaaaaaaaaaaaaaaaaaaaaaaaaaaaaaaaaaaaa

SEQ ID NO: 598 - DNA, 2641 bp, synthetic construct
  source 1..2641: mol_type = other DNA
gagtaactatgactctcttaatgccggattggcgggaacagccgatcctagtaaggctggatgaattcatgcgggctgaagcagcggttctcccataaaataggggctttggggaaggtgggggacgtcgggggggcccctggagggacccctgtaccgataggggatccttgttttttcccctctacctggggcttttgtggggaggcgagggcacgtggtgagtgggggatggctgactggggaaagttaccaaggtatccccaaaggcggctttggtaagagtatggttacaaactgggcacagctgcagagatcgcacctcctcgtggtcccgctggtaaccctgcgtagggtaactaagtcgatcttctagcccaggtacggagacgttgggactcaccagcccaacgatctcttgctaaaattcggtgaaacaaattccaaggtataagccatttggcttaatacccaaaacctggccccagggtttcaaagggggggcaaaagtttggtagattggcaaggggggccactaccactcccgcttcacccccccaccttgctaagaccaatattttccggactactcgacggatcgatccgaacaaacgacccaacacccgtgcgttttattctgtctttttattgccgatcccctcagaagaactcgtcaagaaggcgatagaaggcgatgcgctgcgaatcgggagcggcgataccgtaaagcacgaggaagcggtcagcccattcgccgccaagctcttcagcaatatcacgggtagccaacgctatgtcctgatagcggtcggccgctttacttgtacagctcgtccatgccgagagtgatcccggcggcggtcacgaactccagcaggaccatgtgatcgcgcttctcgttggggtctttgctcagggcggactgggtgctcaggtagtggttgtcgggcagcagcacggggccgtcgccgatgggggtgttctgctggtagtggtcggccagctgcacgctgccgtcctcgatgttgtggcggatcttgaagttcaccttgatgccgttcttctgcttgtcggccatgatatagacgttgtggctgttgtagttgtactccagcttgtgccccaggatgttgccgtcctccttgaagtcgatgcccttcagctcgatgcggttcaccagggtgtcgccctcgaacttcacctcggcgcgggtcttgtagttgccgtcgtccttgaagaagatggtgcgctcctggacgtagccttcgggcatggcggacttgaagaagtcgtgctgcttcatgtggtcggggtagcggctgaagcactgcacgccgtaggtcagggtggtcacgagggtgggccagggcacgggcagcttgccggtggtgcagatgaacttcagggtcagcttgccgtaggtggcatcgccctcgccctcgccggacacgctgaacttgtggccgtttacgtcgccgtccagctcgaccaggatgggcaccaccccggtgaacagctcctcgcccttgctcaccatggtggcgaattcgaagcttgagctcgagatctgagtccggtagcgctagcggatctgacggttcactaaaccagctctgcttatatagacctcccaccgtacacgcctaccgcccatttgcgtcaatggggcggagttgttacgacattttggaaagtcccgttgattttggtgccaaaacaaactcccattgacgtcaatggggtggagacttggaaatccccgtgagtcaaaccgctatccacgcccattgatgtactgccaaaaccgcatcaccatggtaatagcgatgactaatacgtagatgtactgccaagtaggaaagtcccataaggtcatgtactgggcataatgccaggcgggccatttaccgtcattgacgtcaatagggggcgtacttggcatatgatacacttgatgtactgccaagtgggcagtttaccgtaaatactccacccattgacgtcaatggaaagtccctattggcgttactatgggaacatacgtcattattgacgtcaatgggcgggggtcgttgggcggtcagccaggcgggccatttaccgtaagttatgtaacgcggaactccatatatgggctatgaactaatgaccccgtaattgattactattaaattcctgcagttcaggttatttagatgcttagtttttgtacctttcttgttttgtttaggattttgatagtgttagtatttttatatttttgtacgattgcataatgttcttttttatacagttctgttttaataaaatagacgatagctagagacgttagggcagccacaagccagttaggtagcggatagtaggtaggaacagacttttactatttcataacgcgtcaattaccacctgatttggaccaattcacgggatttgtccaaggtggacgggccacctttacttaacccggaaaaggaacatatataatttatgtgtgttcgataaatagccaaatgcctcgtcatcaccggtaaaaaaaaaaaaaaaaaaaaaaaaaaaaaaacgttgactaaaaaaaaaaaaaaaaaaaaaaaaaaaaaaaaaaaaaaaaaaaaaaaaaaaaaaaaaaaaaaaaaaaaaa

SEQ ID NO: 599 - DNA, 2126 bp, synthetic construct
  source 1..2126: mol_type = other DNA
gagtaactatgactctcttaagagttgtagttacacggcctgggcgcctcctcgtggcgaccgctggagaagtactcgacggatcgatccgaacaaacgacccaacacccgtgcgttttattctgtctttttattgccgatcccctcagaagaactcgtcaagaaggcgatagaaggcgatgcgctgcgaatcgggagcggcgataccgtaaagcacgaggaagcggtcagcccattcgccgccaagctcttcagcaatatcacgggtagccaacgctatgtcctgatagcggtcggccgctttacttgtacagctcgtccatgccgagagtgatcccggcggcggtcacgaactccagcaggaccatgtgatcgcgcttctcgttggggtctttgctcagggcggactgggtgctcaggtagtggttgtcgggcagcagcacggggccgtcgccgatgggggtgttctgctggtagtggtcggccagctgcacgctgccgtcctcgatgttgtggcggatcttgaagttcaccttgatgccgttcttctgcttgtcggccatgatatagacgttgtggctgttgtagttgtactccagcttgtgccccaggatgttgccgtcctccttgaagtcgatgcccttcagctcgatgcggttcaccagggtgtcgccctcgaacttcacctcggcgcgggtcttgtagttgccgtcgtccttgaagaagatggtgcgctcctggacgtagccttcgggcatggcggacttgaagaagtcgtgctgcttcatgtggtcggggtagcggctgaagcactgcacgccgtaggtcagggtggtcacgagggtgggccagggcacgggcagcttgccggtggtgcagatgaacttcagggtcagcttgccgtaggtggcatcgccctcgccctcgccggacacgctgaacttgtggccgtttacgtcgccgtccagctcgaccaggatgggcaccaccccggtgaacagctcctcgcccttgctcaccatggtggcgaattcgaagcttgagctcgagatctgagtccggtagcgctagcggatctgacggttcactaaaccagctctgcttatatagacctcccaccgtacacgcctaccgcccatttgcgtcaatggggcggagttgttacgacattttggaaagtcccgttgattttggtgccaaaacaaactcccattgacgtcaatggggtggagacttggaaatccccgtgagtcaaaccgctatccacgcccattgatgtactgccaaaaccgcatcaccatggtaatagcgatgactaatacgtagatgtactgccaagtaggaaagtcccataaggtcatgtactgggcataatgccaggcgggccatttaccgtcattgacgtcaatagggggcgtacttggcatatgatacacttgatgtactgccaagtgggcagtttaccgtaaatactccacccattgacgtcaatggaaagtccctattggcgttactatgggaacatacgtcattattgacgtcaatgggcgggggtcgttgggcggtcagccaggcgggccatttaccgtaagttatgtaacgcggaactccatatatgggctatgaactaatgaccccgtaattgattactattaaattcctgcagttcaggttatttagatgcttagtttttgtacctttcttgttttgtttaggattttgatagtgttagtatttttatatttttgtacgattgcataatgttcttttttatacagttctgttttaataaaatagacgatagctagagacgttagggcagccacaagccagttaggtagcggatagtaggtaggaacagacttttactatttcataacgcgtcaattaccacctgatttggaccaattcacgggatttgtccaaggtggacgggccacctttacttaacccggaaaaggaacatatataatttatgtgtgttcgataaatagccaaatgcctcgtcatcaccggtaaaaaaaaaaaaaaaaaaaaaaaaaaaaaaacgttgactaaaaaaaaaaaaaaaaaaaaaaaaaaaaaaaaaaaaaaaaaaaaaaaaaaaaaaaaaaaaaaaaaaaaaa

SEQ ID NO: 600 - DNA, 2261 bp, synthetic construct
  source 1..2261: mol_type = other DNA
gagtaactatgactctcttaacttagttgctggagtagcactataattggattcaccgcctcctcgtggccccgccggtaacagaggtaatcctctggctgagtgtggatcctgctactcccaattttaaccttttaattagtgctgtgttgggtgcaggctaatctatcgtatcgatatggcagcctgtaacctatgtagcccacatactcgacggatcgatccgaacaaacgacccaacacccgtgcgttttattctgtctttttattgccgatcccctcagaagaactcgtcaagaaggcgatagaaggcgatgcgctgcgaatcgggagcggcgataccgtaaagcacgaggaagcggtcagcccattcgccgccaagctcttcagcaatatcacgggtagccaacgctatgtcctgatagcggtcggccgctttacttgtacagctcgtccatgccgagagtgatcccggcggcggtcacgaactccagcaggaccatgtgatcgcgcttctcgttggggtctttgctcagggcggactgggtgctcaggtagtggttgtcgggcagcagcacggggccgtcgccgatgggggtgttctgctggtagtggtcggccagctgcacgctgccgtcctcgatgttgtggcggatcttgaagttcaccttgatgccgttcttctgcttgtcggccatgatatagacgttgtggctgttgtagttgtactccagcttgtgccccaggatgttgccgtcctccttgaagtcgatgcccttcagctcgatgcggttcaccagggtgtcgccctcgaacttcacctcggcgcgggtcttgtagttgccgtcgtccttgaagaagatggtgcgctcctggacgtagccttcgggcatggcggacttgaagaagtcgtgctgcttcatgtggtcggggtagcggctgaagcactgcacgccgtaggtcagggtggtcacgagggtgggccagggcacgggcagcttgccggtggtgcagatgaacttcagggtcagcttgccgtaggtggcatcgccctcgccctcgccggacacgctgaacttgtggccgtttacgtcgccgtccagctcgaccaggatgggcaccaccccggtgaacagctcctcgcccttgctcaccatggtggcgaattcgaagcttgagctcgagatctgagtccggtagcgctagcggatctgacggttcactaaaccagctctgcttatatagacctcccaccgtacacgcctaccgcccatttgcgtcaatggggcggagttgttacgacattttggaaagtcccgttgattttggtgccaaaacaaactcccattgacgtcaatggggtggagacttggaaatccccgtgagtcaaaccgctatccacgcccattgatgtactgccaaaaccgcatcaccatggtaatagcgatgactaatacgtagatgtactgccaagtaggaaagtcccataaggtcatgtactgggcataatgccaggcgggccatttaccgtcattgacgtcaatagggggcgtacttggcatatgatacacttgatgtactgccaagtgggcagtttaccgtaaatactccacccattgacgtcaatggaaagtccctattggcgttactatgggaacatacgtcattattgacgtcaatgggcgggggtcgttgggcggtcagccaggcgggccatttaccgtaagttatgtaacgcggaactccatatatgggctatgaactaatgaccccgtaattgattactattaaattcctgcagttcaggttatttagatgcttagtttttgtacctttcttgttttgtttaggattttgatagtgttagtatttttatatttttgtacgattgcataatgttcttttttatacagttctgttttaataaaatagacgatagctagagacgttagggcagccacaagccagttaggtagcggatagtaggtaggaacagacttttactatttcataacgcgtcaattaccacctgatttggaccaattcacgggatttgtccaaggtggacgggccacctttacttaacccggaaaaggaacatatataatttatgtgtgttcgataaatagccaaatgcctcgtcatcaccggtaaaaaaaaaaaaaaaaaaaaaaaaaaaaaaacgttgactaaaaaaaaaaaaaaaaaaaaaaaaaaaaaaaaaaaaaaaaaaaaaaaaaaaaaaaaaaaaaaaaaaaaaa

SEQ ID NO: 601 - DNA, 2313 bp, synthetic construct
  source 1..2313: mol_type = other DNA
gagtaactatgactctcttaagttacagggccgggcgcctcctcatggcgaccgctggatagggtgggaagcattggtgattccaactactggcggagggtgtcatgtcggcacccccgcctgcgacccacctgaactaagatccaggccatcccagtcgggccaaccaccttgctgagattactgctggttacagagataaagaaaataaacaaaaaatcctggtccctctggaaaccaggatttcagcagcggtgagtactcgacggatcgatccgaacaaacgacccaacacccgtgcgttttattctgtctttttattgccgatcccctcagaagaactcgtcaagaaggcgatagaaggcgatgcgctgcgaatcgggagcggcgataccgtaaagcacgaggaagcggtcagcccattcgccgccaagctcttcagcaatatcacgggtagccaacgctatgtcctgatagcggtcggccgctttacttgtacagctcgtccatgccgagagtgatcccggcggcggtcacgaactccagcaggaccatgtgatcgcgcttctcgttggggtctttgctcagggcggactgggtgctcaggtagtggttgtcgggcagcagcacggggccgtcgccgatgggggtgttctgctggtagtggtcggccagctgcacgctgccgtcctcgatgttgtggcggatcttgaagttcaccttgatgccgttcttctgcttgtcggccatgatatagacgttgtggctgttgtagttgtactccagcttgtgccccaggatgttgccgtcctccttgaagtcgatgcccttcagctcgatgcggttcaccagggtgtcgccctcgaacttcacctcggcgcgggtcttgtagttgccgtcgtccttgaagaagatggtgcgctcctggacgtagccttcgggcatggcggacttgaagaagtcgtgctgcttcatgtggtcggggtagcggctgaagcactgcacgccgtaggtcagggtggtcacgagggtgggccagggcacgggcagcttgccggtggtgcagatgaacttcagggtcagcttgccgtaggtggcatcgccctcgccctcgccggacacgctgaacttgtggccgtttacgtcgccgtccagctcgaccaggatgggcaccaccccggtgaacagctcctcgcccttgctcaccatggtggcgaattcgaagcttgagctcgagatctgagtccggtagcgctagcggatctgacggttcactaaaccagctctgcttatatagacctcccaccgtacacgcctaccgcccatttgcgtcaatggggcggagttgttacgacattttggaaagtcccgttgattttggtgccaaaacaaactcccattgacgtcaatggggtggagacttggaaatccccgtgagtcaaaccgctatccacgcccattgatgtactgccaaaaccgcatcaccatggtaatagcgatgactaatacgtagatgtactgccaagtaggaaagtcccataaggtcatgtactgggcataatgccaggcgggccatttaccgtcattgacgtcaatagggggcgtacttggcatatgatacacttgatgtactgccaagtgggcagtttaccgtaaatactccacccattgacgtcaatggaaagtccctattggcgttactatgggaacatacgtcattattgacgtcaatgggcgggggtcgttgggcggtcagccaggcgggccatttaccgtaagttatgtaacgcggaactccatatatgggctatgaactaatgaccccgtaattgattactattaaattcctgcagttcaggttatttagatgcttagtttttgtacctttcttgttttgtttaggattttgatagtgttagtatttttatatttttgtacgattgcataatgttcttttttatacagttctgttttaataaaatagacgatagctagagacgttagggcagccacaagccagttaggtagcggatagtaggtaggaacagacttttactatttcataacgcgtcaattaccacctgatttggaccaattcacgggatttgtccaaggtggacgggccacctttacttaacccggaaaaggaacatatataatttatgtgtgttcgataaatagccaaatgcctcgtcatcaccggtaaaaaaaaaaaaaaaaaaaaaaaaaaaaaaacgttgactaaaaaaaaaaaaaaaaaaaaaaaaaaaaaaaaaaaaaaaaaaaaaaaaaaaaaaaaaaaaaaaaaaaaaa

SEQ ID NO: 602 - DNA, 2387 bp, synthetic construct
  source 1..2387: mol_type = other DNA
gagtaactatgactctcttaaggggagtatagttacaactgggcatagctgcagagatcgcgcctccccgtggccccgctggtaagccattaaaagggtgactaagtcgatctctgccccagtgtgagagaggagggctatctatcctccctgtcattggactcgctacccagtggcagcttcacgagttgcagaaaccacaaaatttggcacagctactccgctgttgcatagagccttgtccacgggctactgttggacaaagctgatagtttggaggagggacagctatcagctaatactaccctcacttggattttctgcactgacatttactcgacggatcgatccgaacaaacgacccaacacccgtgcgttttattctgtctttttattgccgatcccctcagaagaactcgtcaagaaggcgatagaaggcgatgcgctgcgaatcgggagcggcgataccgtaaagcacgaggaagcggtcagcccattcgccgccaagctcttcagcaatatcacgggtagccaacgctatgtcctgatagcggtcggccgctttacttgtacagctcgtccatgccgagagtgatcccggcggcggtcacgaactccagcaggaccatgtgatcgcgcttctcgttggggtctttgctcagggcggactgggtgctcaggtagtggttgtcgggcagcagcacggggccgtcgccgatgggggtgttctgctggtagtggtcggccagctgcacgctgccgtcctcgatgttgtggcggatcttgaagttcaccttgatgccgttcttctgcttgtcggccatgatatagacgttgtggctgttgtagttgtactccagcttgtgccccaggatgttgccgtcctccttgaagtcgatgcccttcagctcgatgcggttcaccagggtgtcgccctcgaacttcacctcggcgcgggtcttgtagttgccgtcgtccttgaagaagatggtgcgctcctggacgtagccttcgggcatggcggacttgaagaagtcgtgctgcttcatgtggtcggggtagcggctgaagcactgcacgccgtaggtcagggtggtcacgagggtgggccagggcacgggcagcttgccggtggtgcagatgaacttcagggtcagcttgccgtaggtggcatcgccctcgccctcgccggacacgctgaacttgtggccgtttacgtcgccgtccagctcgaccaggatgggcaccaccccggtgaacagctcctcgcccttgctcaccatggtggcgaattcgaagcttgagctcgagatctgagtccggtagcgctagcggatctgacggttcactaaaccagctctgcttatatagacctcccaccgtacacgcctaccgcccatttgcgtcaatggggcggagttgttacgacattttggaaagtcccgttgattttggtgccaaaacaaactcccattgacgtcaatggggtggagacttggaaatccccgtgagtcaaaccgctatccacgcccattgatgtactgccaaaaccgcatcaccatggtaatagcgatgactaatacgtagatgtactgccaagtaggaaagtcccataaggtcatgtactgggcataatgccaggcgggccatttaccgtcattgacgtcaatagggggcgtacttggcatatgatacacttgatgtactgccaagtgggcagtttaccgtaaatactccacccattgacgtcaatggaaagtccctattggcgttactatgggaacatacgtcattattgacgtcaatgggcgggggtcgttgggcggtcagccaggcgggccatttaccgtaagttatgtaacgcggaactccatatatgggctatgaactaatgaccccgtaattgattactattaaattcctgcagttcaggttatttagatgcttagtttttgtacctttcttgttttgtttaggattttgatagtgttagtatttttatatttttgtacgattgcataatgttcttttttatacagttctgttttaataaaatagacgatagctagagacgttagggcagccacaagccagttaggtagcggatagtaggtaggaacagacttttactatttcataacgcgtcaattaccacctgatttggaccaattcacgggatttgtccaaggtggacgggccacctttacttaacccggaaaaggaacatatataatttatgtgtgttcgataaatagccaaatgcctcgtcatcaccggtaaaaaaaaaaaaaaaaaaaaaaaaaaaaaaacgttgactaaaaaaaaaaaaaaaaaaaaaaaaaaaaaaaaaaaaaaaaaaaaaaaaaaaaaaaaaaaaaaaaaaaaaa

SEQ ID NO: 603 - DNA, 2399 bp, synthetic construct
  source 1..2399: mol_type = other DNA
gagtaactatgactctcttaaccaaaggcggctttggtgagagtatagttacaaactgggcatcgctgcagagatcgcacctcctcgtggtcccgctggtaaccctgcgtagggtgactaagtcgatcttctgccccaggtacggagccgttgggactcaccagtccaacgaactcctgccaaaattcggtgaaacaaattcctcggtaaaagccgcacggctcattgcccgaaacctggcccccgggtttcaaagggggagcaaaagtttggtagattggcaaggggggccactaccactcccgcaacacccccccaccttgcaaagaccaatattttccggactactcgacggatcgatccgaacaaacgacccaacacccgtgcgttttattctgtctttttattgccgatcccctcagaagaactcgtcaagaaggcgatagaaggcgatgcgctgcgaatcgggagcggcgataccgtaaagcacgaggaagcggtcagcccattcgccgccaagctcttcagcaatatcacgggtagccaacgctatgtcctgatagcggtcggccgctttacttgtacagctcgtccatgccgagagtgatcccggcggcggtcacgaactccagcaggaccatgtgatcgcgcttctcgttggggtctttgctcagggcggactgggtgctcaggtagtggttgtcgggcagcagcacggggccgtcgccgatgggggtgttctgctggtagtggtcggccagctgcacgctgccgtcctcgatgttgtggcggatcttgaagttcaccttgatgccgttcttctgcttgtcggccatgatatagacgttgtggctgttgtagttgtactccagcttgtgccccaggatgttgccgtcctccttgaagtcgatgcccttcagctcgatgcggttcaccagggtgtcgccctcgaacttcacctcggcgcgggtcttgtagttgccgtcgtccttgaagaagatggtgcgctcctggacgtagccttcgggcatggcggacttgaagaagtcgtgctgcttcatgtggtcggggtagcggctgaagcactgcacgccgtaggtcagggtggtcacgagggtgggccagggcacgggcagcttgccggtggtgcagatgaacttcagggtcagcttgccgtaggtggcatcgccctcgccctcgccggacacgctgaacttgtggccgtttacgtcgccgtccagctcgaccaggatgggcaccaccccggtgaacagctcctcgcccttgctcaccatggtggcgaattcgaagcttgagctcgagatctgagtccggtagcgctagcggatctgacggttcactaaaccagctctgcttatatagacctcccaccgtacacgcctaccgcccatttgcgtcaatggggcggagttgttacgacattttggaaagtcccgttgattttggtgccaaaacaaactcccattgacgtcaatggggtggagacttggaaatccccgtgagtcaaaccgctatccacgcccattgatgtactgccaaaaccgcatcaccatggtaatagcgatgactaatacgtagatgtactgccaagtaggaaagtcccataaggtcatgtactgggcataatgccaggcgggccatttaccgtcattgacgtcaatagggggcgtacttggcatatgatacacttgatgtactgccaagtgggcagtttaccgtaaatactccacccattgacgtcaatggaaagtccctattggcgttactatgggaacatacgtcattattgacgtcaatgggcgggggtcgttgggcggtcagccaggcgggccatttaccgtaagttatgtaacgcggaactccatatatgggctatgaactaatgaccccgtaattgattactattaaattcctgcagttcaggttatttagatgcttagtttttgtacctttcttgttttgtttaggattttgatagtgttagtatttttatatttttgtacgattgcataatgttcttttttatacagttctgttttaataaaatagacgatagctagagacgttagggcagccacaagccagttaggtagcggatagtaggtaggaacagacttttactatttcataacgcgtcaattaccacctgatttggaccaattcacgggatttgtccaaggtggacgggccacctttacttaacccggaaaaggaacatatataatttatgtgtgttcgataaatagccaaatgcctcgtcatcaccggtaaaaaaaaaaaaaaaaaaaaaaaaaaaaaaacgttgactaaaaaaaaaaaaaaaaaaaaaaaaaaaaaaaaaaaaaaaaaaaaaaaaaaaaaaaaaaaaaaaaaaaaaa

SEQ ID NO: 604 - DNA, 2546 bp, synthetic construct
  source 1..2546: mol_type = other DNA
gagtaactatgactctcttaagttgggaagaagcaatattggttgggaagaagcaatacctccacgtggtccaactggtaacactcaaactctgatcttcattgtgcgagtggctaaatttgcttcgtcatcctctgagagtgtgttgccctcgggcaaaaattttccgtccttgcgtagagtcattgttgtttcaattgacttttacactctcagggggcattttattattttaggtattataccatatctgctgtccgggacgagtctttacgagactgtgttgtgcgtcgccgaatatttttacaaattttgttattggccagtgcttttatttcgtgttgtgccttgcgggttgtgcgggttgtgcggtttgtggggttgtgcggttagtgccgttcgttctttgtgttgtgcggttcgtatttttggtgtcgtattcgggcgtttttatatacatttattgttcgaattcaataaagtttcgttatctactcgacggatcgatccgaacaaacgacccaacacccgtgcgttttattctgtctttttattgccgatcccctcagaagaactcgtcaagaaggcgatagaaggcgatgcgctgcgaatcgggagcggcgataccgtaaagcacgaggaagcggtcagcccattcgccgccaagctcttcagcaatatcacgggtagccaacgctatgtcctgatagcggtcggccgctttacttgtacagctcgtccatgccgagagtgatcccggcggcggtcacgaactccagcaggaccatgtgatcgcgcttctcgttggggtctttgctcagggcggactgggtgctcaggtagtggttgtcgggcagcagcacggggccgtcgccgatgggggtgttctgctggtagtggtcggccagctgcacgctgccgtcctcgatgttgtggcggatcttgaagttcaccttgatgccgttcttctgcttgtcggccatgatatagacgttgtggctgttgtagttgtactccagcttgtgccccaggatgttgccgtcctccttgaagtcgatgcccttcagctcgatgcggttcaccagggtgtcgccctcgaacttcacctcggcgcgggtcttgtagttgccgtcgtccttgaagaagatggtgcgctcctggacgtagccttcgggcatggcggacttgaagaagtcgtgctgcttcatgtggtcggggtagcggctgaagcactgcacgccgtaggtcagggtggtcacgagggtgggccagggcacgggcagcttgccggtggtgcagatgaacttcagggtcagcttgccgtaggtggcatcgccctcgccctcgccggacacgctgaacttgtggccgtttacgtcgccgtccagctcgaccaggatgggcaccaccccggtgaacagctcctcgcccttgctcaccatggtggcgaattcgaagcttgagctcgagatctgagtccggtagcgctagcggatctgacggttcactaaaccagctctgcttatatagacctcccaccgtacacgcctaccgcccatttgcgtcaatggggcggagttgttacgacattttggaaagtcccgttgattttggtgccaaaacaaactcccattgacgtcaatggggtggagacttggaaatccccgtgagtcaaaccgctatccacgcccattgatgtactgccaaaaccgcatcaccatggtaatagcgatgactaatacgtagatgtactgccaagtaggaaagtcccataaggtcatgtactgggcataatgccaggcgggccatttaccgtcattgacgtcaatagggggcgtacttggcatatgatacacttgatgtactgccaagtgggcagtttaccgtaaatactccacccattgacgtcaatggaaagtccctattggcgttactatgggaacatacgtcattattgacgtcaatgggcgggggtcgttgggcggtcagccaggcgggccatttaccgtaagttatgtaacgcggaactccatatatgggctatgaactaatgaccccgtaattgattactattaaattcctgcagttcaggttatttagatgcttagtttttgtacctttcttgttttgtttaggattttgatagtgttagtatttttatatttttgtacgattgcataatgttcttttttatacagttctgttttaataaaatagacgatagctagagacgttagggcagccacaagccagttaggtagcggatagtaggtaggaacagacttttactatttcataacgcgtcaattaccacctgatttggaccaattcacgggatttgtccaaggtggacgggccacctttacttaacccggaaaaggaacatatataatttatgtgtgttcgataaatagccaaatgcctcgtcatcaccggtaaaaaaaaaaaaaaaaaaaaaaaaaaaaaaacgttgactaaaaaaaaaaaaaaaaaaaaaaaaaaaaaaaaaaaaaaaaaaaaaaaaaaaaaaaaaaaaaaaaaaaaaa

SEQ ID NO: 605 - DNA, 2643 bp, synthetic construct
  source 1..2643: mol_type = other DNA
gagtaactatgactctcttaactttgctttcaccttgacgtcccgggtcttgtatcgtcctcctctgttacgagggcactagaaacaacatctatggattctacgaccgcagccaagcagctttcatcagggtactcatctgtgcctggttcgatgacggcttcttgtgtaatcattctgttctttttgtttgtcttatttatttatctctgtttacttatcatcatttccatgttatttatttagcttttatgtttatttatttctatgttatacgtagttctatcctcccttatgttccttctctcttctttatacattgtattactatctattttacttaccatttttgataggctgtttctctctctttttctctctctctttattcctttcttttgccaccctctatcttgaggccttccttctatttcttctcttactactttccacttttcgctttcattttcattttcgtccttcacaatatagtctctcgctcggacggccgggcccgtactttggactaagggaaggggtctttggggtatttacccttcgcttcattgggttgccagcccattgaagctactcgacggatcgatccgaacaaacgacccaacacccgtgcgttttattctgtctttttattgccgatcccctcagaagaactcgtcaagaaggcgatagaaggcgatgcgctgcgaatcgggagcggcgataccgtaaagcacgaggaagcggtcagcccattcgccgccaagctcttcagcaatatcacgggtagccaacgctatgtcctgatagcggtcggccgctttacttgtacagctcgtccatgccgagagtgatcccggcggcggtcacgaactccagcaggaccatgtgatcgcgcttctcgttggggtctttgctcagggcggactgggtgctcaggtagtggttgtcgggcagcagcacggggccgtcgccgatgggggtgttctgctggtagtggtcggccagctgcacgctgccgtcctcgatgttgtggcggatcttgaagttcaccttgatgccgttcttctgcttgtcggccatgatatagacgttgtggctgttgtagttgtactccagcttgtgccccaggatgttgccgtcctccttgaagtcgatgcccttcagctcgatgcggttcaccagggtgtcgccctcgaacttcacctcggcgcgggtcttgtagttgccgtcgtccttgaagaagatggtgcgctcctggacgtagccttcgggcatggcggacttgaagaagtcgtgctgcttcatgtggtcggggtagcggctgaagcactgcacgccgtaggtcagggtggtcacgagggtgggccagggcacgggcagcttgccggtggtgcagatgaacttcagggtcagcttgccgtaggtggcatcgccctcgccctcgccggacacgctgaacttgtggccgtttacgtcgccgtccagctcgaccaggatgggcaccaccccggtgaacagctcctcgcccttgctcaccatggtggcgaattcgaagcttgagctcgagatctgagtccggtagcgctagcggatctgacggttcactaaaccagctctgcttatatagacctcccaccgtacacgcctaccgcccatttgcgtcaatggggcggagttgttacgacattttggaaagtcccgttgattttggtgccaaaacaaactcccattgacgtcaatggggtggagacttggaaatccccgtgagtcaaaccgctatccacgcccattgatgtactgccaaaaccgcatcaccatggtaatagcgatgactaatacgtagatgtactgccaagtaggaaagtcccataaggtcatgtactgggcataatgccaggcgggccatttaccgtcattgacgtcaatagggggcgtacttggcatatgatacacttgatgtactgccaagtgggcagtttaccgtaaatactccacccattgacgtcaatggaaagtccctattggcgttactatgggaacatacgtcattattgacgtcaatgggcgggggtcgttgggcggtcagccaggcgggccatttaccgtaagttatgtaacgcggaactccatatatgggctatgaactaatgaccccgtaattgattactattaaattcctgcagttcaggttatttagatgcttagtttttgtacctttcttgttttgtttaggattttgatagtgttagtatttttatatttttgtacgattgcataatgttcttttttatacagttctgttttaataaaatagacgatagctagagacgttagggcagccacaagccagttaggtagcggatagtaggtaggaacagacttttactatttcataacgcgtcaattaccacctgatttggaccaattcacgggatttgtccaaggtggacgggccacctttacttaacccggaaaaggaacatatataatttatgtgtgttcgataaatagccaaatgcctcgtcatcaccggtaaaaaaaaaaaaaaaaaaaaaaaaaaaaaaacgttgactaaaaaaaaaaaaaaaaaaaaaaaaaaaaaaaaaaaaaaaaaaaaaaaaaaaaaaaaaaaaaaaaaaaaaa

SEQ ID NO: 606 - DNA, 2710 bp, synthetic construct
  source 1..2710: mol_type = other DNA
gagtaactatgactctcttaaggactttggtcgggtacggacgtgttttataatcgctccgcagtaattttgaatttttctttataacttctacagttttagtgctacagttttgaaactttgtagaaagattaataagtgcaccttgtgaatatattttacattttattgaattctaacggttaatccgcgagatatcgataaaactcaataactcccgttatttcaacggtaccaagatcaaactttataaaaaccgaggaaagtaattgataaacattacttaaaattttggtgcaaatcgcgcttatacttttcaaaatatcgcgattttattatttttaaaagtgatttactgctataagcatctagtagccgtgtgcaataaacaacatcagctgcatgtatcatgcagagtgcacgtgattatatctaaatacttcatgggcgttgcttattaaaacatgttttacttgtcatttgacctcgaaggttttctgaactttgagggtatcatcgtcaacatcttgcatgatacaaatattaataacatcacacaactttcatgtgataaatatcgtgatatttatatcatgatataagtatcatgagagctggaaattactaaaattcttttagagagctgacactgaaattactcgacggatcgatccgaacaaacgacccaacacccgtgcgttttattctgtctttttattgccgatcccctcagaagaactcgtcaagaaggcgatagaaggcgatgcgctgcgaatcgggagcggcgataccgtaaagcacgaggaagcggtcagcccattcgccgccaagctcttcagcaatatcacgggtagccaacgctatgtcctgatagcggtcggccgctttacttgtacagctcgtccatgccgagagtgatcccggcggcggtcacgaactccagcaggaccatgtgatcgcgcttctcgttggggtctttgctcagggcggactgggtgctcaggtagtggttgtcgggcagcagcacggggccgtcgccgatgggggtgttctgctggtagtggtcggccagctgcacgctgccgtcctcgatgttgtggcggatcttgaagttcaccttgatgccgttcttctgcttgtcggccatgatatagacgttgtggctgttgtagttgtactccagcttgtgccccaggatgttgccgtcctccttgaagtcgatgcccttcagctcgatgcggttcaccagggtgtcgccctcgaacttcacctcggcgcgggtcttgtagttgccgtcgtccttgaagaagatggtgcgctcctggacgtagccttcgggcatggcggacttgaagaagtcgtgctgcttcatgtggtcggggtagcggctgaagcactgcacgccgtaggtcagggtggtcacgagggtgggccagggcacgggcagcttgccggtggtgcagatgaacttcagggtcagcttgccgtaggtggcatcgccctcgccctcgccggacacgctgaacttgtggccgtttacgtcgccgtccagctcgaccaggatgggcaccaccccggtgaacagctcctcgcccttgctcaccatggtggcgaattcgaagcttgagctcgagatctgagtccggtagcgctagcggatctgacggttcactaaaccagctctgcttatatagacctcccaccgtacacgcctaccgcccatttgcgtcaatggggcggagttgttacgacattttggaaagtcccgttgattttggtgccaaaacaaactcccattgacgtcaatggggtggagacttggaaatccccgtgagtcaaaccgctatccacgcccattgatgtactgccaaaaccgcatcaccatggtaatagcgatgactaatacgtagatgtactgccaagtaggaaagtcccataaggtcatgtactgggcataatgccaggcgggccatttaccgtcattgacgtcaatagggggcgtacttggcatatgatacacttgatgtactgccaagtgggcagtttaccgtaaatactccacccattgacgtcaatggaaagtccctattggcgttactatgggaacatacgtcattattgacgtcaatgggcgggggtcgttgggcggtcagccaggcgggccatttaccgtaagttatgtaacgcggaactccatatatgggctatgaactaatgaccccgtaattgattactattaaattcctgcagttcaggttatttagatgcttagtttttgtacctttcttgttttgtttaggattttgatagtgttagtatttttatatttttgtacgattgcataatgttcttttttatacagttctgttttaataaaatagacgatagctagagacgttagggcagccacaagccagttaggtagcggatagtaggtaggaacagacttttactatttcataacgcgtcaattaccacctgatttggaccaattcacgggatttgtccaaggtggacgggccacctttacttaacccggaaaaggaacatatataatttatgtgtgttcgataaatagccaaatgcctcgtcatcaccggtaaaaaaaaaaaaaaaaaaaaaaaaaaaaaaacgttgactaaaaaaaaaaaaaaaaaaaaaaaaaaaaaaaaaaaaaaaaaaaaaaaaaaaaaaaaaaaaaaaaaaaaaa

SEQ ID NO: 607 - DNA, 2811 bp, synthetic construct
  source 1..2811: mol_type = other DNA
gagtaactatgactctcttaagtggactctcgatcgagacggacgtgtttcctcgtcgcgcaacaagaaagagtttagtccgggaaaaacgcaagctagaacttaaaggttatatttgtcttaaagcggcgcgtctcttcttcactttaacgcaaagttcgcgaaaatccgcagccggattgccgagatatcgtcggataaaaacgcgaagtggagaattgagatttggtgcaaaacacgtgtccatcagcggatataccatcgcggcgtggagttccatcggcggtaaacagcagaactacgggtttgtgcatgcactacgacaccttccttgtatcacaaccaccggagtgcgcacgtcaaactgtgatttgtgctcctgctggaatcatctagtacaacaacccgcttccagcagcagcgccatcggtggtaacactagaagcacgggtttgtgcatgcactttgggttaccctacatcacaaccaccggaaaagcacctcaaacagtggtttgtgctaatgctgctagaatcatctaatgcgggaaccatcgtggaaaaatagtacaacgaagggcttgtgcatctacttcgggacctacccaacatcacaacccccgaagagaccactttaagctgtgccctgtgcttctgctataaccatctcaggcaggagcccgtattcaagaacaccacctaatcgatcgaccgagagaggagcttcggaagaaaacaaatacgaagtatagacagcgtactcgacggatcgatccgaacaaacgacccaacacccgtgcgttttattctgtctttttattgccgatcccctcagaagaactcgtcaagaaggcgatagaaggcgatgcgctgcgaatcgggagcggcgataccgtaaagcacgaggaagcggtcagcccattcgccgccaagctcttcagcaatatcacgggtagccaacgctatgtcctgatagcggtcggccgctttacttgtacagctcgtccatgccgagagtgatcccggcggcggtcacgaactccagcaggaccatgtgatcgcgcttctcgttggggtctttgctcagggcggactgggtgctcaggtagtggttgtcgggcagcagcacggggccgtcgccgatgggggtgttctgctggtagtggtcggccagctgcacgctgccgtcctcgatgttgtggcggatcttgaagttcaccttgatgccgttcttctgcttgtcggccatgatatagacgttgtggctgttgtagttgtactccagcttgtgccccaggatgttgccgtcctccttgaagtcgatgcccttcagctcgatgcggttcaccagggtgtcgccctcgaacttcacctcggcgcgggtcttgtagttgccgtcgtccttgaagaagatggtgcgctcctggacgtagccttcgggcatggcggacttgaagaagtcgtgctgcttcatgtggtcggggtagcggctgaagcactgcacgccgtaggtcagggtggtcacgagggtgggccagggcacgggcagcttgccggtggtgcagatgaacttcagggtcagcttgccgtaggtggcatcgccctcgccctcgccggacacgctgaacttgtggccgtttacgtcgccgtccagctcgaccaggatgggcaccaccccggtgaacagctcctcgcccttgctcaccatggtggcgaattcgaagcttgagctcgagatctgagtccggtagcgctagcggatctgacggttcactaaaccagctctgcttatatagacctcccaccgtacacgcctaccgcccatttgcgtcaatggggcggagttgttacgacattttggaaagtcccgttgattttggtgccaaaacaaactcccattgacgtcaatggggtggagacttggaaatccccgtgagtcaaaccgctatccacgcccattgatgtactgccaaaaccgcatcaccatggtaatagcgatgactaatacgtagatgtactgccaagtaggaaagtcccataaggtcatgtactgggcataatgccaggcgggccatttaccgtcattgacgtcaatagggggcgtacttggcatatgatacacttgatgtactgccaagtgggcagtttaccgtaaatactccacccattgacgtcaatggaaagtccctattggcgttactatgggaacatacgtcattattgacgtcaatgggcgggggtcgttgggcggtcagccaggcgggccatttaccgtaagttatgtaacgcggaactccatatatgggctatgaactaatgaccccgtaattgattactattaaattcctgcagttcaggttatttagatgcttagtttttgtacctttcttgttttgtttaggattttgatagtgttagtatttttatatttttgtacgattgcataatgttcttttttatacagttctgttttaataaaatagacgatagctagagacgttagggcagccacaagccagttaggtagcggatagtaggtaggaacagacttttactatttcataacgcgtcaattaccacctgatttggaccaattcacgggatttgtccaaggtggacgggccacctttacttaacccggaaaaggaacatatataatttatgtgtgttcgataaatagccaaatgcctcgtcatcaccggtaaaaaaaaaaaaaaaaaaaaaaaaaaaaaaacgttgactaaaaaaaaaaaaaaaaaaaaaaaaaaaaaaaaaaaaaaaaaaaaaaaaaaaaaaaaaaaaaaaaaaaaaa

SEQ ID NO: 608 - DNA, 2919 bp, synthetic construct
  source 1..2919: mol_type = other DNA
gagtaactatgactctcttaacacagcattaccacgggtcggtgtctaagaccgaatggcccttatgtggtgagcgtccgatagtgacgttggtggcacgtatgtaccctacttgcgtcatactctacacccactaatgtgtctcccgagtggaaccatttatgtcgagaagcctctggcttcgttgagacaaaacttggttgccaatgacccgtcatctcaatagtgacgcagaaaatctatgaccatctaaggtgcctcatgtcccgtcatcccaatagtgacgtagcaaatctatgaccatataaggtagacacgatgacccgtcatctcaatagtgacgaaacaaacctatgaccatcgcaggtaaacgcatgacccgtcatataattagtgacgtactgttaccaaatgacccgtcatctgtagtgacgctcgaatgaagtgcacaatggcaaagagaccatagccattttgtcggctcaactaatgacaagcagtcctctgcggagtctgcagaatcaatgagaaagcaagaggtgtcaggtattggaaaaaggacatggtcctagatatgtaagaaagtgagatgggggtcctatccggtatataccggtaggcccccattttcacgtcgaaaactatgagccgacaatgcgcttcacgcacgggccaaagctcctcgatcactattgaaagcaatacgcggccaggacttgccctgcggcacgcggagataggagaaggcaccttcgggagaggtaaacgggcagagaggaaggctgttgacgactaggcttgtaaatggttatgagaggaaacggattggaatgatgtacccggcttacaaatccaacctatttcatactcgacggatcgatccgaacaaacgacccaacacccgtgcgttttattctgtctttttattgccgatcccctcagaagaactcgtcaagaaggcgatagaaggcgatgcgctgcgaatcgggagcggcgataccgtaaagcacgaggaagcggtcagcccattcgccgccaagctcttcagcaatatcacgggtagccaacgctatgtcctgatagcggtcggccgctttacttgtacagctcgtccatgccgagagtgatcccggcggcggtcacgaactccagcaggaccatgtgatcgcgcttctcgttggggtctttgctcagggcggactgggtgctcaggtagtggttgtcgggcagcagcacggggccgtcgccgatgggggtgttctgctggtagtggtcggccagctgcacgctgccgtcctcgatgttgtggcggatcttgaagttcaccttgatgccgttcttctgcttgtcggccatgatatagacgttgtggctgttgtagttgtactccagcttgtgccccaggatgttgccgtcctccttgaagtcgatgcccttcagctcgatgcggttcaccagggtgtcgccctcgaacttcacctcggcgcgggtcttgtagttgccgtcgtccttgaagaagatggtgcgctcctggacgtagccttcgggcatggcggacttgaagaagtcgtgctgcttcatgtggtcggggtagcggctgaagcactgcacgccgtaggtcagggtggtcacgagggtgggccagggcacgggcagcttgccggtggtgcagatgaacttcagggtcagcttgccgtaggtggcatcgccctcgccctcgccggacacgctgaacttgtggccgtttacgtcgccgtccagctcgaccaggatgggcaccaccccggtgaacagctcctcgcccttgctcaccatggtggcgaattcgaagcttgagctcgagatctgagtccggtagcgctagcggatctgacggttcactaaaccagctctgcttatatagacctcccaccgtacacgcctaccgcccatttgcgtcaatggggcggagttgttacgacattttggaaagtcccgttgattttggtgccaaaacaaactcccattgacgtcaatggggtggagacttggaaatccccgtgagtcaaaccgctatccacgcccattgatgtactgccaaaaccgcatcaccatggtaatagcgatgactaatacgtagatgtactgccaagtaggaaagtcccataaggtcatgtactgggcataatgccaggcgggccatttaccgtcattgacgtcaatagggggcgtacttggcatatgatacacttgatgtactgccaagtgggcagtttaccgtaaatactccacccattgacgtcaatggaaagtccctattggcgttactatgggaacatacgtcattattgacgtcaatgggcgggggtcgttgggcggtcagccaggcgggccatttaccgtaagttatgtaacgcggaactccatatatgggctatgaactaatgaccccgtaattgattactattaaattcctgcagttcaggttatttagatgcttagtttttgtacctttcttgttttgtttaggattttgatagtgttagtatttttatatttttgtacgattgcataatgttcttttttatacagttctgttttaataaaatagacgatagctagagacgttagggcagccacaagccagttaggtagcggatagtaggtaggaacagacttttactatttcataacgcgtcaattaccacctgatttggaccaattcacgggatttgtccaaggtggacgggccacctttacttaacccggaaaaggaacatatataatttatgtgtgttcgataaatagccaaatgcctcgtcatcaccggtaaaaaaaaaaaaaaaaaaaaaaaaaaaaaaacgttgactaaaaaaaaaaaaaaaaaaaaaaaaaaaaaaaaaaaaaaaaaaaaaaaaaaaaaaaaaaaaaaaaaaaaaa

SEQ ID NO: 609 - DNA, 3006 bp, synthetic construct
  source 1..3006: mol_type = other DNA
gagtaactatgactctcttaagtctcatgactctcttagtctttcgtagtgaacggacgtgttttatttggtgctacgtgaaatacaagttttttcttactaagttccacgttttatatcctaggaacttaagactttatatttacattaaataattgttatttaaaataactttttaatttcaacgaaatcgaacggtaatttcgcgagtttccgcgaagtgtcaataactcccgttatattaacggtacaagcttgaaatttcaaagaaagtgggcacagtaattaactaatactatatcaaagtttggtgcaattcgcgccataagaacaaaagttatcgcgagttgaatattattctagcgcaagtcccgctataagcatctattggtcgtgcacaacaaacaacatatgctgcttgttaattgttgatcatcacaagggcacgtgaaaatacttgttttctcattggcatttagtattatagccagcaggctgacctcgaaagttttttgaactctcatctgtaacttctcgcatgacacttgtgtcatcgcttacataaatatcatgatacattatatatcatgacacaaatatcatgagagcaggaaattttttttgatttgaatatatagaggaaaaaaaaaaaaaaaaaaattaaaattaaataaaaactgtttacttcgaaaattatgactacctcagcaggtttttgaacctgcatttatatttgctgaaattaatatcatcaagttgagtcaaggacacgtgacgtgttattgttggaggcctatctaaatccatataattgtaagtactacatccgtctgaatatatatatatatatatatatatgtatttttatatatatgtgtgtatgtgtatatattttgtatgagtgtttcgtgcttgcacttcaccggctagtgagattcttttttataccacatactcgacggatcgatccgaacaaacgacccaacacccgtgcgttttattctgtctttttattgccgatcccctcagaagaactcgtcaagaaggcgatagaaggcgatgcgctgcgaatcgggagcggcgataccgtaaagcacgaggaagcggtcagcccattcgccgccaagctcttcagcaatatcacgggtagccaacgctatgtcctgatagcggtcggccgctttacttgtacagctcgtccatgccgagagtgatcccggcggcggtcacgaactccagcaggaccatgtgatcgcgcttctcgttggggtctttgctcagggcggactgggtgctcaggtagtggttgtcgggcagcagcacggggccgtcgccgatgggggtgttctgctggtagtggtcggccagctgcacgctgccgtcctcgatgttgtggcggatcttgaagttcaccttgatgccgttcttctgcttgtcggccatgatatagacgttgtggctgttgtagttgtactccagcttgtgccccaggatgttgccgtcctccttgaagtcgatgcccttcagctcgatgcggttcaccagggtgtcgccctcgaacttcacctcggcgcgggtcttgtagttgccgtcgtccttgaagaagatggtgcgctcctggacgtagccttcgggcatggcggacttgaagaagtcgtgctgcttcatgtggtcggggtagcggctgaagcactgcacgccgtaggtcagggtggtcacgagggtgggccagggcacgggcagcttgccggtggtgcagatgaacttcagggtcagcttgccgtaggtggcatcgccctcgccctcgccggacacgctgaacttgtggccgtttacgtcgccgtccagctcgaccaggatgggcaccaccccggtgaacagctcctcgcccttgctcaccatggtggcgaattcgaagcttgagctcgagatctgagtccggtagcgctagcggatctgacggttcactaaaccagctctgcttatatagacctcccaccgtacacgcctaccgcccatttgcgtcaatggggcggagttgttacgacattttggaaagtcccgttgattttggtgccaaaacaaactcccattgacgtcaatggggtggagacttggaaatccccgtgagtcaaaccgctatccacgcccattgatgtactgccaaaaccgcatcaccatggtaatagcgatgactaatacgtagatgtactgccaagtaggaaagtcccataaggtcatgtactgggcataatgccaggcgggccatttaccgtcattgacgtcaatagggggcgtacttggcatatgatacacttgatgtactgccaagtgggcagtttaccgtaaatactccacccattgacgtcaatggaaagtccctattggcgttactatgggaacatacgtcattattgacgtcaatgggcgggggtcgttgggcggtcagccaggcgggccatttaccgtaagttatgtaacgcggaactccatatatgggctatgaactaatgaccccgtaattgattactattaaattcctgcagttcaggttatttagatgcttagtttttgtacctttcttgttttgtttaggattttgatagtgttagtatttttatatttttgtacgattgcataatgttcttttttatacagttctgttttaataaaatagacgatagctagagacgttagggcagccacaagccagttaggtagcggatagtaggtaggaacagacttttactatttcataacgcgtcaattaccacctgatttggaccaattcacgggatttgtccaaggtggacgggccacctttacttaacccggaaaaggaacatatataatttatgtgtgttcgataaatagccaaatgcctcgtcatcaccggtaaaaaaaaaaaaaaaaaaaaaaaaaaaaaaacgttgactaaaaaaaaaaaaaaaaaaaaaaaaaaaaaaaaaaaaaaaaaaaaaaaaaaaaaaaaaaaaaaaaaaaaaa

SEQ ID NO: 610 - DNA, 3075 bp, synthetic construct
  source 1..3075: mol_type = other DNA
gagtaactatgactctcttaatagtattggtgtgcggacgtgtatcaaatcgctccgtcaaaaagtgaaattaatattagttctagctcgtattggaaaaataaaaactcggaaaagtttacataaggtcacccccgtcattttaaaacaaaaatcaagcaataagaccaccgcgtttgctcacaatttgtgttttaattttttgaattgcatttgtgaaataaaaaaaataaattgattcgggagagaatttcggaaaaaaaagcataagagacgacatcgtccacatacgatccacataaaattccatctcaaaattgtttttgttgtaataatttcccttgattctgtgaagaatccacctaattcaccacctttttcacctttttcaccaccaaagtttaaagccattttccatagcccccagccatctgtcacccgaaatactaaaagtgccccctagtctgacatttcatctgtcattttccatcaaaaaattgtgaaatcactcgaggattgctctagaactttcggattacttttggtattcaattttctcaaaatctgtaaatttcccctcgaaaataaaataataagtgaagctccgaaccccaacctcttcggttacagtcttgaatacgacatcacgccatctggtaaaaaacagcaggaaactccaacttctccggtttgtgtatctgatacataattttactaatcaacatctggttgtaattttcgataaatacttgcgccatctagcaaaaagagctcacaccctgaaaataacacctagtgaggacactttccataattttaataattccgaagaacagaaccgaacaaaatcaccagctttcgacacaaaggggtatttcagcattaatacttcatggctaattattcacatagcaaagcacattcaaacaatagaaagagagtattgcgaatttaaattattcgtatagaagtgtggtttaattaccaaaaataaactaaccggtcttgtgaaatatccacatactcgacggatcgatccgaacaaacgacccaacacccgtgcgttttattctgtctttttattgccgatcccctcagaagaactcgtcaagaaggcgatagaaggcgatgcgctgcgaatcgggagcggcgataccgtaaagcacgaggaagcggtcagcccattcgccgccaagctcttcagcaatatcacgggtagccaacgctatgtcctgatagcggtcggccgctttacttgtacagctcgtccatgccgagagtgatcccggcggcggtcacgaactccagcaggaccatgtgatcgcgcttctcgttggggtctttgctcagggcggactgggtgctcaggtagtggttgtcgggcagcagcacggggccgtcgccgatgggggtgttctgctggtagtggtcggccagctgcacgctgccgtcctcgatgttgtggcggatcttgaagttcaccttgatgccgttcttctgcttgtcggccatgatatagacgttgtggctgttgtagttgtactccagcttgtgccccaggatgttgccgtcctccttgaagtcgatgcccttcagctcgatgcggttcaccagggtgtcgccctcgaacttcacctcggcgcgggtcttgtagttgccgtcgtccttgaagaagatggtgcgctcctggacgtagccttcgggcatggcggacttgaagaagtcgtgctgcttcatgtggtcggggtagcggctgaagcactgcacgccgtaggtcagggtggtcacgagggtgggccagggcacgggcagcttgccggtggtgcagatgaacttcagggtcagcttgccgtaggtggcatcgccctcgccctcgccggacacgctgaacttgtggccgtttacgtcgccgtccagctcgaccaggatgggcaccaccccggtgaacagctcctcgcccttgctcaccatggtggcgaattcgaagcttgagctcgagatctgagtccggtagcgctagcggatctgacggttcactaaaccagctctgcttatatagacctcccaccgtacacgcctaccgcccatttgcgtcaatggggcggagttgttacgacattttggaaagtcccgttgattttggtgccaaaacaaactcccattgacgtcaatggggtggagacttggaaatccccgtgagtcaaaccgctatccacgcccattgatgtactgccaaaaccgcatcaccatggtaatagcgatgactaatacgtagatgtactgccaagtaggaaagtcccataaggtcatgtactgggcataatgccaggcgggccatttaccgtcattgacgtcaatagggggcgtacttggcatatgatacacttgatgtactgccaagtgggcagtttaccgtaaatactccacccattgacgtcaatggaaagtccctattggcgttactatgggaacatacgtcattattgacgtcaatgggcgggggtcgttgggcggtcagccaggcgggccatttaccgtaagttatgtaacgcggaactccatatatgggctatgaactaatgaccccgtaattgattactattaaattcctgcagttcaggttatttagatgcttagtttttgtacctttcttgttttgtttaggattttgatagtgttagtatttttatatttttgtacgattgcataatgttcttttttatacagttctgttttaataaaatagacgatagctagagacgttagggcagccacaagccagttaggtagcggatagtaggtaggaacagacttttactatttcataacgcgtcaattaccacctgatttggaccaattcacgggatttgtccaaggtggacgggccacctttacttaacccggaaaaggaacatatataatttatgtgtgttcgataaatagccaaatgcctcgtcatcaccggtaaaaaaaaaaaaaaaaaaaaaaaaaaaaaaacgttgactaaaaaaaaaaaaaaaaaaaaaaaaaaaaaaaaaaaaaaaaaaaaaaaaaaaaaaaaaaaaaaaaaaaaaa

SEQ ID NO: 611 - DNA, 3352 bp, synthetic construct
  source 1..3352: mol_type = other DNA
gagtaactatgactctcttaagccggcgtctcaatctgctaccgcggggtatatgcgctgtccgcggtgccttcgggcgcagggttacgacccaacagagattgtttcgcttattggtgattgttcacgctcttgtacctcacgagtgtcggtcggtcggctccgcgggcgtggttgcctcgagccgggtcatggacccggcccgtcggtgtttctcgccccgggactggacgccgtcatacggacaagatggtagggcggggttgaccctcaccggtcggcgcgtattaatcgcgcctctcggcgagatgtctccccgtcacttggatttccgttttgcggcggcttggacgcggctcgggacctgaaggcgctcgcctccgtactgcctggttttcaggtggcggtgggtgtcagctggtctcgtgtccccgtgctcgcgcaggcgctctaatcgtcttgtctacgtgaggccagagtcgggctgtcggcggcgacgtgggccggctaccgtcctgtgtgtgacacgagagtgtccctcacaggttgcgtcctaccccacgctcggtgttgaacgtccggactcaagggctggctcggtcggcgatgcaagggtcagaattacttcacggcccactcttcattgaagggtgagttgatggcaaaatcgatcctcacttccggactcatgaatgtggtattaattcgtctaagtgccggtcggatactgaccacttaagtggtttgctaacgaggcaatcgtcggtggggcgcatcgccgggtgatcttggcaggtcgttcggtgtatcgccttactgtgattttggtagttacagcccggcatggcccggggactcaccacagagtcctcgctaaatgtcgggagtggccgcgcgtcgttcgcgcgtgcgttggtgctggttagccccgcgggtgtcatttcaccgtccgcggtgccgtaatcgggtgcagggcttcggcccaatcagaagggtattgtctggaggcgtaccgcgtgggttaaaaccgtccgcggtgccgagaggcaggagggtgttacaccttaaacgtacaatagcaataccttgttaaccatcaccatcgcgcgtgcgcttgtcgggcgaccgcatcggactcatgtggagtccggctgtctcttccgtgatcaactcggcgggggtacatgaaacacgccctttcgtccgaggtatctcgcgtaatagtcgggtaaccccccgaccagtcccaggtcggcctctgagcagcgaggccggtgcgccggtacagaccgggatgatactcgacggatcgatccgaacaaacgacccaacacccgtgcgttttattctgtctttttattgccgatcccctcagaagaactcgtcaagaaggcgatagaaggcgatgcgctgcgaatcgggagcggcgataccgtaaagcacgaggaagcggtcagcccattcgccgccaagctcttcagcaatatcacgggtagccaacgctatgtcctgatagcggtcggccgctttacttgtacagctcgtccatgccgagagtgatcccggcggcggtcacgaactccagcaggaccatgtgatcgcgcttctcgttggggtctttgctcagggcggactgggtgctcaggtagtggttgtcgggcagcagcacggggccgtcgccgatgggggtgttctgctggtagtggtcggccagctgcacgctgccgtcctcgatgttgtggcggatcttgaagttcaccttgatgccgttcttctgcttgtcggccatgatatagacgttgtggctgttgtagttgtactccagcttgtgccccaggatgttgccgtcctccttgaagtcgatgcccttcagctcgatgcggttcaccagggtgtcgccctcgaacttcacctcggcgcgggtcttgtagttgccgtcgtccttgaagaagatggtgcgctcctggacgtagccttcgggcatggcggacttgaagaagtcgtgctgcttcatgtggtcggggtagcggctgaagcactgcacgccgtaggtcagggtggtcacgagggtgggccagggcacgggcagcttgccggtggtgcagatgaacttcagggtcagcttgccgtaggtggcatcgccctcgccctcgccggacacgctgaacttgtggccgtttacgtcgccgtccagctcgaccaggatgggcaccaccccggtgaacagctcctcgcccttgctcaccatggtggcgaattcgaagcttgagctcgagatctgagtccggtagcgctagcggatctgacggttcactaaaccagctctgcttatatagacctcccaccgtacacgcctaccgcccatttgcgtcaatggggcggagttgttacgacattttggaaagtcccgttgattttggtgccaaaacaaactcccattgacgtcaatggggtggagacttggaaatccccgtgagtcaaaccgctatccacgcccattgatgtactgccaaaaccgcatcaccatggtaatagcgatgactaatacgtagatgtactgccaagtaggaaagtcccataaggtcatgtactgggcataatgccaggcgggccatttaccgtcattgacgtcaatagggggcgtacttggcatatgatacacttgatgtactgccaagtgggcagtttaccgtaaatactccacccattgacgtcaatggaaagtccctattggcgttactatgggaacatacgtcattattgacgtcaatgggcgggggtcgttgggcggtcagccaggcgggccatttaccgtaagttatgtaacgcggaactccatatatgggctatgaactaatgaccccgtaattgattactattaaattcctgcagttcaggttatttagatgcttagtttttgtacctttcttgttttgtttaggattttgatagtgttagtatttttatatttttgtacgattgcataatgttcttttttatacagttctgttttaataaaatagacgatagctagagacgttagggcagccacaagccagttaggtagcggatagtaggtaggaacagacttttactatttcataacgcgtcaattaccacctgatttggaccaattcacgggatttgtccaaggtggacgggccacctttacttaacccggaaaaggaacatatataatttatgtgtgttcgataaatagccaaatgcctcgtcatcaccggtaaaaaaaaaaaaaaaaaaaaaaaaaaaaaaacgttgactaaaaaaaaaaaaaaaaaaaaaaaaaaaaaaaaaaaaaaaaaaaaaaaaaaaaaaaaaaaaaaaaaaaaaa

SEQ ID NO: 612 - DNA, 2855 bp, synthetic construct
  source 1..2855: mol_type = other DNA
gagtaactatgactctcttaagtctagttacaactgggcatcgctgcagagatcgcacctcctcgtggtcccgctggtagcccttcgaagggtgactaagtcgatctctgccccaggtacggagccgttgggactcaccagtccaacgtaagtctagttacaactgggcatcgctgcagagatcgcacctcctcgtggtcccgctggtagcccttcgaagggtgactaagtcgatctctgccccaggtacggagccgttgggactcaccagtccaacgtaagtctagttacaactgggcatcgctgcagagatcgcacctcctcgtggtcccgctggtagcccttcgaagggtgactaagtcgatctctgccccaggtacggagccgttgggactcaccagtccaacgtaagtctagttacaactgggcatcgctgcagagatcgcacctcctcgtggtcccgctggtagcccttcgaagggtgactaagtcgatctctgccccaggtacggagccgttgggactcaccagtccaacgtaagtctagttacaactgggcatcgctgcagagatcgcacctcctcgtggtcccgctggtagcccttcgaagggtgactaagtcgatctctgccccaggtacggagccgttgggactcaccagtccaacgtaagtctagttacaactgggcatcgctgcagagatcgcacctcctcgtggtcccgctggtagcccttcgaagggtgactaagtcgatctctgccccaggtacggagccgttgggactcaccagtccaacgtaatactcgacggatcgatccgaacaaacgacccaacacccgtgcgttttattctgtctttttattgccgatcccctcagaagaactcgtcaagaaggcgatagaaggcgatgcgctgcgaatcgggagcggcgataccgtaaagcacgaggaagcggtcagcccattcgccgccaagctcttcagcaatatcacgggtagccaacgctatgtcctgatagcggtcggccgctttacttgtacagctcgtccatgccgagagtgatcccggcggcggtcacgaactccagcaggaccatgtgatcgcgcttctcgttggggtctttgctcagggcggactgggtgctcaggtagtggttgtcgggcagcagcacggggccgtcgccgatgggggtgttctgctggtagtggtcggccagctgcacgctgccgtcctcgatgttgtggcggatcttgaagttcaccttgatgccgttcttctgcttgtcggccatgatatagacgttgtggctgttgtagttgtactccagcttgtgccccaggatgttgccgtcctccttgaagtcgatgcccttcagctcgatgcggttcaccagggtgtcgccctcgaacttcacctcggcgcgggtcttgtagttgccgtcgtccttgaagaagatggtgcgctcctggacgtagccttcgggcatggcggacttgaagaagtcgtgctgcttcatgtggtcggggtagcggctgaagcactgcacgccgtaggtcagggtggtcacgagggtgggccagggcacgggcagcttgccggtggtgcagatgaacttcagggtcagcttgccgtaggtggcatcgccctcgccctcgccggacacgctgaacttgtggccgtttacgtcgccgtccagctcgaccaggatgggcaccaccccggtgaacagctcctcgcccttgctcaccatggtggcgaattcgaagcttgagctcgagatctgagtccggtagcgctagcggatctgacggttcactaaaccagctctgcttatatagacctcccaccgtacacgcctaccgcccatttgcgtcaatggggcggagttgttacgacattttggaaagtcccgttgattttggtgccaaaacaaactcccattgacgtcaatggggtggagacttggaaatccccgtgagtcaaaccgctatccacgcccattgatgtactgccaaaaccgcatcaccatggtaatagcgatgactaatacgtagatgtactgccaagtaggaaagtcccataaggtcatgtactgggcataatgccaggcgggccatttaccgtcattgacgtcaatagggggcgtacttggcatatgatacacttgatgtactgccaagtgggcagtttaccgtaaatactccacccattgacgtcaatggaaagtccctattggcgttactatgggaacatacgtcattattgacgtcaatgggcgggggtcgttgggcggtcagccaggcgggccatttaccgtaagttatgtaacgcggaactccatatatgggctatgaactaatgaccccgtaattgattactattaaattcctgcagttcaggttatttagatgcttagtttttgtacctttcttgttttgtttaggattttgatagtgttagtatttttatatttttgtacgattgcataatgttcttttttatacagttctgttttaataaaatagacgatagctagagacgttagggcagccacaagccagttaggtagcggatagtaggtaggaacagacttttactatttcataacgcgtcaattaccacctgatttggaccaattcacgggatttgtccaaggtggacgggccacctttacttaacccggaaaaggaacatatataatttatgtgtgttcgataaatagccaaatgcctcgtcatcaccggtaaaaaaaaaaaaaaaaaaaaaaaaaaaaaaacgttgactaaaaaaaaaaaaaaaaaaaaaaaaaaaaaaaaaaaaaaaaaaaaaaaaaaaaaaaaaaaaaaaaaaaaaa

SEQ ID NO: 613 - DNA, 2855 bp, synthetic construct
  source 1..2855: mol_type = other DNA
gagtaactatgactctcttaagtctagttacaactgggcatcgctgcagagatcgcacctcctcgtggtcccgctggtagcccttcgaagggtgactaagtcgatctctgccccaggtacggagccgttgggactcaccagtccaacgtaatactcgacggatcgatccgaacaaacgacccaacacccgtgcgttttattctgtctttttattgccgatcccctcagaagaactcgtcaagaaggcgatagaaggcgatgcgctgcgaatcgggagcggcgataccgtaaagcacgaggaagcggtcagcccattcgccgccaagctcttcagcaatatcacgggtagccaacgctatgtcctgatagcggtcggccgctttacttgtacagctcgtccatgccgagagtgatcccggcggcggtcacgaactccagcaggaccatgtgatcgcgcttctcgttggggtctttgctcagggcggactgggtgctcaggtagtggttgtcgggcagcagcacggggccgtcgccgatgggggtgttctgctggtagtggtcggccagctgcacgctgccgtcctcgatgttgtggcggatcttgaagttcaccttgatgccgttcttctgcttgtcggccatgatatagacgttgtggctgttgtagttgtactccagcttgtgccccaggatgttgccgtcctccttgaagtcgatgcccttcagctcgatgcggttcaccagggtgtcgccctcgaacttcacctcggcgcgggtcttgtagttgccgtcgtccttgaagaagatggtgcgctcctggacgtagccttcgggcatggcggacttgaagaagtcgtgctgcttcatgtggtcggggtagcggctgaagcactgcacgccgtaggtcagggtggtcacgagggtgggccagggcacgggcagcttgccggtggtgcagatgaacttcagggtcagcttgccgtaggtggcatcgccctcgccctcgccggacacgctgaacttgtggccgtttacgtcgccgtccagctcgaccaggatgggcaccaccccggtgaacagctcctcgcccttgctcaccatggtggcgaattcgaagcttgagctcgagatctgagtccggtagcgctagcggatctgacggttcactaaaccagctctgcttatatagacctcccaccgtacacgcctaccgcccatttgcgtcaatggggcggagttgttacgacattttggaaagtcccgttgattttggtgccaaaacaaactcccattgacgtcaatggggtggagacttggaaatccccgtgagtcaaaccgctatccacgcccattgatgtactgccaaaaccgcatcaccatggtaatagcgatgactaatacgtagatgtactgccaagtaggaaagtcccataaggtcatgtactgggcataatgccaggcgggccatttaccgtcattgacgtcaatagggggcgtacttggcatatgatacacttgatgtactgccaagtgggcagtttaccgtaaatactccacccattgacgtcaatggaaagtccctattggcgttactatgggaacatacgtcattattgacgtcaatgggcgggggtcgttgggcggtcagccaggcgggccatttaccgtaagttatgtaacgcggaactccatatatgggctatgaactaatgaccccgtaattgattactattaaattcctgcagttcaggttatttagatgcttagtttttgtacctttcttgttttgtttaggattttgatagtgttagtatttttatatttttgtacgattgcataatgttcttttttatacagttctgttttaataaaatagacgatagctagagacgttagggcagccacaagccagttaggtagcggatagtaggtaggaacagacttttactatttcataacgcgtcaattaccacctgatttggaccaattcacgggatttgtccaaggtggacgggccacctttacttaacccggaaaaggaacatatataatttatgtgtgttcgataaattcaggttatttagatgcttagtttttgtacctttcttgttttgtttaggattttgatagtgttagtatttttatatttttgtacgattgcataatgttcttttttatacagttctgttttaataaaatagacgatagctagagacgttagggcagccacaagccagttaggtagcggatagtaggtaggaacagacttttactatttcataacgcgtcaattaccacctgatttggaccaattcacgggatttgtccaaggtggacgggccacctttacttaacccggaaaaggaacatatataatttatgtgtgttcgataaattcaggttatttagatgcttagtttttgtacctttcttgttttgtttaggattttgatagtgttagtatttttatatttttgtacgattgcataatgttcttttttatacagttctgttttaataaaatagacgatagctagagacgttagggcagccacaagccagttaggtagcggatagtaggtaggaacagacttttactatttcataacgcgtcaattaccacctgatttggaccaattcacgggatttgtccaaggtggacgggccacctttacttaacccggaaaaggaacatatataatttatgtgtgttcgataaatagccaaatgcctcgtcatcaccggtaaaaaaaaaaaaaaaaaaaaaaaaaaaaaaacgttgactaaaaaaaaaaaaaaaaaaaaaaaaaaaaaaaaaaaaaaaaaaaaaaaaaaaaaaaaaaaaaaaaaaaaaa

SEQ ID NO: 614 - DNA, 2465 bp, synthetic construct
  source 1..2465: mol_type = other DNA
gagtaactatgactctcttaagtctagttacaactgggcatcgctgcagagatcgcacctcctcgtggtcccgctggtagcccttcgaagggtgactaagtcgatctctgccccaggtacggagccgttgggactcaccagtccaacgtaagtctagttacaactgggcatcgctgcagagatcgcacctcctcgtggtcccgctggtagcccttcgaagggtgactaagtcgatctctgccccaggtacggagccgttgggactcaccagtccaacgtaagtctagttacaactgggcatcgctgcagagatcgcacctcctcgtggtcccgctggtagcccttcgaagggtgactaagtcgatctctgccccaggtacggagccgttgggactcaccagtccaacgtaatactcgacggatcgatccgaacaaacgacccaacacccgtgcgttttattctgtctttttattgccgatcccctcagaagaactcgtcaagaaggcgatagaaggcgatgcgctgcgaatcgggagcggcgataccgtaaagcacgaggaagcggtcagcccattcgccgccaagctcttcagcaatatcacgggtagccaacgctatgtcctgatagcggtcggccgctttacttgtacagctcgtccatgccgagagtgatcccggcggcggtcacgaactccagcaggaccatgtgatcgcgcttctcgttggggtctttgctcagggcggactgggtgctcaggtagtggttgtcgggcagcagcacggggccgtcgccgatgggggtgttctgctggtagtggtcggccagctgcacgctgccgtcctcgatgttgtggcggatcttgaagttcaccttgatgccgttcttctgcttgtcggccatgatatagacgttgtggctgttgtagttgtactccagcttgtgccccaggatgttgccgtcctccttgaagtcgatgcccttcagctcgatgcggttcaccagggtgtcgccctcgaacttcacctcggcgcgggtcttgtagttgccgtcgtccttgaagaagatggtgcgctcctggacgtagccttcgggcatggcggacttgaagaagtcgtgctgcttcatgtggtcggggtagcggctgaagcactgcacgccgtaggtcagggtggtcacgagggtgggccagggcacgggcagcttgccggtggtgcagatgaacttcagggtcagcttgccgtaggtggcatcgccctcgccctcgccggacacgctgaacttgtggccgtttacgtcgccgtccagctcgaccaggatgggcaccaccccggtgaacagctcctcgcccttgctcaccatggtggcgaattcgaagcttgagctcgagatctgagtccggtagcgctagcggatctgacggttcactaaaccagctctgcttatatagacctcccaccgtacacgcctaccgcccatttgcgtcaatggggcggagttgttacgacattttggaaagtcccgttgattttggtgccaaaacaaactcccattgacgtcaatggggtggagacttggaaatccccgtgagtcaaaccgctatccacgcccattgatgtactgccaaaaccgcatcaccatggtaatagcgatgactaatacgtagatgtactgccaagtaggaaagtcccataaggtcatgtactgggcataatgccaggcgggccatttaccgtcattgacgtcaatagggggcgtacttggcatatgatacacttgatgtactgccaagtgggcagtttaccgtaaatactccacccattgacgtcaatggaaagtccctattggcgttactatgggaacatacgtcattattgacgtcaatgggcgggggtcgttgggcggtcagccaggcgggccatttaccgtaagttatgtaacgcggaactccatatatgggctatgaactaatgaccccgtaattgattactattaaattcctgcagttcaggttatttagatgcttagtttttgtacctttcttgttttgtttaggattttgatagtgttagtatttttatatttttgtacgattgcataatgttcttttttatacagttctgttttaataaaatagacgatagctagagacgttagggcagccacaagccagttaggtagcggatagtaggtaggaacagacttttactatttcataacgcgtcaattaccacctgatttggaccaattcacgggatttgtccaaggtggacgggccacctttacttaacccggaaaaggaacatatataatttatgtgtgttcgataaatagccaaatgcctcgtcatcaccggtaaaaaaaaaaaaaaaaaaaaaaaaaaaaaaacgttgactaaaaaaaaaaaaaaaaaaaaaaaaaaaaaaaaaaaaaaaaaaaaaaaaaaaaaaaaaaaaaaaaaaaaaa

SEQ ID NO: 615 - DNA, 2790 bp, synthetic construct
  source 1..2790: mol_type = other DNA
gagtaactatgactctcttaagtctagttacaactgggcatcgctgcagagatcgcacctcctcgtggtcccgctggtagcccttcgaagggtgactaagtcgatctctgccccaggtacggagccgttgggactcaccagtccaacgtaagtctagttacaactgggcatcgctgcagagatcgcacctcctcgtggtcccgctggtagcccttcgaagggtgactaagtcgatctctgccccaggtacggagccgttgggactcaccagtccaacgtaagtctagttacaactgggcatcgctgcagagatcgcacctcctcgtggtcccgctggtagcccttcgaagggtgactaagtcgatctctgccccaggtacggagccgttgggactcaccagtccaacgtaatactcgacggatcgatccgaacaaacgacccaacacccgtgcgttttattctgtctttttattgccgatcccctcagaagaactcgtcaagaaggcgatagaaggcgatgcgctgcgaatcgggagcggcgataccgtaaagcacgaggaagcggtcagcccattcgccgccaagctcttcagcaatatcacgggtagccaacgctatgtcctgatagcggtcggccgctttacttgtacagctcgtccatgccgagagtgatcccggcggcggtcacgaactccagcaggaccatgtgatcgcgcttctcgttggggtctttgctcagggcggactgggtgctcaggtagtggttgtcgggcagcagcacggggccgtcgccgatgggggtgttctgctggtagtggtcggccagctgcacgctgccgtcctcgatgttgtggcggatcttgaagttcaccttgatgccgttcttctgcttgtcggccatgatatagacgttgtggctgttgtagttgtactccagcttgtgccccaggatgttgccgtcctccttgaagtcgatgcccttcagctcgatgcggttcaccagggtgtcgccctcgaacttcacctcggcgcgggtcttgtagttgccgtcgtccttgaagaagatggtgcgctcctggacgtagccttcgggcatggcggacttgaagaagtcgtgctgcttcatgtggtcggggtagcggctgaagcactgcacgccgtaggtcagggtggtcacgagggtgggccagggcacgggcagcttgccggtggtgcagatgaacttcagggtcagcttgccgtaggtggcatcgccctcgccctcgccggacacgctgaacttgtggccgtttacgtcgccgtccagctcgaccaggatgggcaccaccccggtgaacagctcctcgcccttgctcaccatggtggcgaattcgaagcttgagctcgagatctgagtccggtagcgctagcggatctgacggttcactaaaccagctctgcttatatagacctcccaccgtacacgcctaccgcccatttgcgtcaatggggcggagttgttacgacattttggaaagtcccgttgattttggtgccaaaacaaactcccattgacgtcaatggggtggagacttggaaatccccgtgagtcaaaccgctatccacgcccattgatgtactgccaaaaccgcatcaccatggtaatagcgatgactaatacgtagatgtactgccaagtaggaaagtcccataaggtcatgtactgggcataatgccaggcgggccatttaccgtcattgacgtcaatagggggcgtacttggcatatgatacacttgatgtactgccaagtgggcagtttaccgtaaatactccacccattgacgtcaatggaaagtccctattggcgttactatgggaacatacgtcattattgacgtcaatgggcgggggtcgttgggcggtcagccaggcgggccatttaccgtaagttatgtaacgcggaactccatatatgggctatgaactaatgaccccgtaattgattactattaaattcctgcagttcaggttatttagatgcttagtttttgtacctttcttgttttgtttaggattttgatagtgttagtatttttatatttttgtacgattgcataatgttcttttttatacagttctgttttaataaaatagacgatagctagagacgttagggcagccacaagccagttaggtagcggatagtaggtaggaacagacttttactatttcataacgcgtcaattaccacctgatttggaccaattcacgggatttgtccaaggtggacgggccacctttacttaacccggaaaaggaacatatataatttatgtgtgttcgataaattcaggttatttagatgcttagtttttgtacctttcttgttttgtttaggattttgatagtgttagtatttttatatttttgtacgattgcataatgttcttttttatacagttctgttttaataaaatagacgatagctagagacgttagggcagccacaagccagttaggtagcggatagtaggtaggaacagacttttactatttcataacgcgtcaattaccacctgatttggaccaattcacgggatttgtccaaggtggacgggccacctttacttaacccggaaaaggaacatatataatttatgtgtgttcgataaatagccaaatgcctcgtcatcaccggtaaaaaaaaaaaaaaaaaaaaaaaaaaaaaaacgttgactaaaaaaaaaaaaaaaaaaaaaaaaaaaaaaaaaaaaaaaaaaaaaaaaaaaaaaaaaaaaaaaaaaaaaa

SEQ ID NO: 616 - DNA, 3115 bp, synthetic construct
  source 1..3115: mol_type = other DNA
gagtaactatgactctcttaagtctagttacaactgggcatcgctgcagagatcgcacctcctcgtggtcccgctggtagcccttcgaagggtgactaagtcgatctctgccccaggtacggagccgttgggactcaccagtccaacgtaagtctagttacaactgggcatcgctgcagagatcgcacctcctcgtggtcccgctggtagcccttcgaagggtgactaagtcgatctctgccccaggtacggagccgttgggactcaccagtccaacgtaagtctagttacaactgggcatcgctgcagagatcgcacctcctcgtggtcccgctggtagcccttcgaagggtgactaagtcgatctctgccccaggtacggagccgttgggactcaccagtccaacgtaatactcgacggatcgatccgaacaaacgacccaacacccgtgcgttttattctgtctttttattgccgatcccctcagaagaactcgtcaagaaggcgatagaaggcgatgcgctgcgaatcgggagcggcgataccgtaaagcacgaggaagcggtcagcccattcgccgccaagctcttcagcaatatcacgggtagccaacgctatgtcctgatagcggtcggccgctttacttgtacagctcgtccatgccgagagtgatcccggcggcggtcacgaactccagcaggaccatgtgatcgcgcttctcgttggggtctttgctcagggcggactgggtgctcaggtagtggttgtcgggcagcagcacggggccgtcgccgatgggggtgttctgctggtagtggtcggccagctgcacgctgccgtcctcgatgttgtggcggatcttgaagttcaccttgatgccgttcttctgcttgtcggccatgatatagacgttgtggctgttgtagttgtactccagcttgtgccccaggatgttgccgtcctccttgaagtcgatgcccttcagctcgatgcggttcaccagggtgtcgccctcgaacttcacctcggcgcgggtcttgtagttgccgtcgtccttgaagaagatggtgcgctcctggacgtagccttcgggcatggcggacttgaagaagtcgtgctgcttcatgtggtcggggtagcggctgaagcactgcacgccgtaggtcagggtggtcacgagggtgggccagggcacgggcagcttgccggtggtgcagatgaacttcagggtcagcttgccgtaggtggcatcgccctcgccctcgccggacacgctgaacttgtggccgtttacgtcgccgtccagctcgaccaggatgggcaccaccccggtgaacagctcctcgcccttgctcaccatggtggcgaattcgaagcttgagctcgagatctgagtccggtagcgctagcggatctgacggttcactaaaccagctctgcttatatagacctcccaccgtacacgcctaccgcccatttgcgtcaatggggcggagttgttacgacattttggaaagtcccgttgattttggtgccaaaacaaactcccattgacgtcaatggggtggagacttggaaatccccgtgagtcaaaccgctatccacgcccattgatgtactgccaaaaccgcatcaccatggtaatagcgatgactaatacgtagatgtactgccaagtaggaaagtcccataaggtcatgtactgggcataatgccaggcgggccatttaccgtcattgacgtcaatagggggcgtacttggcatatgatacacttgatgtactgccaagtgggcagtttaccgtaaatactccacccattgacgtcaatggaaagtccctattggcgttactatgggaacatacgtcattattgacgtcaatgggcgggggtcgttgggcggtcagccaggcgggccatttaccgtaagttatgtaacgcggaactccatatatgggctatgaactaatgaccccgtaattgattactattaaattcctgcagttcaggttatttagatgcttagtttttgtacctttcttgttttgtttaggattttgatagtgttagtatttttatatttttgtacgattgcataatgttcttttttatacagttctgttttaataaaatagacgatagctagagacgttagggcagccacaagccagttaggtagcggatagtaggtaggaacagacttttactatttcataacgcgtcaattaccacctgatttggaccaattcacgggatttgtccaaggtggacgggccacctttacttaacccggaaaaggaacatatataatttatgtgtgttcgataaattcaggttatttagatgcttagtttttgtacctttcttgttttgtttaggattttgatagtgttagtatttttatatttttgtacgattgcataatgttcttttttatacagttctgttttaataaaatagacgatagctagagacgttagggcagccacaagccagttaggtagcggatagtaggtaggaacagacttttactatttcataacgcgtcaattaccacctgatttggaccaattcacgggatttgtccaaggtggacgggccacctttacttaacccggaaaaggaacatatataatttatgtgtgttcgataaattcaggttatttagatgcttagtttttgtacctttcttgttttgtttaggattttgatagtgttagtatttttatatttttgtacgattgcataatgttcttttttatacagttctgttttaataaaatagacgatagctagagacgttagggcagccacaagccagttaggtagcggatagtaggtaggaacagacttttactatttcataacgcgtcaattaccacctgatttggaccaattcacgggatttgtccaaggtggacgggccacctttacttaacccggaaaaggaacatatataatttatgtgtgttcgataaatagccaaatgcctcgtcatcaccggtaaaaaaaaaaaaaaaaaaaaaaaaaaaaaaacgttgactaaaaaaaaaaaaaaaaaaaaaaaaaaaaaaaaaaaaaaaaaaaaaaaaaaaaaaaaaaaaaaaaaaaaaa

SEQ ID NO: 617 - DNA, 2250 bp, synthetic construct
  source 1..2250: mol_type = other DNA
ggaaataagagagaaaagaagagtaagaagaaatataagagaattcagtaactatgactctcttaagtctagttacaactgggcatcgctgcagagatcgcacctcctcgtggtcccgctggtagcccttcgaagggtgactaagtcgatctctgccccaggtacggagccgttgggactcaccagtccaacgtaatactcgacggatcgatccgaacaaacgacccaacacccgtgcgttttattctgtctttttattgccgatcccctcagaagaactcgtcaagaaggcgatagaaggcgatgcgctgcgaatcgggagcggcgataccgtaaagcacgaggaagcggtcagcccattcgccgccaagctcttcagcaatatcacgggtagccaacgctatgtcctgatagcggtcggccgctttacttgtacagctcgtccatgccgagagtgatcccggcggcggtcacgaactccagcaggaccatgtgatcgcgcttctcgttggggtctttgctcagggcggactgggtgctcaggtagtggttgtcgggcagcagcacggggccgtcgccgatgggggtgttctgctggtagtggtcggccagctgcacgctgccgtcctcgatgttgtggcggatcttgaagttcaccttgatgccgttcttctgcttgtcggccatgatatagacgttgtggctgttgtagttgtactccagcttgtgccccaggatgttgccgtcctccttgaagtcgatgcccttcagctcgatgcggttcaccagggtgtcgccctcgaacttcacctcggcgcgggtcttgtagttgccgtcgtccttgaagaagatggtgcgctcctggacgtagccttcgggcatggcggacttgaagaagtcgtgctgcttcatgtggtcggggtagcggctgaagcactgcacgccgtaggtcagggtggtcacgagggtgggccagggcacgggcagcttgccggtggtgcagatgaacttcagggtcagcttgccgtaggtggcatcgccctcgccctcgccggacacgctgaacttgtggccgtttacgtcgccgtccagctcgaccaggatgggcaccaccccggtgaacagctcctcgcccttgctcaccatggtggcgaattcgaagcttgagctcgagatctgagtccggtagcgctagcggatctgacggttcactaaaccagctctgcttatatagacctcccaccgtacacgcctaccgcccatttgcgtcaatggggcggagttgttacgacattttggaaagtcccgttgattttggtgccaaaacaaactcccattgacgtcaatggggtggagacttggaaatccccgtgagtcaaaccgctatccacgcccattgatgtactgccaaaaccgcatcaccatggtaatagcgatgactaatacgtagatgtactgccaagtaggaaagtcccataaggtcatgtactgggcataatgccaggcgggccatttaccgtcattgacgtcaatagggggcgtacttggcatatgatacacttgatgtactgccaagtgggcagtttaccgtaaatactccacccattgacgtcaatggaaagtccctattggcgttactatgggaacatacgtcattattgacgtcaatgggcgggggtcgttgggcggtcagccaggcgggccatttaccgtaagttatgtaacgcggaactccatatatgggctatgaactaatgaccccgtaattgattactattaaattcctgcagttcaggttatttagatgcttagtttttgtacctttcttgttttgtttaggattttgatagtgttagtatttttatatttttgtacgattgcataatgttcttttttatacagttctgttttaataaaatagacgatagctagagacgttagggcagccacaagccagttaggtagcggatagtaggtaggaacagacttttactatttcataacgcgtcaattaccacctgatttggaccaattcacgggatttgtccaaggtggacgggccacctttacttaacccggaaaaggaacatatataatttatgtgtgttcgataaatagccaaatgcctcgtcatcaccggtaaaaaaaaaaaaaaaaaaaaaaaaaaaaaaacgttgactaaaaaaaaaaaaaaaaaaaaaaaaaaaaaaaaaaaaaaaaaaaaaaaaaaaaaaaaaaaaaaaaaaaaaa

SEQ ID NO: 618 - protein, 1405 aa, synthetic construct
MAPKKKRKVVTVKFKYKGEEKEVDISKIKKVWRVGKMISFTYDDNGKTGRGAVSEKDAPKELLQMLEKSGSETPGTSESATPESPKRKVSSAEGAAKEEPKRRSARLSAKPPAKVEAKPKKAAAKDKSSDKKVQTKGKRGAKGKQAEVANQETKEDLPAENGETKTEESPASDEAGEKEAKSDSGSETPGTSESATPESLFVPEEGSSEKESEDAPKTSPPTPGKHGLEQTGEEKVMVTVPDKNPPCPCCGTRVNSVLNLIEHLKVSHGKRGVCFRCAKCGKENSNYHSVVCHFPKCRGPETEKAPAGEWICEVCNRDFTTKIGLGQHKRLAHPAVRNQERIVASQPKETSNRGAHKRCWTKEEEELLIRLEAQFEGNKNINKLIAEHITTKTAKQISDKRRLLSRKPAEEPREEPGTCHHTRRAAASLRTEPEMSHHAQAEDRDNGPGRRPLPGRAAAGGRTMDEIRRHPDKGNGQQRPTKQKSEEQLQAYYKKTLEERLSAGALNTFPRAFKQVMEGRDIKLVINQTAQDCFGCLESISQIRTATRDKKDTVTREKHPKKPFQKWMKDRAIKKGNYLRFQRLFYLDRGKLAKIILDDIECLSCDIPLSEIYSVFKTRWETTGSFKSLGDFKTYGKADNTAFRELITAKEIEKNVQEMSKGSAPGPDGITLGDVVKMDPEFSRTMEIFNLWLTTGKIPDMVRGCRTVLIPKSSKPDRLKDINNWRPITIGSILLRLFSRIVTARLSKACPLNPRQRGFIRAAGCSENLKLLQTIIWSAKREHRPLGVVFVDIAKAFDTVSHQHIIHALQQREVDPHIVGLVSNMYENISTYITTKRNTHTDKIQIRVGVKQGDPMSPLLFNLAMDPLLCKLEESGKGYHRGQSSITAMAFADDLVLLSDSWENMNTNISILETFCNLTGLKTQGQKCHGFYIKPTKDSYTINDCAAWTINGTPLNMIDPGESEKYLGLQFDPWIGIARSGLSTKLDFWLQRIDQAPLKPLQKTDILKTYTIPRLIYIADHSEVKTALLETLDQKIRTAVKEWLHLPPCTCDAILYSSTRDGGLGITKLAGLIPSVQARRLHRIAQSSDDTMKCFMEKEKMEQLHKKLWIQAGGDRENIPSIWEAPPSSEPPNNVSTNSEWEAPTQKDKFPKPCNWRKNEFKKWTKLASQGRGIVNFERDKISNHWIQYYRRIPHRKLLTALQLRANVYPTREFLARGRQDQYIKACRHCDADIESCAHIIGNCPVTQDARIKRHNYICELLLEEAKKKDWVVFKEPHIRDSNKELYKPDLIFVKDARALVVDVTVRYEAAKSSLEEAAAEKVRKYKHLETEVRHLTNAKDVTFVGFPLGARGKWHQDNFKLLTELGLSKSRQVKMAETFSTVALFSSVDIVHMFASRARKSMVM

SEQ ID NO: 619 - protein, 1642 aa, synthetic construct
MAPKKKRKVNISGSSCGSPNSADTSSDFKDLWTKLKECHDREVQGLQVKVTKLKQERILDAQRLEEFFTKNQQLREQQKVLHETIKVLEDRLRAGLCDRCAVTEEHMRKKQQEFENIRQQNLKLITELMNERNTLQEENKKLSEQLQQKIENDQQHQAAELECEEDVIPDSPITAFSFSGVNRLRRKENPHVRYIEQTHTKLEHSVCANEMRKVSKSSTHPQHNPNENEILVADTYDQSQSPMAKAHGTSSYTPDKSSFNLATVVAETLGLGVQEESETQGPMSPLGDELYHCLEGNHKKQPFESGSETPGTSESATPEGSPKRKVSSAEGAAKEEPKRRSARLSAKPPAKVEAKPKKAAAKDKSSDKKVQTKGKRGAKGKQAEVANQETKEDLPAENGETKTEESPASDEAGEKEAKSDSGSETPGTSESATPESLFVPEEGSSEKESEDAPKTSPPTPGKHGLEQTGEEKVMVTVPDKNPPCPCCGTRVNSVLNLIEHLKVSHGKRGVCFRCAKCGKENSNYHSVVCHFKKCRGPETEKAPAGEWICEVCNRDFTTKIGLGQHKRLAHPAVRNQERIVASQPKETSNRGAHKRCWTKEEEELLIRLEAQFEGNKNINKLIAEHITTKTAKQISDKRRLLSRKPAEEPRMEPGTCHHTRRAAASLRTEPEMSHHAQAEDRDNGPGRRPLPGRAAAGGRTMDEIRRHPDKGNGQQRPTKQKSEEQLQAYYKKTLEERLSAGALNTFPRAFKQVMEGRDIKLVINQTAQDCFGCLESISQIRTATRDKKDTVTREKHPKKPFQKWMKKRAIKKGNYLRFQRLFYLDRGKLAKIILDDIECLSCDIPLSEIYSVFKTRWETTGSFKSLGDFKTYGKADNTAFRELITAKEIEKNVQEMSKGSAPGPDGITLGDVVKMDPEFSRTMEIFNLWLTTGKIPDMVRGCRTVLIPKSSKPDRLKDINNWRPITIGSILLRLFSRIVTARLSKACPLNPRQRGFIRAAGCSENLKLLQTIIWSAKREHRPLGVVFVDIAKAFDTVSHQHIIHALQQREVDPHIVGLVSNMYENISTYITTKRNTHTDKIQIRVGVKQGDPMSPLLFNLAMDPLLCKLEESGKGYHRGQSSITAMAFADDLVLLSDSWENMNTNISILETFCNLTGLKTQGQKCHGFYIKPTKKSYTINDCAAWTINGTPLNMIDPGESEKYLGLQFDPWIGIARSGLSTKLDFWLQRIDQAPLKPLQKTDILKTYTIPRLIYIADHSEVKSALLETLDQKIRTAVKEWLHLPPCTCDAILYSSTRDGGLGITKLAGLIPSVQARRLHRIAQSSDDTMKCFMEKEKMEQLHKKLWIQAGGDRENIPSIWEAPPSSEPPNNVSTNSEWEAPTQKDKFPKPCNWRKNEFKKWTKLASQGRGIVNFERDKISNHWIQYYRRIPHRKLLTALQLRANVYPTREFLARGRQDQYIKACRHCDADNESCAHIIGNCPVTQDARIKRHNYICELLLEEAKKKDWVVFKEPHIRDSNKELYKPDLIFVKDGRALVVDVTVRYEAAKSSLEEAAAEKVRKYKHLETEVRHLTNAKDVTFVGFPLGARGKWHQDNFKLLTELGLSKSRQVKMAETFSTVALFSSVDIVHMFASRARKSMVM

SEQ ID NO: 620 - protein, 1740 aa, synthetic construct
MAPKKKRKVVTVKFKYKGEEKEVDISKIKKVWRVGKMISFTYDDNGKTGRGAVSEKDAPKELLQMLEKSGSETPGTSESATPESNISGSSCGSPNSADTSSDFKDLWTKLKECHDREVQGLQVKVTKLKQERILDAQRLEEFFTKNQQLREQQKVLHETIKVLEDRLRAGLCDRCAVTEEHMRKKQQEFENIRQQNLKLITELMNERNTLQEENKKLSEQLQQKIENDQQHQAAELECEEDVIPDSPITAFSFSGVNRLRRKENPHVRYIEQTHTKLEHSVCANEMRKVSKSSTHPQHNPNENEILVADTYDQSQSPMAKAHGTSSYTPDKSSFNLATVVAETLGLGVQEESETQGPMSPLGDELYHCLEGNHKKQPFESGSETPGTSESATPEGSPKRKVSSAEGAAKEEPKRRSARLSAKPPAKVEAKPKKAAAKDKSSDKKVQTKGKRGAKGKQAEVANQETKEDLPAENGETKTEESPASDEAGEKEAKSDSGSETPGTSESATPESYEQLAPQPCVGETLHSSLPRDSELFVPEEGSSEKESEDAPKTSPPTPGKHGLEQTGEEKVMVTVPDKNPPCPCCGTRVNSVLNLIEHLKVSHGKRGVCFRCAKCGKENSNYHSVVCHFKKCRGPETEKAPAGEWICEVCNRDFTTKIGLGQHKRLAHPAVRNQERIVASQPKETSNRGAHKRCWTKEEEELLIRLEAQFEGNKNINKLIAEHITTKTAKQISDKRRLLSRKPAEEPREEPGTCHHTRRAAASLRTEPEMSHHAQAEDRDNGPGRRPLPGRAAAGGRTMDEIRRHPDKGNGQQRPTKQKSEEQLQAYYKKTLEERLSAGALNTFPRAFKQVMEGRDIKLVINQTAQDCFGCLESISQIRTATRDKKDTVTREKHPKKPFQKWMKKRAIKKGNYLRFQRLFYLDRGKLAKIILDDIECLSCDIPLSEIYSVFKTRWETTGSFKSLGDFKTYGKADNTAFRELITAKEIEKNVQEMSKGSAPGPDGITLGDVVKMDPEFSRTMEIFNLWLTTGKIPDMVRGCRTVLIPKSSKPDRLKDINNWRPITIGSILLRLFSRIVTARLSKACPLNPRQRGFIRAAGCSENLKLLQTIIWSAKREHRPLGVVFVDIAKAFDTVSHQHIIHALQQREVDPHIVGLVSNMYENISTYITTKRNTHTDKIQIRVGVKQGDPMSPLLFNLAMDPLLCKLEESGKGYHRGQSSITAMAFADDLVLLSDSWENMNTNISILETFCNLTGLKTQGQKCHGFYIKPTKDSYTINDCAAWTINGTPLNMIDPGESEKYLGLQFDPWIGIARSGLSTKLDFWLQRIDQAPLKPLQKTDILKTYTIPRLIYIADHSEVKSALLETLDQKIRTAVKEWLHLPPCTCDAILYSSTRDGGLGITKLAGLIPSVQARRLHRIAQSSDDTMKCFMEKEKMEQLHKKLWIQAGGDRENIPSIWEAPPSSEPPNNVSTNSEWEAPTQKDKFPKPCNWRKNEFKKWTKLASQGRGIVNFERDKISNHWIQYYRRIPHRKLLTALQLRANVYPTREFLARGRQDQYIKACRHCDADNESCAHIIGNCPVTQDARIKRHNYICELLLEEAKKKDWVVFKEPHIRDSNKELYKPDLIFVKDGRALVVDVTVRYEAAKSSLEEAAAEKVRKYKHLETEVRHLTNAKDVTFVGFPLGARGKWHQDNFKLLTELGLSKSRQVKMAETFSTVALFSSVDIVHMFASRARKSMVM

SEQ ID NO: 621 - protein, 1740 aa, synthetic construct
MAPKKKRKVNISGSSCGSPNSADTSSDFKDLWTKLKECHDREVQGLQVKVTKLKQERILDAQRLEEFFTKNQQLREQQKVLHETIKVLEDRLRAGLCDRCAVTEEHMRKKQQEFENIRQQNLKLITELMNERNTLQEENKKLSEQLQQKIENDQQHQAAELECEEDVIPDSPITAFSFSGVNRLRRKENPHVRYIEQTHTKLEHSVCANEMRKVSKSSTHPQHNPNENEILVADTYDQSQSPMAKAHGTSSYTPDKSSFNLATVVAETLGLGVQEESETQGPMSPLGDELYHCLEGNHKKQPFESGSETPGTSESATPEGSVTVKFKYKGEEKEVDISKIKKVWRVGKMISFTYDDNGKTGRGAVSEKDAPKELLQMLEKSGSETPGTSESATPESPKRKVSSAEGAAKEEPKRRSARLSAKPPAKVEAKPKKAAAKDKSSDKKVQTKGKRGAKGKQAEVANQETKEDLPAENGETKTEESPASDEAGEKEAKSDSGSETPGTSESATPESYEQLAPQPCVGETLHSSLPRDSELFVPEEGSSEKESEDAPKTSPPTPGKHGLEQTGEEKVMVTVPDKNPPCPCCGTRVNSVLNLIEHLKVSHGKRGVCFRCAKCGKENSNYHSVVCHFKKCRGPETEKAPAGEWICEVCNRDFTTKIGLGQHKRLAHPAVRNQERIVASQPKETSNRGAHKRCWTKEEEELLIRLEAQFEGNKNINKLIAEHITTKTAKQISDKRRLLSRKPAEEPREEPGTCHHTRRAAASLRTEPEMSHHAQAEDRDNGPGRRPLPGRAAAGGRTMDEIRRHPDKGNGQQRPTKQKSEEQLQAYYKKTLEERLSAGALNTFPRAFKQVMEGRDIKLVINQTAQDCFGCLESISQIRTATRDKKDTVTREKHPKKPFQKWMKKRAIKKGNYLRFQRLFYLDRGKLAKIILDDIECLSCDIPLSEIYSVFKTRWETTGSFKSLGDFKTYGKADNTAFRELITAKEIEKNVQEMSKGSAPGPDGITLGDVVKMDPEFSRTMEIFNLWLTTGKIPDMVRGCRTVLIPKSSKPDRLKDINNWRPITIGSILLRLFSRIVTARLSKACPLNPRQRGFIRAAGCSENLKLLQTIIWSAKREHRPLGVVFVDIAKAFDTVSHQHIIHALQQREVDPHIVGLVSNMYENISTYITTKRNTHTDKIQIRVGVKQGDPMSPLLFNLAMDPLLCKLEESGKGYHRGQSSITAMAFADDLVLLSDSWENMNTNISILETFCNLTGLKTQGQKCHGFYIKPTKDSYTINDCAAWTINGTPLNMIDPGESEKYLGLQFDPWIGIARSGLSTKLDFWLQRIDQAPLKPLQKTDILKTYTIPRLIYIADHSEVKSALLETLDQKIRTAVKEWLHLPPCTCDAILYSSTRDGGLGITKLAGLIPSVQARRLHRIAQSSDDTMKCFMEKEKMEQLHKKLWIQAGGDRENIPSIWEAPPSSEPPNNVSTNSEWEAPTQKDKFPKPCNWRKNEFKKWTKLASQGRGIVNFERDKISNHWIQYYRRIPHRKLLTALQLRANVYPTREFLARGRQDQYIKACRHCDADNESCAHIIGNCPVTQDARIKRHNYICELLLEEAKKKDWVVFKEPHIRDSNKELYKPDLIFVKDGRALVVDVTVRYEAAKSSLEEAAAEKVRKYKHLETEVRHLTNAKDVTFVGFPLGARGKWHQDNFKLLTELGLSKSRQVKMAETFSTVALFSSVDIVHMFASRARKSMVM

SEQ ID NO: 622 - protein, 1740 aa, synthetic construct
MAPKKKRKVNISGSSCGSPNSADTSSDFKDLWTKLKECHDREVQGLQVKVTKLKQERILDAQRLEEFFTKNQQLREQQKVLHETIKVLEDRLRAGLCDRCAVTEEHMRKKQQEFENIRQQNLKLITELMNERNTLQEENKKLSEQLQQKIENDQQHQAAELECEEDVIPDSPITAFSFSGVNRLRRKENPHVRYIEQTHTKLEHSVCANEMRKVSKSSTHPQHNPNENEILVADTYDQSQSPMAKAHGTSSYTPDKSSFNLATVVAETLGLGVQEESETQGPMSPLGDELYHCLEGNHKKQPFESGSETPGTSESATPEGSPKRKVSSAEGAAKEEPKRRSARLSAKPPAKVEAKPKKAAAKDKSSDKKVQTKGKRGAKGKQAEVANQETKEDLPAENGETKTEESPASDEAGEKEAKSDSGSETPGTSESATPESVTVKFKYKGEEKEVDISKIKKVWRVGKMISFTYDDNGKTGRGAVSEKDAPKELLQMLEKSGSETPGTSESATPESYEQLAPQPCVGETLHSSLPRDSELFVPEEGSSEKESEDAPKTSPPTPGKHGLEQTGEEKVMVTVPDKNPPCPCCGTRVNSVLNLIEHLKVSHGKRGVCFRCAKCGKENSNYHSVVCHFKKCRGPETEKAPAGEWICEVCNRDFTTKIGLGQHKRLAHPAVRNQERIVASQPKETSNRGAHKRCWTKEEEELLIRLEAQFEGNKNINKLIAEHITTKTAKQISDKRRLLSRKPAEEPREEPGTCHHTRRAAASLRTEPEMSHHAQAEDRDNGPGRRPLPGRAAAGGRTMDEIRRHPDKGNGQQRPTKQKSEEQLQAYYKKTLEERLSAGALNTFPRAFKQVMEGRDIKLVINQTAQDCFGCLESISQIRTATRDKKDTVTREKHPKKPFQKWMKKRAIKKGNYLRFQRLFYLDRGKLAKIILDDIECLSCDIPLSEIYSVFKTRWETTGSFKSLGDFKTYGKADNTAFRELITAKEIEKNVQEMSKGSAPGPDGITLGDVVKMDPEFSRTMEIFNLWLTTGKIPDMVRGCRTVLIPKSSKPDRLKDINNWRPITIGSILLRLFSRIVTARLSKACPLNPRQRGFIRAAGCSENLKLLQTIIWSAKREHRPLGVVFVDIAKAFDTVSHQHIIHALQQREVDPHIVGLVSNMYENISTYITTKRNTHTDKIQIRVGVKQGDPMSPLLFNLAMDPLLCKLEESGKGYHRGQSSITAMAFADDLVLLSDSWENMNTNISILETFCNLTGLKTQGQKCHGFYIKPTKDSYTINDCAAWTINGTPLNMIDPGESEKYLGLQFDPWIGIARSGLSTKLDFWLQRIDQAPLKPLQKTDILKTYTIPRLIYIADHSEVKSALLETLDQKIRTAVKEWLHLPPCTCDAILYSSTRDGGLGITKLAGLIPSVQARRLHRIAQSSDDTMKCFMEKEKMEQLHKKLWIQAGGDRENIPSIWEAPPSSEPPNNVSTNSEWEAPTQKDKFPKPCNWRKNEFKKWTKLASQGRGIVNFERDKISNHWIQYYRRIPHRKLLTALQLRANVYPTREFLARGRQDQYIKACRHCDADNESCAHIIGNCPVTQDARIKRHNYICELLLEEAKKKDWVVFKEPHIRDSNKELYKPDLIFVKDGRALVVDVTVRYEAAKSSLEEAAAEKVRKYKHLETEVRHLTNAKDVTFVGFPLGARGKWHQDNFKLLTELGLSKSRQVKMAETFSTVALFSSVDIVHMFASRARKSMVM

SEQ ID NO: 623 - protein, 1405 aa, synthetic construct
MAPKKKRKVVTVKFKYKGEEKEVDISKIKKVWRVGKMISFTYDDNGKTGRGAVSEKDAPKELLQMLEKSGSETPGTSESATPESPKRKVSSAEGAAKEEPKRRSARLSAKPPAKVEAKPKKAAAKDKSSDKKVQTKGKRGAKGKQAEVANQETKEDLPAENGETKTEESPASDEAGEKEAKSDSGSETPGTSESATPESLFVPEEGSSEKESEDAPKTSPPTPGKHGLEQTGEEKVMVTVPDKNPPCPCCGTRVNSVLNLIEHLKVSHGKRGVCFRCAKCGKENSNYHSVVCHFKKCRGPETEKAPAGEWICEVCNRDFTTKIGLGQHKRLAHPAVRNQERIVASQPKETSNRGAHKRCWTKEEEELLIRLEAQFEGNKNINKLIAEHITTKTAKQISDKRRLLSRKPAEEPREEPGTCHHTRRAAASLRTEPEMSHHAQAEDRDNGPGRRPLPGRAAAGGRTMDEIRRHPDKGNGQQRPTKQKSEEQLQAYYKKTLEERLSAGALNTFPRAFKQVMEGRDIKLVINQTAQDYFGCLESISQIRTATRDKKDTVTREKHPKKPFQKWMKKRAIKKGNYLRFQRLFYLDRGKLAKIILDDIECLSCDIPLSEIYSVFKTRWETTGSFKSLGDFKTYGKADNTAFRELITAKEIEKNVQEMSKGSAPGPDGITLGDVVKMDPEFSRTMEIFNLWLTTGKIPDMVRGCRTVLIPKSSDPDRLKDINNWRPITIGSILLRLFSRIVTARLSKACPLNPRQRGFIRAAGCSENLKLLQTIIWSAKREHRPLGVVFVDIAKAFDTVSHQHIIHALQQREVDPHIVGLVSNMYENISTYITTKRNTHTDKIQIRVGVKQGDPMSPLLFNLAMDPLLCKLEESGKGYHRGQSSITAMAFADDLVLLSDSWENMNTNISILETFCNLTGLKTQGQKCHGFYIKPTKDSYTINDCAAWTINGTPLNMIDPGESEKYLGLQFDPWIGIARSGLSTKLDFWLQRIDQAPLKPLQKLDILKTYTIPRLIYIADHSEVKSALLETLDQKIRTAVKEWLHLPPCTCDAILYSSTRDGGLGITKLAGLIPSVQARRLHRIAQSSDDTMKCFMEKEKMEQLHKKLWIQAGGDRENIPSIWEAPPSSEPPNNVSTNSEWEAPTQKDKFPKPCNWRKNEFKKWTKLASQGRGIVNFERDKISNHWIQYYRRIPHRKLLTALQLRANVYPTREFLARGRQDQYIKACRHCDADNESCAHIIGNCPVTQDARIKRHNYICELLLEEAKKKDWVVFKEPHIRDSNKELYKPDLIFVKDGRALVVDVTVRYEAAKSSLEEAAAEKVRKYKHLETEVRHLTNAKDVTFVGFPLGARGKWHQDNFKLLTELGLSKSRQVKMAETFSTVALFSSVDIVHMFASRARKSMVM

SEQ ID NO: 624 - protein, 1625 aa, synthetic construct
MAPKKKRKVVTVKFKYKGEEKEVDISKIKKVWRVGKMISFTYDDNGKTGRGAVSEKDAPKELLQMLEKSGSETPGTSESATPESNISGSSCGSPNSADTSSDFKDLWTKLKECHDREVQGLQVKVTKLKQERILDAQRLEEFFTKNQQLREQQKVLHETIKVLEDRLRAGLCDRCAVTEEHMRKKQQEFENIRQQNLKLITELMNERNTLQEENKKLSEQLQQKIENDQQHQAAELECEEDVIPDSPITAFSFSGVNRLRRKENPHVRYIEQTHTKLEHSVCANEMRKVSKSSTHPQHNPNENEILVADTYDQSQSPMAKAHGTSSYTPDKSSFNLATVVAETLGLGVQEESETQGPMSPLGDELYHCLEGNHKKQPFESGSETPGTSESATPEGSYEQLAPQPCVGETLHSSLPRDSELFVPEEGSSEKESEDAPKTSPPTPGKHGLEQTGEEKVMVTVPDKNPPCPCCGTRVNSVLNLIEHLKVSHGKRGVCFRCAKCGKENSNYHSVVCHFKKCRGPETEKAPAGEWICEVCNRDFTTKIGLGQHKRLAHPAVRNQERIVASQPKETSNRGAHKRCWTKEEEELLIRLEAQFEGNKNINKLIAEHITTKTAKQISDKRRLLSRKPAEEPREEPGTCHHTRRAAASLRTEPEMSHHAQAEDRDNGPGRRPLPGRAAAGGRTMDEIRRHPDKGNGQQRPTKQKSEEQLQAYYKKTLEERLSAGALNTFPRAFKQVMEGRDIKLVINQTAQDYFGCLESISQIRTATRDKKDTVTREKHPKKPFQKWMKKRAIKKGNYLRFQRLFYLDRGKLAKIILDDIECLSCDIPLSEIYSVFKTRWETTGSFKSLGDFKTYGKADNTAFRELITAKEIEKNVQEMSKGSAPGPDGITLGDVVKMDPEFSRTMEIFNLWLTTGKIPDMVRGCRTVLIPKSSDPDRLKDINNWRPITIGSILLRLFSRIVTARLSKACPLNPRQRGFIRAAGCSENLKLLQTIIWSAKREHRPLGVVFVDIAKAFDTVSHQHIIHALQQREVDPHIVGLVSNMYENISTYITTKRNTHTDKIQIRVGVKQGDPMSPLLFNLAMDPLLCKLEESGKGYHRGQSSITAMAFADDLVLLSDSWENMNTNISILETFCNLTGLKTQGQKCHGFYIKPTKDSYTINDCAAWTINGTPLNMIDPGESEKYLGLQFDPWIGIARSGLSTKLDFWLQRIDQAPLKPLQKLDILKTYTIPRLIYIADHSEVKSALLETLDQKIRTAVKEWLHLPPCTCDAILYSSTRDGGLGITKLAGLIPSVQARRLHRIAQSSDDTMKCFMEKEKMEQLHKKLWIQAGGDRENIPSIWEAPPSSEPPNNVSTNSEWEAPTQKDKFPKPCNWRKNEFKKWTKLASQGRGIVNFERDKISNHWIQYYRRIPHRKLLTALQLRANVYPTREFLARGRQDQYIKACRHCDADNESCAHIIGNCPVTQDARIKRHNYICELLLEEAKKKDWVVFKEPHIRDSNKELYKPDLIFVKDGRALVVDVTVRYEAAKSSLEEAAAEKVRKYKHLETEVRHLTNAKDVTFVGFPLGARGKWHQDNFKLLTELGLSKSRQVKMAETFSTVALFSSVDIVHMFASRARKSMVM

SEQ ID NO: 625 - protein, 1397 aa, synthetic construct
MPKRKVSSAEGAAKEEPKRRSARLSAKPPAKVEAKPKKAAAKDKSSDKKVQTKGKRGAKGKQAEVANQETKEDLPAENGETKTEESPASDEAGEKEAKSDSGSETPGTSESATPESVTVKFKYKGEEKEVDISKIKKVWRVGKMISFTYDDNGKTGRGAVSEKDAPKELLQMLEKSGSETPGTSESATPESLFVPEEGSSEKESEDAPKTSPPTPGKHGLEQTGEEKVMVTVPDKNPPCPCCGTRVNSVLNLIEHLKVSHGKRGVCFRCAKCGKENSNYHSVVCHFKKCRGPETEKAPAGEWICEVCNRDFTTKIGLGQHKRLAHPAVRNQERIVASQPKETSNRGAHKRCWTKEEEELLIRLEAQFEGNKNINKLIAEHITTKTAKQISDKRRLLSRKPAEEPREEPGTCHHTRRAAASLRTEPEMSHHAQAEDRDNGPGRRPLPGRAAAGGRTMDEIRRHPDKGNGQQRPTKQKSEEQLQAYYKKTLEERLSAGALNTFPRAFKQVMEGRDIKLVINQTAQDCFGCLESISQIRTATRDKKDTVTREKHPKKPFQKWMKKRAIKKGNYLRFQRLFYLDRGKLAKIILDDIECLSCDIPLSEIYSVFKTRWETTGSFKSLGDFKTYGKADNTAFRELITAKEIEKNVQEMSKGSAPGPDGITLGDVVKMDPEFSRTMEIFNLWLTTGKIPDMVRGCRTVLIPKSSDPDRLKDINNWRPITIGSILLRLFSRIVTARLSKACPLNPRQRGFIRAAGCSENLKLLQTIIWSAKREHRPLGVVFVDIAKAFDTVSHQHIIHALQQREVDPHIVGLVSNMYENISTYITTKRNTHTDKIQIRVGVKQGDPMSPLLFNLAMDPLLCKLEESGKGYHRGQSSITAMAFADDLVLLSDSWENMNTNISILETFCNLTGLKTQGQKCHGFYIKPTKDSYTINDCAAWTINGTPLNMIDPGESEKYLGLQFDPWIGIARSGLSTKLDFWLQRIDQAPLKPLQKTDILKTYTIPRLIYIADHSEVKSALLETLDQKIRTAVKEWLHLPPCTCDAILYSSTRDGGLGITKLAGLIPSVQARRLHRIAQSSDDTMKCFMEKEKMEQLHKKLWIQAGGDRENIPSIWEAPPSSEPPNNVSTNSEWEAPTQKDKFPKPCNWRKNEFKKWTKLASQGRGIVNFERDKISNHWIQYYRRIPHRKLLTALQLRANVYPTREFLARGRQDQYIKACRHCDADNESCAHIIGNCPVTQDARIKRHNYICELLLEEAKKKDWVVFKEPHIRDSNKELYKPDLIFVKDGRALVVDVTVRYEAAKSSLEEAAAEKVRKYKHLETEVRHLTNAKDVTFVGFPLGARGKWHQDNFKLLTELGLSKSRQVKMAETFSTVALFSSVDIVHMFASRARKSMVM

SEQ ID NO: 626 - protein, 1625 aa, synthetic construct
MAPKKKRKVVTVKFKYKGEEKEVDISKIKKVWRVGKMISFTYDDNGKTGRGAVSEKDAPKELLQMLEKSGSETPGTSESATPESNISGSSCGSPNSADTSSDFKDLWTKLKECHDREVQGLQVKVTKLKQERILDAQRLEEFFTKNQQLREQQKVLHETIKVLEDRLRAGLCDRCAVTEEHMRKKQQEFENIRQQNLKLITELMNERNTLQEENKKLSEQLQQKIENDQQHQAAELECEEDVIPDSPITAFSFSGVNRLRRKENPHVRYIEQTHTKLEHSVCANEMRKVSKSSTHPQHNPNENEILVADTYDQSQSPMAKAHGTSSYTPDKSSFNLATVVAETLGLGVQEESETQGPMSPLGDELYHCLEGNHKKQPFESGSETPGTSESATPEGSYEQLAPQPCVGETLHSSLPRDSELFVPEEGSSEKESEDAPKTSPPTPGKHGLEQTGEEKVMVTVPDKNPPCPCCGTRVNSVLNLIEHLKVSHGKRGVCFRCAKCGKENSNYHSVVCHFKKCRGPETEKAPAGEWICEVCNRDFTTKIGLGQHKRLAHPAVRNQERIVASQPKETSNRGAHKRCWTKEEEELLIRLEAQFEGNKNINKLIAEHITTKTAKQISDKRRLLSRKPAEEPREEPGTCHHTRRAAASLRTEPEMSHHAQAEDRDNGPGRRPLPGRAAAGGRTMDEIRRHPDKGNGQQRPTKQKSEEQLQAYYKKTLEERLSAGALNTFPRAFKQVMEGRDIKLVINQTAQDYFGCLESISQIRTATRDKKDTVTREKHPKKPFQKWMKKRAIKKGNYLRFQRLFYLDRGKLAKIILDDIECLSCDIPLSEIYSVFKTRWETTGSFKSLGDFKTYGKADNTAFRELITAKEIEKNVQEMSKGSAPGPDGITLGDVVKMDPEFSRTMEIFNLWLTTGKIPDMVRGCRTVLIPKSSDPDRLKDINNWRPITIGSILLRLFSRIVTARLSKACPLNPRQRGFIRAAGCSENLKLLQTIIWSAKREHRPLGVVFVDIAKAFDTVSHQHIIHALQQREVDPHIVGLVSNMYENISTYITTKRNTHTDKIQIRVGVKQGDPMSPLLFNLAMDPLLCKLEESGKGYHRGQSSITAMAFADDLVLLSDSWENMNTNISILETFCNLTGLKTQGQKCHGFYIKPTKDSYTINDCAAWTINGTPLNMIDPGESEKYLGLQFDPWIGIARSGLSTKLDFWLQRIDQAPLKPLQKTDILKTYTIPRLIYIADHSEVKSALLETLDQKIRTAVKEWLHLPPCTCDAILYSSTRDGGLGITKLAGLIPSVQARRLHRIAQSSDDTMKCFMEKEKMEQLHKKLWIQAGGDRENIPSIWEAPPSSEPPNNVSTNSEWEAPTQKDKFPKPCNWRKNEFKKWTKLASQGRGIVNFERDKISNHWIQYYRRIPHRKLLTALQLRANVYPTREFLARGRQDQYIKACRHCDADNESCAHIIGNCPVTQDARIKRHNYICELLLEEAKKKDWVVFKEPHIRDSNKELYKPDLIFVKDGRALVVDVTVRYEAAKSSLEEAAAEKVRKYKHLETEVRHLTNAKDVTFVGFPLGARGKWHQDNFKLLTELGLSKSRQVKMAETFSTVALFSSVDIVHMFASRARKSMVM

SEQ ID NO: 627 - protein, 1405 aa, synthetic construct
MAPKKKRKVVTVKFKYKGEEKEVDISKIKKVWRVGKMISFTYDDNGKTGRGAVSEKDAPKELLQMLEKSGSETPGTSESATPESPKRKVSSAEGAAKEEPKRRSARLSAKPPAKVEAKPKKAAAKDKSSDKKVQTKGKRGAKGKQAEVANQETKEDLPAENGETKTEESPASDEAGEKEAKSDSGSETPGTSESATPESLFVPEEGSSEKESEDAPKTSPPTPGKHGLEQTGEEKVMVTVPDKNPPCPCCGTRVNSVLNLIEHLKVSHGKRGVCFRCAKCGKENSNYHSVVCHFKKCRGPETEKAPAGEWICEVCNRDFTTKIGLGQHKRLAHPAVRNQERIVASQPKETSNRGAHKRCWTKEEEELLIRLEAQFEGNKNINKLIAEHITTKTAKQISDKRRLLSRKPAEEPREEPGTCHHTRRAAASLRTEPEMSHHAQAEDRDNGPGRRPLPGRAAAGGRTMDEIRRHPDKGNGQQRPTKQKSEEQLQAYYKKTLEERLSAGALNTFPRAFKQVMEGRDIKLVINQTAQDCFGCLESISQIRTATRDKKDTVTREKHPKKPFQKWMKKRAIKKGNYLRFQRLFYLDRGKLAKIILDDIECLSCDIPLSEIYSVFKTRWETTGSFKSLGDFKTYGKADNTAFRELITAKEIEKNVQEMSKGSAPGPDGITLGDVVKMDPEFSRTMEIFNLWLTTGKIPDMVRGCRTVLIPKSSDPDRLKDINNWRPITIGSILLRLFSRIVTARLSKACPLNPRQRGFIRAAGCSENLKLLQTIIWSAKREHRPLGVVFVDIAKAFDTVSHQHIIHALQQREVDPHIVGLVSNMYENISTYITTKRNTHTDKIQIRVGVKQGDPMSPLLFNLAMDPLLCKLEESGKGYHRGQSSITAMAFADDLVLLSDSWENMNTNISILETFCNLTGLKTQGQKCHGFYIKPTKDSYTINDCAAWTINGTPLNMIDPGESEKYLGLQFDPWIGIARSGLSTKLDFWLQRIDQAPLKPLQKTDILKTYTIPRLIYIADHSEVKSALLETLDQKIRTAVKEWLHLPPCTCDAILYSSTRDGGLGITKLAGLIPSVQARRLHRIAQSSDDTMKCFMEKEKMEQLHKKLWIQAGGDRENIPSIWEAPPSSEPPNNVSTNSEWEAPTQKDKFPKPCNWRKNEFKKWTKLASQGRGIVNFERDKISNHWIQYYRRIPHRKLLTALQLRANVYPTREFLARGRQDQYIKACRHCDADNESCAHIIGNCPVTQDARIKRHNYICELLLEEAKKKDWVVFKEPHIRDSNKELYKPDLIFVKDGRALVVDVTVRYEAAKSSLEEAAAEKVRKYKHLETEVRHLTNAKDVTFVGFPLGARGKWHQDNFKLLTELGLSKSRQVKMAETFSTVALFSSVDIVHMFASRARKSMVM

SEQ ID NO: 628 - protein, 1625 aa, synthetic construct
MAPKKKRKVNISGSSCGSPNSADTSSDFKDLWTKLKECHDREVQGLQVKVTKLKQERILDAQRLEEFFTKNQQLREQQKVLHETIKVLEDRLRAGLCDRCAVTEEHMRKKQQEFENIRQQNLKLITELMNERNTLQEENKKLSEQLQQKIENDQQHQAAELECEEDVIPDSPITAFSFSGVNRLRRKENPHVRYIEQTHTKLEHSVCANEMRKVSKSSTHPQHNPNENEILVADTYDQSQSPMAKAHGTSSYTPDKSSFNLATVVAETLGLGVQEESETQGPMSPLGDELYHCLEGNHKKQPFESGSETPGTSESATPEGSVTVKFKYKGEEKEVDISKIKKVWRVGKMISFTYDDNGKTGRGAVSEKDAPKELLQMLEKSGSETPGTSESATPESYEQLAPQPCVGETLHSSLPRDSELFVPEEGSSEKESEDAPKTSPPTPGKHGLEQTGEEKVMVTVPDKNPPCPCCGTRVNSVLNLIEHLKVSHGKRGVCFRCAKCGKENSNYHSVVCHFKKCRGPETEKAPAGEWICEVCNRDFTTKIGLGQHKRLAHPAVRNQERIVASQPKETSNRGAHKRCWTKEEEELLIRLEAQFEGNKNINKLIAEHITTKTAKQISDKRRLLSRKPAEEPREEPGTCHHTRRAAASLRTEPEMSHHAQAEDRDNGPGRRPLPGRAAAGGRTMDEIRRHPDKGNGQQRPTKQKSEEQLQAYYKKTLEERLSAGALNTFPRAFKQVMEGRDIKLVINQTAQDCFGCLESISQIRTATRDKKDTVTREKHPKKPFQKWMKKRAIKKGNYLRFQRLFYLDRGKLAKIILDDIECLSCDIPLSEIYSVFKTRWETTGSFKSLGDFKTYGKADNTAFRELITAKEIEKNVQEMSKGSAPGPDGITLGDVVKMDPEFSRTMEIFNLWLTTGKIPDMVRGCRTVLIPKSSKPDRLKDINNWRPITIGSILLRLFSRIVTARLSKACPLNPRQRGFIRAAGCSENLKLLQTIIWSAKREHRPLGVVFVDIAKAFDTVSHQHIIHALQQREVDPHIVGLVSNMYENISTYITTKRNTHTDKIQIRVGVKQGDPMSPLLFNLAMDPLLCKLEESGKGYHRGQSSITAMAFADDLVLLSDSWENMNTNISILETFCNLTGLKTQGQKCHGFYIKPTKKSYTINDCAAWTINGTPLNMIDPGESEKYLGLQFDPWIGIARSGLSTKLDFWLQRIDQAPLKPLQKTDILKTYTIPRLIYIADHSEVKSALLETLDQKIRTAVKEWLHLPPCTCDAILYSSTRDGGLGITKLAGLIPSVQARRLHRIAQSSDDTMKCFMEKEKMEQLHKKLWIQAGGDRENIPSIWEAPPSSEPPNNVSTNSEWEAPTQKDKFPKPCNWRKNEFKKWTKLASQGRGIVNFERDKISNHWIQYYRRIPHRKLLTALQLRANVYPTREFLARGRQDQYIKACRHCDADNESCAHIIGNCPVTQDARIKRHNYICELLLEEAKKKDWVVFKEPHIRDSNKELYKPDLIFVKDGRALVVDVTVRYEAAKSSLEEAAAEKVRKYKHLETEVRHLTNAKDVTFVGFPLGARGKWHQDNFKLLTELGLSKSRQVKMAETFSTVALFSSVDIVHMFASRARKSMVM

SEQ ID NO: 629 - protein, 1625 aa, synthetic construct
MAPKKKRKVVTVKFKYKGEEKEVDISKIKKVWRVGKMISFTYDDNGKTGRGAVSEKDAPKELLQMLEKSGSETPGTSESATPESNISGSSCGSPNSADTSSDFKDLWTKLKECHDREVQGLQVKVTKLKQERILDAQRLEEFFTKNQQLREQQKVLHETIKVLEDRLRAGLCDRCAVTEEHMRKKQQEFENIRQQNLKLITELMNERNTLQEENKKLSEQLQQKIENDQQHQAAELECEEDVIPDSPITAFSFSGVNRLRRKENPHVRYIEQTHTKLEHSVCANEMRKVSKSSTHPQHNPNENEILVADTYDQSQSPMAKAHGTSSYTPDKSSFNLATVVAETLGLGVQEESETQGPMSPLGDELYHCLEGNHKKQPFESGSETPGTSESATPEGSYEQLAPQPCVGETLHSSLPRDSELFVPEEGSSEKESEDAPKTSPPTPGKHGLEQTGEEKVMVTVPDKNPPCPCCGTRVNSVLNLIEHLKVSHGKRGVCFRCAKCGKENSNYHSVVCHFKKCRGPETEKAPAGEWICEVCNRDFTTKIGLGQHKRLAHPAVRNQERIVASQPKETSNRGAHKRCWTKEEEELLIRLEAQFEGNKNINKLIAEHITTKTAKQISDKRRLLSRKPAEEPREEPGTCHHTRRAAASLRTEPEMSHHAQAEDRDNGPGRRPLPGRAAAGGRTMDEIRRHPDKGNGQQRPTKQKSEEQLQAYYKKTLEERLSAGALNTFPRAFKQVMEGRDIKLVINQTAQDCFGCLESISQIRTATRDKKDTVTREKHPKKPFQKWMKKRAIKKGNYLRFQRLFYLDRGKLAKIILDDIECLSCDIPLSEIYSVFKTRWETTGSFKSLGDFKTYGKADNTAFRELITAKEIEKNVQEMSKGSAPGPDGITLGDVVKMDPEFSRTMEIFNLWLTTGKIPDMVRGCRTVLIPKSSKPDRLKDINNWRPITIGSILLRLFSRIVTARLSKACPLNPRQRGFIRAAGCSENLKLLQTIIWSAKREHRPLGVVFVDIAKAFDTVSHQHIIHALQQREVDPHIVGLVSNMYENISTYITTKRNTHTDKIQIRVGVKQGDPMSPLLFNLAMDPLLCKLEESGKGYHRGQSSITAMAFADDLVLLSDSWENMNTNISILETFCNLTGLKTQGQKCHGFYIKPTKDSYTINDCAAWTINGTPLNMIDPGESEKYLGLQFDPWIGIARSGLSTKLDFWLQRIDQAPLKPLQKTDILKTYTIPRLIYIADHSEVKSALLETLDQKIRTAVKEWLHLPPCTCDAILYSSTRDGGLGITKLAGLIPSVQARRLHRIAQSSDDTMKCFMEKEKMEQLHKKLWIQAGGDRENIPSIWEAPPSSEPPNNVSTNSEWEAPTQKDKFPKPCNWRKNEFKKWTKLASQGRGIVNFERDKISNHWIQYYRRIPHRKLLTALQLRANVYPTREFLARGRQDQYIKACRHCDADNESCAHIIGNCPVTQDARIKRHNYICELLLEEAKKKDWVVFKEPHIRDSNKELYKPDLIFVKDGRALVVDVTVRYEAAKSSLEEAAAEKVRKYKHLETEVRHLTNAKDVTFVGFPLGARGKWHQDNFKLLTELGLSKSRQVKMAETFSTVALFSSVDIVHMFASRARKSMVM

SEQ ID NO: 630 - protein, 1397 aa, synthetic construct
MPKRKVSSAEGAAKEEPKRRSARLSAKPPAKVEAKPKKAAAKDKSSDKKVQTKGKRGAKGKQAEVANQETKEDLPAENGETKTEESPASDEAGEKEAKSDSGSETPGTSESATPESVTVKFKYKGEEKEVDISKIKKVWRVGKMISFTYDDNGKTGRGAVSEKDAPKELLQMLEKSGSETPGTSESATPESLFVPEEGSSEKESEDAPKTSPPTPGKHGLEQTGEEKVMVTVPDKNPPCPCCGTRVNSVLNLIEHLKVSHGKRGVCFRCAKCGKENSNYHSVVCHFKKCRGPETEKAPAGEWICEVCNRDFTTKIGLGQHKRLAHPAVRNQERIVASQPKETSNRGAHKRCWTKEEEELLIRLEAQFEGNKNINKLIAEHITTKTAKQISDKRRLLSRKPAEEPREEPGTCHHTRRAAASLRTEPEMSHHAQAEDRDNGPGRRPLPGRAAAGGRTMDEIRRHPDKGNGQQRPTKQKSEEQLQAYYKKTLEERLSAGALNTFPRAFKQVMEGRDIKLVINQTAQDCFGCLESISQIRTATRDKKDTVTREKHPKKPFQKWMKKRAIKKGNYLRFQRLFYLDRGKLAKIILDDIECLSCDIPLSEIYSVFKTRWETTGSFKSLGDFKTYGKADNTAFRELITAKEIEKNVQEMSKGSAPGPDGITLGDVVKMDPEFSRTMEIFNLWLTTGKIPDMVRGCRTVLIPKSSKPDRLKDINNWRPITIGSILLRLFSRIVTARLSKACPLNPRQRGFIRAAGCSENLKLLQTIIWSAKREHRPLGVVFVDIAKAFDTVSHQHIIHALQQREVDPHIVGLVSNMYENISTYITTKRNTHTDKIQIRVGVKQGDPMSPLLFNLAMDPLLCKLEESGKGYHRGQSSITAMAFADDLVLLSDSWENMNTNISILETFCNLTGLKTQGQKCHGFYIKPTKKSYTINDCAAWTINGTPLNMIDPGESEKYLGLQFDPWIGIARSGLSTKLDFWLQRIDQAPLKPLQKTDILKTYTIPRLIYIADHSEVKSALLETLDQKIRTAVKEWLHLPPCTCDAILYSSTRDGGLGITKLAGLIPSVQARRLHRIAQSSDDTMKCFMEKEKMEQLHKKLWIQAGGDRENIPSIWEAPPSSEPPNNVSTNSEWEAPTQKDKFPKPCNWRKNEFKKWTKLASQGRGIVNFERDKISNHWIQYYRRIPHRKLLTALQLRANVYPTREFLARGRQDQYIKACRHCDADNESCAHIIGNCPVTQDARIKRHNYICELLLEEAKKKDWVVFKEPHIRDSNKELYKPDLIFVKDGRALVVDVTVRYEAAKSSLEEAAAEKVRKYKHLETEVRHLTNAKDVTFVGFPLGARGKWHQDNFKLLTELGLSKSRQVKMAETFSTVALFSSVDIVHMFASRARKSMVM

SEQ ID NO: 631 - protein, 1625 aa, synthetic construct
MAPKKKRKVNISGSSCGSPNSADTSSDFKDLWTKLKECHDREVQGLQVKVTKLKQERILDAQRLEEFFTKNQQLREQQKVLHETIKVLEDRLRAGLCDRCAVTEEHMRKKQQEFENIRQQNLKLITELMNERNTLQEENKKLSEQLQQKIENDQQHQAAELECEEDVIPDSPITAFSFSGVNRLRRKENPHVRYIEQTHTKLEHSVCANEMRKVSKSSTHPQHNPNENEILVADTYDQSQSPMAKAHGTSSYTPDKSSFNLATVVAETLGLGVQEESETQGPMSPLGDELYHCLEGNHKKQPFESGSETPGTSESATPEGSVTVKFKYKGEEKEVDISKIKKVWRVGKMISFTYDDNGKTGRGAVSEKDAPKELLQMLEKSGSETPGTSESATPESYEQLAPQPCVGETLHSSLPRDSELFVPEEGSSEKESEDAPKTSPPTPGKHGLEQTGEEKVMVTVPDKNPPCPCCGTRVNSVLNLIEHLKVSHGKRGVCFRCAKCGKENSNYHSVVCHFKKCRGPETEKAPAGEWICEVCNRDFTTKIGLGQHKRLAHPAVRNQERIVASQPKETSNRGAHKRCWTKEEEELLIRLEAQFEGNKNINKLIAEHITTKTAKQISDKRRLLSRKPAEEPREEPGTCHHTRRAAASLRTEPEMSHHAQAEDRDNGPGRRPLPGRAAAGGRTMDEIRRHPDKGNGQQRPTKQKSEEQLQAYYKKTLEERLSAGALNTFPRAFKQVMEGRDIKLVINQTAQDCFGCLESISQIRTATRDKKDTVTREKHPKKPFQKWMKKRAIKKGNYLRFQRLFYLDRGKLAKIILDDIECLSCDIPLSEIYSVFKTRWETTGSFKSLGDFKTYGKADNTAFRELITAKEIEKNVQEMSKGSAPGPDGITLGDVVKMDPEFSRTMEIFNLWLTTGKIPDMVRGCRTVLIPKSSDPDRLKDINNWRPITIGSILLRLFSRIVTARLSKACPLNPRQRGFIRAAGCSENLKLLQTIIWSAKREHRPLGVVFVDIAKAFDTVSHQHIIHALQQREVDPHIVGLVSNMYENISTYITTKRNTHTDKIQIRVGVKQGDPMSPLLFNLAMDPLLCKLEESGKGYHRGQSSITAMAFADDLVLLSDSWENMNTNISILETFCNLTGLKTQGQKCHGFYIKPTKDSYTINDCAAWTINGTPLNMIDPGESEKYLGLQFDPWIGIARSGLSTKLDFWLQRIDQAPLKPLQKTDILKTYTIPRLIYIADHSEVKSALLETLDQKIRTAVKEWLHLPPCTCDAILYSSTRDGGLGITKLAGLIPSVQARRLHRIAQSSDDTMKCFMEKEKMEQLHKKLWIQAGGDRENIPSIWEAPPSSEPPNNVSTNSEWEAPTQKDKFPKPCNWRKNEFKKWTKLASQGRGIVNFERDKISNHWIQYYRRIPHRKLLTALQLRANVYPTREFLARGRQDQYIKACRHCDADNESCAHIIGNCPVTQDARIKRHNYICELLLEEAKKKDWVVFKEPHIRDSNKELYKPDLIFVKDGRALVVDVTVRYEAAKSSLEEAAAEKVRKYKHLETEVRHLTNAKDVTFVGFPLGARGKWHQDNFKLLTELGLSKSRQVKMAETFSTVALFSSVDIVHMFASRARKSMVM

SEQ ID NO: 632 - protein, 1625 aa, synthetic construct
MAPKKKRKVNISGSSCGSPNSADTSSDFKDLWTKLKECHDREVQGLQVKVTKLKQERILDAQRLEEFFTKNQQLREQQKVLHETIKVLEDRLRAGLCDRCAVTEEHMRKKQQEFENIRQQNLKLITELMNERNTLQEENKKLSEQLQQKIENDQQHQAAELECEEDVIPDSPITAFSFSGVNRLRRKENPHVRYIEQTHTKLEHSVCANEMRKVSKSSTHPQHNPNENEILVADTYDQSQSPMAKAHGTSSYTPDKSSFNLATVVAETLGLGVQEESETQGPMSPLGDELYHCLEGNHKKQPFESGSETPGTSESATPEGSVTVKFKYKGEEKEVDISKIKKVWRVGKMISFTYDDNGKTGRGAVSEKDAPKELLQMLEKSGSETPGTSESATPESYEQLAPQPCVGETLHSSLPRDSELFVPEEGSSEKESEDAPKTSPPTPGKHGLEQTGEEKVMVTVPDKNPPCPCCGTRVNSVLNLIEHLKVSHGKRGVCFRCAKCGKENSNYHSVVCHFKKCRGPETEKAPAGEWICEVCNRDFTTKIGLGQHKRLAHPAVRNQERIVASQPKETSNRGAHKRCWTKEEEELLIRLEAQFEGNKNINKLIAEHITTKTAKQISDKRRLLSRKPAEEPREEPGTCHHTRRAAASLRTEPEMSHHAQAEDRDNGPGRRPLPGRAAAGGRTMDEIRRHPDKGNGQQRPTKQKSEEQLQAYYKKTLEERLSAGALNTFPRAFKQVMEGRDIKLVINQTAQDCFGCLESISQIRTATRDKKDTVTREKHPKKPFQKWMKKRAIKKGNYLRFQRLFYLDRGKLAKIILDDIECLSCDIPLSEIYSVFKTRWETTGSFKSLGDFKTYGKADNTAFRELITAKEIEKNVQEMSKGSAPGPDGITLGDVVKMDPEFSRTMEIFNLWLTTGKIPDMVRGCRTVLIPKSSKPDRLKDINNWRPITIGSILLRLFSRIVTARLSKACPLNPRQRGFIRAAGCSENLKLLQTIIWSAKREHRPLGVVFVDIAKAFDTVSHQHIIHALQQREVDPHIVGLVSNMYENISTYITTKRNTHTDKIQIRVGVKQGDPMSPLLFNLAMDPLLCKLEESGKGYHRGQSSITAMAFADDLVLLSDSWENMNTNISILETFCNLTGLKTQGQKCHGFYIKPTKDSYTINDCAAWTINGTPLNMIDPGESEKYLGLQFDPWIGIARSGLSTKLDFWLQRIDQAPLKPLQKTDILKTYTIPRLIYIADHSEVKSALLETLDQKIRTAVKEWLHLPPCTCDAILYSSTRDGGLGITKLAGLIPSVQARRLHRIAQSSDDTMKCFMEKEKMEQLHKKLWIQAGGDRENIPSIWEAPPSSEPPNNVSTNSEWEAPTQKDKFPKPCNWRKNEFKKWTKLASQGRGIVNFERDKISNHWIQYYRRIPHRKLLTALQLRANVYPTREFLARGRQDQYIKACRHCDADNESCAHIIGNCPVTQDARIKRHNYICELLLEEAKKKDWVVFKEPHIRDSNKELYKPDLIFVKDGRALVVDVTVRYEAAKSSLEEAAAEKVRKYKHLETEVRHLTNAKDVTFVGFPLGARGKWHQDNFKLLTELGLSKSRQVKMAETFSTVALFSSVDIVHMFASRARKSMVM

SEQ ID NO: 633 - protein, 1405 aa, synthetic construct
MAPKKKRKVVTVKFKYKGEEKEVDISKIKKVWRVGKMISFTYDDNGKTGRGAVSEKDAPKELLQMLEKSGSETPGTSESATPESPKRKVSSAEGAAKEEPKRRSARLSAKPPAKVEAKPKKAAAKDKSSDKKVQTKGKRGAKGKQAEVANQETKEDLPAENGETKTEESPASDEAGEKEAKSDSGSETPGTSESATPESLFVPEEGSSEKESEDAPKTSPPTPGKHGLEQTGEEKVMVTVPDKNPPCPCCGTRVNSVLNLIEHLKVSHGKRGVCFRCAKCGKENSNYHSVVCHFKKCRGPETEKAPAGEWICEVCNRDFTTKIGLGQHKRLAHPAVRNQERIVASQPKETSNRGAHKRCWTKEEEELLIRLEAQFEGNKNINKLIAEHITTKTAKQISDKRRLLSRKPAEEPREEPGTCHHTRRAAASLRTEPEMSHHAQAEDRDNGPGRRPLPGRAAAGGRTMDEIRRHPDKGNGQQRPTKQKSEEQLQAYYKKTLEERLSAGALNTFPRAFKQVMEGRDIKLVINQTAQDCFGCLESISQIRTATRDKKDTVTREKHPKKPFQKWMKKRAIKKGNYLRFQRLFYLDRGKLAKIILDDIECLSCDIPLSEIYSVFKTRWETTGSFKSLGDFKTYGKADNTAFRELITAKEIEKNVQEMSKGSAPGPDGITLGDVVKMDPEFSRTMEIFNLWLTTGKIPDMVRGCRTVLIPKSSKPDRLKDINNWRPITIGSILLRLFSRIVTARLSKACPLNPRQRGFIRAAGCSENLKLLQTIIWSAKREHRPLGVVFVDIAKAFDTVSHQHIIHALQQREVDPHIVGLVSNMYENISTYITTKRNTHTDKIQIRVGVKQGDPMSPLLFNLAMDPLLCKLEESGKGYHRGQSSITAMAFADDLVLLSDSWENMNTNISILETFCNLTGLKTQGQKCHGFYIKPTKDSYTINDCAAWTINGTPLNMIDPGESEKYLGLQFDPWIGIARSGLSTKLDFWLQRIDQAPLKPLQKTDILKTYTIPRLIYIADHSEVKSALLETLDQKIRTAVKEWLHLPPCTCDAILYSSTRDGGLGITKLAGLIPSVQARRLHRIAQSSDDTMKCFMEKEKMEQLHKKLWIQAGGDRENIPSIWEAPPSSEPPNNVSTNSEWEAPTQKDKFPKPCNWRKNEFKKWTKLASQGRGIVNFERDKISNHWIQYYRRIPHRKLLTALQLRANVYPTREFLARGRQDQYIKACRHCDADNESCAHIIGNCPVTQDARIKRHNYICELLLEEAKKKDWVVFKEPHIRDSNKELYKPDLIFVKDGRALVVDVTVRYEAAKSSLEEAAAEKVRKYKHLETEVRHLTNAKDVTFVGFPLGARGKWHQDNFKLLTELGLSKSRQVKMAETFSTVALFSSVDIVHMFASRARKSMVM

SEQ ID NO: 634 - protein, 1397 aa, synthetic construct
MPKRKVSSAEGAAKEEPKRRSARLSAKPPAKVEAKPKKAAAKDKSSDKKVQTKGKRGAKGKQAEVANQETKEDLPAENGETKTEESPASDEAGEKEAKSDSGSETPGTSESATPESVTVKFKYKGEEKEVDISKIKKVWRVGKMISFTYDDNGKTGRGAVSEKDAPKELLQMLEKSGSETPGTSESATPESLFVPEEGSSEKESEDAPKTSPPTPGKHGLEQTGEEKVMVTVPDKNPPCPCCGTRVNSVLNLIEHLKVSHGKRGVCFRCAKCGKENSNYHSVVCHFKKCRGPETEKAPAGEWICEVCNRDFTTKIGLGQHKRLAHPAVRNQERIVASQPKETSNRGAHKRCWTKEEEELLIRLEAQFEGNKNINKLIAEHITTKTAKQISDKRRLLSRKPAEEPREEPGTCHHTRRAAASLRTEPEMSHHAQAEDRDNGPGRRPLPGRAAAGGRTMDEIRRHPDKGNGQQRPTKQKSEEQLQAYYKKTLEERLSAGALNTFPRAFKQVMEGRDIKLVINQTAQDCFGCLESISQIRTATRDKKDTVTREKHPKKPFQKWMKKRAIKKGNYLRFQRLFYLDRGKLAKIILDDIECLSCDIPLSEIYSVFKTRWETTGSFKSLGDFKTYGKADNTAFRELITAKEIEKNVQEMSKGSAPGPDGITLGDVVKMDPEFSRTMEIFNLWLTTGKIPDMVRGCRTVLIPKSSKPDRLKDINNWRPITIGSILLRLFSRIVTARLSKACPLNPRQRGFIRAAGCSENLKLLQTIIWSAKREHRPLGVVFVDIAKAFDTVSHQHIIHALQQREVDPHIVGLVSNMYENISTYITTKRNTHTDKIQIRVGVKQGDPMSPLLFNLAMDPLLCKLEESGKGYHRGQSSITAMAFADDLVLLSDSWENMNTNISILETFCNLTGLKTQGQKCHGFYIKPTKDSYTINDCAAWTINGTPLNMIDPGESEKYLGLQFDPWIGIARSGLSTKLDFWLQRIDQAPLKPLQKTDILKTYTIPRLIYIADHSEVKSALLETLDQKIRTAVKEWLHLPPCTCDAILYSSTRDGGLGITKLAGLIPSVQARRLHRIAQSSDDTMKCFMEKEKMEQLHKKLWIQAGGDRENIPSIWEAPPSSEPPNNVSTNSEWEAPTQKDKFPKPCNWRKNEFKKWTKLASQGRGIVNFERDKISNHWIQYYRRIPHRKLLTALQLRANVYPTREFLARGRQDQYIKACRHCDADNESCAHIIGNCPVTQDARIKRHNYICELLLEEAKKKDWVVFKEPHIRDSNKELYKPDLIFVKDGRALVVDVTVRYEAAKSSLEEAAAEKVRKYKHLETEVRHLTNAKDVTFVGFPLGARGKWHQDNFKLLTELGLSKSRQVKMAETFSTVALFSSVDIVHMFASRARKSMVM

SEQ ID NO: 635 - protein, 1625 aa, synthetic construct
MAPKKKRKVVTVKFKYKGEEKEVDISKIKKVWRVGKMISFTYDDNGKTGRGAVSEKDAPKELLQMLEKSGSETPGTSESATPESNISGSSCGSPNSADTSSDFKDLWTKLKECHDREVQGLQVKVTKLKQERILDAQRLEEFFTKNQQLREQQKVLHETIKVLEDRLRAGLCDRCAVTEEHMRKKQQEFENIRQQNLKLITELMNERNTLQEENKKLSEQLQQKIENDQQHQAAELECEEDVIPDSPITAFSFSGVNRLRRKENPHVRYIEQTHTKLEHSVCANEMRKVSKSSTHPQHNPNENEILVADTYDQSQSPMAKAHGTSSYTPDKSSFNLATVVAETLGLGVQEESETQGPMSPLGDELYHCLEGNHKKQPFESGSETPGTSESATPEGSYEQLAPQPCVGETLHSSLPRDSELFVPEEGSSEKESEDAPKTSPPTPGKHGLEQTGEEKVMVTVPDKNPPCPCCGTRVNSVLNLIEHLKVSHGKRGVCFRCAKCGKENSNYHSVVCHFPKCRGPETEKAPAGEWICEVCNRDFTTKIGLGQHKRLAHPAVRNQERIVASQPKETSNRGAHKRCWTKEEEELLIRLEAQFEGNKNINKLIAEHITTKTAKQISDKRRLLSRKPAEEPREEPGTCHHTRRAAASLRTEPEMSHHAQAEDRDNGPGRRPLPGRAAAGGRTMDEIRRHPDKGNGQQRPTKQKSEEQLQAYYKKTLEERLSAGALNTFPRAFKQVMEGRDIKLVINQTAQDCFGCLESISQIRTATRDKKDTVTREKHPKKPFQKWMKDRAIKKGNYLRFQRLFYLDRGKLAKIILDDIECLSCDIPLSEIYSVFKTRWETTGSFKSLGDFKTYGKADNTAFRELITAKEIEKNVQEMSKGSAPGPDGITLGDVVKMDPEFSRTMEIFNLWLTTGKIPDMVRGCRTVLIPKSSKPDRLKDINNWRPITIGSILLRLFSRIVTARLSKACPLNPRQRGFIRAAGCSENLKLLQTIIWSAKREHRPLGVVFVDIAKAFDTVSHQHIIHALQQREVDPHIVGLVSNMYENISTYITTKRNTHTDKIQIRVGVKQGDPMSPLLFNLAMDPLLCKLEESGKGYHRGQSSITAMAFADDLVLLSDSWENMNTNISILETFCNLTGLKTQGQKCHGFYIKPTKDSYTINDCAAWTINGTPLNMIDPGESEKYLGLQFDPWIGIARSGLSTKLDFWLQRIDQAPLKPLQKTDILKTYTIPRLIYIADHSEVKTALLETLDQKIRTAVKEWLHLPPCTCDAILYSSTRDGGLGITKLAGLIPSVQARRLHRIAQSSDDTMKCFMEKEKMEQLHKKLWIQAGGDRENIPSIWEAPPSSEPPNNVSTNSEWEAPTQKDKFPKPCNWRKNEFKKWTKLASQGRGIVNFERDKISNHWIQYYRRIPHRKLLTALQLRANVYPTREFLARGRQDQYIKACRHCDADIESCAHIIGNCPVTQDARIKRHNYICELLLEEAKKKDWVVFKEPHIRDSNKELYKPDLIFVKDARALVVDVTVRYEAAKSSLEEAAAEKVRKYKHLETEVRHLTNAKDVTFVGFPLGARGKWHQDNFKLLTELGLSKSRQVKMAETFSTVALFSSVDIVHMFASRARKSMVM

SEQ ID NO: 636 - protein, 1665 aa, synthetic construct
MAPKKKRKVNISGSSCGSPNSADTSSDFKDLWTKLKECHDREVQGLQVKVTKLKQERILDAQRLEEFFTKNQQLREQQKVLHETIKVLEDRLRAGLCDRCAVTEEHMRKKQQEFENIRQQNLKLITELMNERNTLQEENKKLSEQLQQKIENDQQHQAAELECEEDVIPDSPITAFSFSGVNRLRRKENPHVRYIEQTHTKLEHSVCANEMRKVSKSSTHPQHNPNENEILVADTYDQSQSPMAKAHGTSSYTPDKSSFNLATVVAETLGLGVQEESETQGPMSPLGDELYHCLEGNHKKQPFESGSETPGTSESATPEGSPKRKVSSAEGAAKEEPKRRSARLSAKPPAKVEAKPKKAAAKDKSSDKKVQTKGKRGAKGKQAEVANQETKEDLPAENGETKTEESPASDEAGEKEAKSDSGSETPGTSESATPESYEQLAPQPCVGETLHSSLPRDSELFVPEEGSSEKESEDAPKTSPPTPGKHGLEQTGEEKVMVTVPDKNPPCPCCGTRVNSVLNLIEHLKVSHGKRGVCFRCAKCGKENSNYHSVVCHFKKCRGPETEKAPAGEWICEVCNRDFTTKIGLGQHKRLAHPAVRNQERIVASQPKETSNRGAHKRCWTKEEEELLIRLEAQFEGNKNINKLIAEHITTKTAKQISDKRRLLSRKPAEEPREEPGTCHHTRRAAASLRTEPEMSHHAQAEDRDNGPGRRPLPGRAAAGGRTMDEIRRHPDKGNGQQRPTKQKSEEQLQAYYKKTLEERLSAGALNTFPRAFKQVMEGRDIKLVINQTAQDCFGCLESISQIRTATRDKKDTVTREKHPKKPFQKWMKKRAIKKGNYLRFQRLFYLDRGKLAKIILDDIECLSCDIPLSEIYSVFKTRWETTGSFKSLGDFKTYGKADNTAFRELITAKEIEKNVQEMSKGSAPGPDGITLGDVVKMDPEFSRTMEIFNLWLTTGKIPDMVRGCRTVLIPKSSKPDRLKDINNWRPITIGSILLRLFSRIVTARLSKACPLNPRQRGFIRAAGCSENLKLLQTIIWSAKREHRPLGVVFVDIAKAFDTVSHQHIIHALQQREVDPHIVGLVSNMYENISTYITTKRNTHTDKIQIRVGVKQGDPMSPLLFNLAMDPLLCKLEESGKGYHRGQSSITAMAFADDLVLLSDSWENMNTNISILETFCNLTGLKTQGQKCHGFYIKPTKDSYTINDCAAWTINGTPLNMIDPGESEKYLGLQFDPWIGIARSGLSTKLDFWLQRIDQAPLKPLQKTDILKTYTIPRLIYIADHSEVKSALLETLDQKIRTAVKEWLHLPPCTCDAILYSSTRDGGLGITKLAGLIPSVQARRLHRIAQSSDDTMKCFMEKEKMEQLHKKLWIQAGGDRENIPSIWEAPPSSEPPNNVSTNSEWEAPTQKDKFPKPCNWRKNEFKKWTKLASQGRGIVNFERDKISNHWIQYYRRIPHRKLLTALQLRANVYPTREFLARGRQDQYIKACRHCDADNESCAHIIGNCPVTQDARIKRHNYICELLLEEAKKKDWVVFKEPHIRDSNKELYKPDLIFVKDGRALVVDVTVRYEAAKSSLEEAAAEKVRKYKHLETEVRHLTNAKDVTFVGFPLGARGKWHQDNFKLLTELGLSKSRQVKMAETFSTVALFSSVDIVHMFASRARKSMVM

SEQ ID NO: 637 - protein, 1390 aa, synthetic construct
MASCPKPGPPVSAGAMSLESGLTTHSVLAIERGPNSLANSGSDFGGGGLGLPLRLLRVSVGTQTSRSDWVDLVSWSHPGPTSKSQQVDLVSLFPKHRVDLLSKNDQVDLVAQFLPSKFPPNLAENDLALLVNLEFYRSDLHVYECVHFAAHWEGLSGLPEVYEQLAPQPCVGETLHSSLPRDSELFVPEEGSSEKESEDAPKTSPPTPGKHGLEQTGEEKVMVTVPDKNPPCPCCGTRVNSVLNLIEHLKVSHGKRGVCFRCAKCGKENSNYHSVVCHFPKCRGPETEKAPAGEWICEVCNRDFTTKIGLGQHKRLAHPAVRNQERIVASQPKETSNRGAHKRCWTKEEEELLIRLEAQFEGNKNINKLIAEHITTKTAKQISDKRRLLSRKPAEEPREEPGTCHHTRRAAASLRTEPEMSHHAQAEDRDNGPGRRPLPGRAAAGGRTMDEIRRHPDKGNGQQRPTKQKSEEQLQAYYKKTLEERLSAGALNTFPRAFKQVMEGRDIKLVINQTAQDCFGCLESISQIRTATRDKKDTVTREKHPKKPFQKWMKDRAIKKGNYLRFQRLFYLDRGKLAKIILDDIECLSCDIPLSEIYSVFKTRWETTGSFKSLGDFKTYGKADNTAFRELITAKEIEKNVQEMSKGSAPGPDGITLGDVVKMDPEFSRTMEIFNLWLTTGKIPDMVRGCRTVLIPKSSKPDRLKDINNWRPITIGSILLRLFSRIVTARLSKACPLNPRQRGFIRAAGCSENLKLLQTIIWSAKREHRPLGVVFVDIAKAFDTVSHQHIIHALQQREVDPHIVGLVSNMYENISTYITTKRNTHTDKIQIRVGVKQGDPMSPLLFNLAMDPLLCKLEESGKGYHRGQSSITAMAFADDLVLLSDSWENMNTNISILETFCNLTGLKTQGQKCHGFYIKPTKDSYTINDCAAWTINGTPLNMIDPGESEKYLGLQFDPWIGIARSGLSTKLDFWLQRIDQAPLKPLQKTDILKTYTIPRLIYIADHSEVKTALLETLDQKIRTAVKEWLHLPPCTCDAILYSSTRDGGLGITKLAGLIPSVQARRLHRIAQSSDDTMKCFMEKEKMEQLHKKLWIQAGGDRENIPSIWEAPPSSEPPNNVSTNSEWEAPTQKDKFPKPCNWRKNEFKKWTKLASQGRGIVNFERDKISNHWIQYYRRIPHRKLLTALQLRANVYPTREFLARGRQDQYIKACRHCDADIESCAHIIGNCPVTQDARIKRANYICELLLEEAKKKDWVVFKEPHIRDSNKELYKPDLIFVKDARALVVDVTVRYEAAKSSLEEAAAEKVRKYKHLETEVRHLTNAKDVTFVGFPLGARGKWHQDNFKLLTELGLSKSRQVKMAETFSTVALFSSVDIVHMFASRARKSMVM

SEQ ID NO: 638 - protein, 1390 aa, synthetic construct
MASCPKPGPPVSAGAMSLESGLTTHSVLAIERGPNSLANSGSDFGGGGLGLPLRLLRVSVGTQTSRSDWVDLVSWSHPGPTSKSQQVDLVSLFPKHRVDLLSKNDQVDLVAQFLPSKFPPNLAENDLALLVNLEFYRSDLHVYECVHFAAHWEGLSGLPEVYEQLAPQPCVGETLHSSLPRDSELFVPEEGSSEKESEDAPKTSPPTPGKHGLEQTGEEKVMVTVPDKNPPCPCCGTRVNSVLNLIEHLKVSHGKRGVCFRCAKCGKENSNYHSVVCHFPKCRGPETEKAPAGEWICEVCNRDFTTKIGLGQHKRLAHPAVRNQERIVASQPKETSNRGAHKRCWTKEEEELLIRLEAQFEGNKNINKLIAEHITTKTAKQISDKRRLLSRKPAEEPREEPGTCHHTRRAAASLRTEPEMSHHAQAEDRDNGPGRRPLPGRAAAGGRTMDEIRRHPDKGNGQQRPTKQKSEEQLQAYYKKTLEERLSAGALNTFPRAFKQVMEGRDIKLVINQTAQDCFGCLESISQIRTATRDKKDTVTREKHPKKPFQKWMKDRAIKKGNYLRFQRLFYLDRGKLAKIILDDIECLSCDIPLSEIYSVFKTRWETTGSFKSLGDFKTYGKADNTAFRELITAKEIEKNVQEMSKGSAPGPDGITLGDVVKMDPEFSRTMEIFNLWLTTGKIPDMVRGCRTVLIPKSSKPDRLKDINNWRPITIGSILLRLFSRIVTARLSKACPLNPRQRGFIRAAGCSENLKLLQTIIWSAKREHRPLGVVFVDIAKAFDTVSHQHIIHALQQREVDPHIVGLVSNMYENISTYITTKRNTHTDKIQIRVGVKQGDPMSPLLFNLAMDPLLCKLEESGKGYHRGQSSITAMAFADDLVLLSDSWENMNTNISILETFCNLTGLKTQGQKCHGFYIKPTKDSYTINDCAAWTINGTPLNMIDPGESEKYLGLQFDPWIGIARSGLSTKLDFWLQRIDQAPLKPLQKTDILKTYTIPRLIYIADHSEVKTALLETLDQKIRTAVKEWLHLPPCTCDAILYSSTRDGGLGITKLAGLIPSVQARRLHRIAQSSDDTMKCFMEKEKMEQLHKKLWIQAGGDRENIPSIWEAPPSSEPPNNVSTNSEWEAPTQKDKFPKPCNWRKNEFKKWTKLASQGRGIVNFERDKISNHWIQYYRRIPHRKLLTALQLRANVYPTREFLARGRQDQYIKACRHCDADIESCAHIIGNCPVTQDARIKRHNYICELLLEEAKKKDWVVFKEPHIRDSNKELYKPDLIFVKDARALVVDVTVRYEAAKSSLEEAAAEKVRKAKHLETEVRHLTNAKDVTFVGFPLGARGKWHQDNFKLLTELGLSKSRQVKMAETFSTVALFSSVDIVHMFASRARKSMVM

SEQ ID NO: 639 - protein, 1665 aa, synthetic construct
MAPKKKRKVNISGSSCGSPNSADTSSDFKDLWTKLKECHDREVQGLQVKVTKLKQERILDAQRLEEFFTKNQQLREQQKVLHETIKVLEDRLRAGLCDRCAVTEEHMRKKQQEFENIRQQNLKLITELMNERNTLQEENKKLSEQLQQKIENDQQHQAAELECEEDVIPDSPITAFSFSGVNRLRRKENPHVRYIEQTHTKLEHSVCANEMRKVSKSSTHPQHNPNENEILVADTYDQSQSPMAKAHGTSSYTPDKSSFNLATVVAETLGLGVQEESETQGPMSPLGDELYHCLEGNHKKQPFESGSETPGTSESATPEGSPKRKVSSAEGAAKEEPKRRSARLSAKPPAKVEAKPKKAAAKDKSSDKKVQTKGKRGAKGKQAEVANQETKEDLPAENGETKTEESPASDEAGEKEAKSDSGSETPGTSESATPESYEQLAPQPCVGETLHSSLPRDSELFVPEEGSSEKESEDAPKTSPPTPGKHGLEQTGEEKVMVTVPDKNPPCPCCGTRVNSVLNLIEHLKVSHGKRGVCFRCAKCGKENSNYHSVVCHFKKCRGPETEKAPAGEWICEVCNRDFTTKIGLGQHKRLAHPAVRNQERIVASQPKETSNRGAHKRCWTKEEEELLIRLEAQFEGNKNINKLIAEHITTKTAKQISDKRRLLSRKPAEEPREEPGTCHHTRRAAASLRTEPEMSHHAQAEDRDNGPGRRPLPGRAAAGGRTMDEIRRHPDKGNGQQRPTKQKSEEQLQAYYKKTLEERLSAGALNTFPRAFKQVMEGRDIKLVINQTAQDCFGCLESISQIRTATRDKKDTVTREKHPKKPFQKWMKKRAIKKGNYLRFQRLFYLDRGKLAKIILDDIECLSCDIPLTEIQTTIREYYKTTGSFKSLGDFKTYGKADNTAFRELITAKEIEKNVQEMSKGSAPGPDGITLGDVVKMDPEFSRTMEIFNLWLTTGKIPDMVRGCRTVLIPKSSKPDRLKDINNWRPITIGSILLRLFSRIVTARLSKACPLNPRQRGFIRAAGCSENLKLLQTIIWSAKREHRPLGVVFVDIAKAFDTVSHQHIIHALQQREVDPHIVGLVSNMYENISTYITTKRNTHTDKIQIRVGVKQGDPMSPLLFNLAMDPLLCKLEESGKGYHRGQSSITAMAFADDLVLLSDSWENMNTNISILETFCNLTGLKTQGQKCHGFYIKPTKKSYTINDCAAWTINGTPLNMIDPGESEKYLGLQFDPWIGIARSGLSTKLDFWLQRIDQAPLKPLQKTDILKTYTIPRLIYIADHSEVKSALLETLDQKIRTAVKEWLHLPPCTCDAILYSSTRDGGLGITKLAGLIPSVQARRLHRIAQSSDDTMKCFMEKEKMEQLHKKLWIQAGGDRENIPSIWEAPPSSEPPNNVSTNSEWEAPTQKDKFPKPCNWRKNEFKKWTKLASQGRGIVNFERDKISNHWIQYYRRIPHRKLLTALQLRANVYPTREFLARGRQDQYIKACRHCDADNESCAHIIGNCPVTQDARIKRHNYICELLLEEAKKKDWVVFKEPHIRDSNKELYKPDLIFVKDGRALVVDVTVRYEAAKSSLEEAAAEKVRKYKHLETEVRHLTNAKDVTFVGFPLGARGKWHQDNFKLLTELGLSKSRQVKMAETFSTVALFSSVDIVHMFASRARKSMVM

SEQ ID NO: 640 - protein, 1665 aa, synthetic construct
MAPKKKRKVNISGSSCGSPNSADTSSDFKDLWTKLKECHDREVQGLQVKVTKLKQERILDAQRLEEFFTKNQQLREQQKVLHETIKVLEDRLRAGLCDRCAVTEEHMRKKQQEFENIRQQNLKLITELMNERNTLQEENKKLSEQLQQKIENDQQHQAAELECEEDVIPDSPITAFSFSGVNRLRRKENPHVRYIEQTHTKLEHSVCANEMRKVSKSSTHPQHNPNENEILVADTYDQSQSPMAKAHGTSSYTPDKSSFNLATVVAETLGLGVQEESETQGPMSPLGDELYHCLEGNHKKQPFESGSETPGTSESATPEGSPKRKVSSAEGAAKEEPKRRSARLSAKPPAKVEAKPKKAAAKDKSSDKKVQTKGKRGAKGKQAEVANQETKEDLPAENGETKTEESPASDEAGEKEAKSDSGSETPGTSESATPESYEQLAPQPCVGETLHSSLPRDSELFVPEEGSSEKESEDAPKTSPPTPGKHGLEQTGEEKVMVTVPDKNPPCPCCGTRVNSVLNLIEHLKVSHGKRGVCFRCAKCGKENSNYHSVVCHFKKCRGPETEKAPAGEWICEVCNRDFTTKIGLGQHKRLAHPAVRNQERIVASQPKETSNRGAHKRCWTKEEEELLIRLEAQFEGNKNINKLIAEHITTKTAKQISDKRRLLSRKPAEEPREEPGTCHHTRRAAASLRTEPEMSHHAQAEDRDNGPGRRPLPGRAAAGGRTMDEIRRHPDKGNGQQRPTKQKSEEQLQAYYKKTLEERLSAGALNTFPRAFKQVMEGRDIKLVINQTAQDCFGCLESISQIRTATRDKKDTVTREKHPKKPFQKWMKKRAIKKGNYLRFQRLFYLDRGKLAKIILDDIECLSCDIPLSEIYSVFKTRWETTGSFKSLGDFKTYGKADNTAFRELITAKEIEKNVQEMSKGSAPGPDGITLGDVVKMDPEFSRTMEIFNLWLTTGKIPDMVRGCRTVLIPKSSKPDRLKDINNWRPITIGSILLRLFSRIVTARLSKACPLNPRQRGFIRAAGCSENLKLLQTIIWSAKREHRPLGVVFVDIAKAFDTVSHQHIIHALQQREVDPHIVGLVSNMYENISTYITTKRNTHTDKIQIRVGVKQGDPMSPLLFNLAMDPLLCKLEESGKGYHRGQSSITAMAFVDDLVLLSDSWENMNTNISILETFCNLTGLKTQGQKCHGFYIKPTKKSYTINDCAAWTINGTPLNMIDPGESEKYLGLQFDPWIGIARSGLSTKLDFWLQRIDQAPLKPLQKTDILKTYTIPRLIYIADHSEVKSALLETLDQKIRTAVKEWLHLPPCTCDAILYSSTRDGGLGITKLAGLIPSVQARRLHRIAQSSDDTMKCFMEKEKMEQLHKKLWIQAGGDRENIPSIWEAPPSSEPPNNVSTNSEWEAPTQKDKFPKPCNWRKNEFKKWTKLASQGRGIVNFERDKISNHWIQYYRRIPHRKLLTALQLRANVYPTREFLARGRQDQYIKACRHCDADNESCAHIIGNCPVTQDARIKRHNYICELLLEEAKKKDWVVFKEPHIRDSNKELYKPDLIFVKDGRALVVDVTVRYEAAKSSLEEAAAEKVRKYKHLETEVRHLTNAKDVTFVGFPLGARGKWHQDNFKLLTELGLSKSRQVKMAETFSTVALFSSVDIVHMFASRARKSMVM

SEQ ID NO: 641 - protein, 1665 aa, synthetic construct
MAPKKKRKVNISGSSCGSPNSADTSSDFKDLWTKLKECHDREVQGLQVKVTKLKQERILDAQRLEEFFTKNQQLREQQKVLHETIKVLEDRLRAGLCDRCAVTEEHMRKKQQEFENIRQQNLKLITELMNERNTLQEENKKLSEQLQQKIENDQQHQAAELECEEDVIPDSPITAFSFSGVNRLRRKENPHVRYIEQTHTKLEHSVCANEMRKVSKSSTHPQHNPNENEILVADTYDQSQSPMAKAHGTSSYTPDKSSFNLATVVAETLGLGVQEESETQGPMSPLGDELYHCLEGNHKKQPFESGSETPGTSESATPEGSPKRKVSSAEGAAKEEPKRRSARLSAKPPAKVEAKPKKAAAKDKSSDKKVQTKGKRGAKGKQAEVANQETKEDLPAENGETKTEESPASDEAGEKEAKSDSGSETPGTSESATPESYEQLAPQPCVGETLHSSLPRDSELFVPEEGSSEKESEDAPKTSPPTPGKHGLEQTGEEKVMVTVPDKNPPCPCCGTRVNSVLNLIEHLKVSHGKRGVCFRCAKCGKENSNYHSVVCHFKKCRGPETEKAPAGEWICEVCNRDFTTKIGLGQHKRLAHPAVRNQERIVASQPKETSNRGAHKRCWTKEEEELLIRLEAQFEGNKNINKLIAEHITTKTAKQISDKRRLLSRKPAEEPREEPGTCHHTRRAAASLRTEPEMSHHAQAEDRDNGPGRRPLPGRAAAGGRTMDEIRRHPDKGNGQQRPTKQKSEEQLQAYYKKTLEERLSAGALNTFPRAFKQVMEGRDIKLVINQTAQDCFGCLESISQIRTATRDKKDTVTREKHPKKPFQKWMKKRAIKKGNYLRFQRLFYLDRGKLAKIILDDIECLSCDIPLSEIYSVFKTRWETTGSFKSLGDFKTYGKADNTAFRELITAKEIEKNVQEMSKGSAPGPDGITLGDVVKMDPEFSRTMEIFNLWLTTGKIPDMVRGCRTVLIPKSSKPDRLKDINNWRPITIGSILLRLFSRIVTARLSKACPLNPRQRGFIRAAGCSENLKLLQTIIWSAKREHRPLGVVFVDIAKAFDTVSHQHIIHALQQREVDPHIVGLVSNMYENISTYITTKRNTHTDKIQIRVGVKQGDPMSPLLFNLAMDPLLCKLEESGKGYHRGQSSITAMAFIDDLVLLSDSWENMNTNISILETFCNLTGLKTQGQKCHGFYIKPTKKSYTINDCAAWTINGTPLNMIDPGESEKYLGLQFDPWIGIARSGLSTKLDFWLQRIDQAPLKPLQKTDILKTYTIPRLIYIADHSEVKSALLETLDQKIRTAVKEWLHLPPCTCDAILYSSTRDGGLGITKLAGLIPSVQARRLHRIAQSSDDTMKCFMEKEKMEQLHKKLWIQAGGDRENIPSIWEAPPSSEPPNNVSTNSEWEAPTQKDKFPKPCNWRKNEFKKWTKLASQGRGIVNFERDKISNHWIQYYRRIPHRKLLTALQLRANVYPTREFLARGRQDQYIKACRHCDADNESCAHIIGNCPVTQDARIKRHNYICELLLEEAKKKDWVVFKEPHIRDSNKELYKPDLIFVKDGRALVVDVTVRYEAAKSSLEEAAAEKVRKYKHLETEVRHLTNAKDVTFVGFPLGARGKWHQDNFKLLTELGLSKSRQVKMAETFSTVALFSSVDIVHMFASRARKSMVM

SEQ ID NO: 642 - protein, 1665 aa, synthetic construct
MAPKKKRKVNISGSSCGSPNSADTSSDFKDLWTKLKECHDREVQGLQVKVTKLKQERILDAQRLEEFFTKNQQLREQQKVLHETIKVLEDRLRAGLCDRCAVTEEHMRKKQQEFENIRQQNLKLITELMNERNTLQEENKKLSEQLQQKIENDQQHQAAELECEEDVIPDSPITAFSFSGVNRLRRKENPHVRYIEQTHTKLEHSVCANEMRKVSKSSTHPQHNPNENEILVADTYDQSQSPMAKAHGTSSYTPDKSSFNLATVVAETLGLGVQEESETQGPMSPLGDELYHCLEGNHKKQPFESGSETPGTSESATPEGSPKRKVSSAEGAAKEEPKRRSARLSAKPPAKVEAKPKKAAAKDKSSDKKVQTKGKRGAKGKQAEVANQETKEDLPAENGETKTEESPASDEAGEKEAKSDSGSETPGTSESATPESYEQLAPQPCVGETLHSSLPRDSELFVPEEGSSEKESEDAPKTSPPTPGKHGLEQTGEEKVMVTVPDKNPPCPCCGTRVNSVLNLIEHLKVSHGKRGVCFRCAKCGKENSNYHSVVCHFKKCRGPETEKAPAGEWICEVCNRDFTTKIGLGQHKRLAHPAVRNQERIVASQPKETSNRGAHKRCWTKEEEELLIRLEAQFEGNKNINKLIAEHITTKTAKQISDKRRLLSRKPAEEPREEPGTCHHTRRAAASLRTEPEMSHHAQAEDRDNGPGRRPLPGRAAAGGRTMDEIRRHPDKGNGQQRPTKQKSEEQLQAYYKKTLEERLSAGALNTFPRAFKQVMEGRDIKLVINQTAQDCFGCLESISQIRTATRDKKDTVTREKHPKKPFQKWMKKRAIKKGNYLRFQRLFYLDRGKLAKIILDDIECLSCDIPLSEIYSVFKTRWETTGSFKSLGDFKTYGKADNTAFRELITAKEIEKNVQEMSKGSAPGPDGITLGDVVKMDPEFSRTMEIFNLWLTTGKIPDMVRGCRTVLIPKSSKPDRLKDINNWRPITIGSILLRLFSRIVTARLSKACPLNPRQRGFIRAAGCSENLKLLQTIIWSAKREHRPLGVVFVDIAKAFDTVSHQHIIHALQQREVDPHIVGLVSNMYENISTYITTKRNTHTDKIQIRVGVKQGDPMSPLLFNLAMDPLLCKLEESGKGYHRGQSSITAMAFMDDLVLLSDSWENMNTNISILETFCNLTGLKTQGQKCHGFYIKPTKKSYTINDCAAWTINGTPLNMIDPGESEKYLGLQFDPWIGIARSGLSTKLDFWLQRIDQAPLKPLQKTDILKTYTIPRLIYIADHSEVKSALLETLDQKIRTAVKEWLHLPPCTCDAILYSSTRDGGLGITKLAGLIPSVQARRLHRIAQSSDDTMKCFMEKEKMEQLHKKLWIQAGGDRENIPSIWEAPPSSEPPNNVSTNSEWEAPTQKDKFPKPCNWRKNEFKKWTKLASQGRGIVNFERDKISNHWIQYYRRIPHRKLLTALQLRANVYPTREFLARGRQDQYIKACRHCDADNESCAHIIGNCPVTQDARIKRHNYICELLLEEAKKKDWVVFKEPHIRDSNKELYKPDLIFVKDGRALVVDVTVRYEAAKSSLEEAAAEKVRKYKHLETEVRHLTNAKDVTFVGFPLGARGKWHQDNFKLLTELGLSKSRQVKMAETFSTVALFSSVDIVHMFASRARKSMVM

SEQ ID NO: 643 - protein, 1665 aa, synthetic construct
MAPKKKRKVNISGSSCGSPNSADTSSDFKDLWTKLKECHDREVQGLQVKVTKLKQERILDAQRLEEFFTKNQQLREQQKVLHETIKVLEDRLRAGLCDRCAVTEEHMRKKQQEFENIRQQNLKLITELMNERNTLQEENKKLSEQLQQKIENDQQHQAAELECEEDVIPDSPITAFSFSGVNRLRRKENPHVRYIEQTHTKLEHSVCANEMRKVSKSSTHPQHNPNENEILVADTYDQSQSPMAKAHGTSSYTPDKSSFNLATVVAETLGLGVQEESETQGPMSPLGDELYHCLEGNHKKQPFESGSETPGTSESATPEGSPKRKVSSAEGAAKEEPKRRSARLSAKPPAKVEAKPKKAAAKDKSSDKKVQTKGKRGAKGKQAEVANQETKEDLPAENGETKTEESPASDEAGEKEAKSDSGSETPGTSESATPESYEQLAPQPCVGETLHSSLPRDSELFVPEEGSSEKESEDAPKTSPPTPGKHGLEQTGEEKVMVTVPDKNPPCPCCGTRVNSVLNLIEHLKVSHGKRGVCFRCAKCGKENSNYHSVVCHFKKCRGPETEKAPAGEWICEVCNRDFTTKIGLGQHKRLAHPAVRNQERIVASQPKETSNRGAHKRCWTKEEEELLIRLEAQFEGNKNINKLIAEHITTKTAKQISDKRRLLSRKPAEEPREEPGTCHHTRRAAASLRTEPEMSHHAQAEDRDNGPGRRPLPGRAAAGGRTMDEIRRHPDKGNGQQRPTKQKSEEQLQAYYKKTLEERLSAGALNTFPRAFKQVMEGRDIKLVINQTAQDCFGCLESISQIRTATRDKKDTVTREKHPKKPFQKWMKKRAIKKGNYLRFQRLFYLDRGKLAKIILDDIECLSCDIPLSEIYSVFKTRWETTGSFKSLGDFKTYGKADNTAFRELITAKEIEKNVQEMSKGSAPGPDGITLGDVVKMDPEFSRTMEIFNLWLTTGKIPDMVRGCRTVLIPKSSKPDRLKDINNWRPITIGSILLRLFSRIVTARLSKACPLNPRQRGFIRAAGCSENLKLLQTIIWSAKREHRPLGVVFVDIAKAFDTVSHQHIIHALQQREVDPHIVGLVSNMYENISTYITTKRNTHTDKIQIRVGVKQGDPMSPLLFNLAMDPLLCKLEESGKGYHRGQSSITAMAYADDLVLLSDSWENMNTNISILETFCNLTGLKTQGQKCHGFYIKPTKKSYTINDCAAWTINGTPLNMIDPGESEKYLGLQFDPWIGIARSGLSTKLDFWLQRIDQAPLKPLQKTDILKTYTIPRLIYIADHSEVKSALLETLDQKIRTAVKEWLHLPPCTCDAILYSSTRDGGLGITKLAGLIPSVQARRLHRIAQSSDDTMKCFMEKEKMEQLHKKLWIQAGGDRENIPSIWEAPPSSEPPNNVSTNSEWEAPTQKDKFPKPCNWRKNEFKKWTKLASQGRGIVNFERDKISNHWIQYYRRIPHRKLLTALQLRANVYPTREFLARGRQDQYIKACRHCDADNESCAHIIGNCPVTQDARIKRHNYICELLLEEAKKKDWVVFKEPHIRDSNKELYKPDLIFVKDGRALVVDVTVRYEAAKSSLEEAAAEKVRKYKHLETEVRHLTNAKDVTFVGFPLGARGKWHQDNFKLLTELGLSKSRQVKMAETFSTVALFSSVDIVHMFASRARKSMVM

SEQ ID NO: 644 - protein, 1665 aa, synthetic construct
MAPKKKRKVNISGSSCGSPNSADTSSDFKDLWTKLKECHDREVQGLQVKVTKLKQERILDAQRLEEFFTKNQQLREQQKVLHETIKVLEDRLRAGLCDRCAVTEEHMRKKQQEFENIRQQNLKLITELMNERNTLQEENKKLSEQLQQKIENDQQHQAAELECEEDVIPDSPITAFSFSGVNRLRRKENPHVRYIEQTHTKLEHSVCANEMRKVSKSSTHPQHNPNENEILVADTYDQSQSPMAKAHGTSSYTPDKSSFNLATVVAETLGLGVQEESETQGPMSPLGDELYHCLEGNHKKQPFESGSETPGTSESATPEGSPKRKVSSAEGAAKEEPKRRSARLSAKPPAKVEAKPKKAAAKDKSSDKKVQTKGKRGAKGKQAEVANQETKEDLPAENGETKTEESPASDEAGEKEAKSDSGSETPGTSESATPESYEQLAPQPCVGETLHSSLPRDSELFVPEEGSSEKESEDAPKTSPPTPGKHGLEQTGEEKVMVTVPDKNPPCPCCGTRVNSVLNLIEHLKVSHGKRGVCFRCAKCGKENSNYHSVVCHFKKCRGPETEKAPAGEWICEVCNRDFTTKIGLGQHKRLAHPAVRNQERIVASQPKETSNRGAHKRCWTKEEEELLIRLEAQFEGNKNINKLIAEHITTKTAKQISDKRRLLSRKPAEEPREEPGTCHHTRRAAASLRTEPEMSHHAQAEDRDNGPGRRPLPGRAAAGGRTMDEIRRHPDKGNGQQRPTKQKSEEQLQAYYKKTLEERLSAGALNTFPRAFKQVMEGRDIKLVINQTAQDCFGCLESISQIRTATRDKKDTVTREKHPKKPFQKWMKKRAIKKGNYLRFQRLFYLDRGKLAKIILDDIECLSCDIPLSEIYSVFKTRWETTGSFKSLGDFKTYGKADNTAFRELITAKEIEKNVQEMSKGSAPGPDGITLGDVVKMDPEFSRTMEIFNLWLTTGKIPDMVRGCRTVLIPKSSKPDRLKDINNWRPITIGSILLRLFSRIVTARLSKACPLNPRQRGFIRAAGCSENLKLLQTIIWSAKREHRPLGVVFVDIAKAFDTVSHQHIIHALQQREVDPHIVGLVSNMYENISTYITTKRNTHTDKIQIRVGVKQGDPMSPLLFNLAMDPLLCKLEESGKGYHRGQSSITAMAFHDDLVLLSDSWENMNTNISILETFCNLTGLKTQGQKCHGFYIKPTKKSYTINDCAAWTINGTPLNMIDPGESEKYLGLQFDPWIGIARSGLSTKLDFWLQRIDQAPLKPLQKTDILKTYTIPRLIYIADHSEVKSALLETLDQKIRTAVKEWLHLPPCTCDAILYSSTRDGGLGITKLAGLIPSVQARRLHRIAQSSDDTMKCFMEKEKMEQLHKKLWIQAGGDRENIPSIWEAPPSSEPPNNVSTNSEWEAPTQKDKFPKPCNWRKNEFKKWTKLASQGRGIVNFERDKISNHWIQYYRRIPHRKLLTALQLRANVYPTREFLARGRQDQYIKACRHCDADNESCAHIIGNCPVTQDARIKRHNYICELLLEEAKKKDWVVFKEPHIRDSNKELYKPDLIFVKDGRALVVDVTVRYEAAKSSLEEAAAEKVRKYKHLETEVRHLTNAKDVTFVGFPLGARGKWHQDNFKLLTELGLSKSRQVKMAETFSTVALFSSVDIVHMFASRARKSMVM

SEQ ID NO: 645 - protein, 1665 aa, synthetic construct
MAPKKKRKVNISGSSCGSPNSADTSSDFKDLWTKLKECHDREVQGLQVKVTKLKQERILDAQRLEEFFTKNQQLREQQKVLHETIKVLEDRLRAGLCDRCAVTEEHMRKKQQEFENIRQQNLKLITELMNERNTLQEENKKLSEQLQQKIENDQQHQAAELECEEDVIPDSPITAFSFSGVNRLRRKENPHVRYIEQTHTKLEHSVCANEMRKVSKSSTHPQHNPNENEILVADTYDQSQSPMAKAHGTSSYTPDKSSFNLATVVAETLGLGVQEESETQGPMSPLGDELYHCLEGNHKKQPFESGSETPGTSESATPEGSPKRKVSSAEGAAKEEPKRRSARLSAKPPAKVEAKPKKAAAKDKSSDKKVQTKGKRGAKGKQAEVANQETKEDLPAENGETKTEESPASDEAGEKEAKSDSGSETPGTSESATPESYEQLAPQPCVGETLHSSLPRDSELFVPEEGSSEKESEDAPKTSPPTPGKHGLEQTGEEKVMVTVPDKNPPCPCCGTRVNSVLNLIEHLKVSHGKRGVCFRCAKCGKENSNYHSVVCHFKKCRGPETEKAPAGEWICEVCNRDFTTKIGLGQHKRLAHPAVRNQERIVASQPKETSNRGAHKRCWTKEEEELLIRLEAQFEGNKNINKLIAEHITTKTAKQISDKRRLLSRKPAEEPREEPGTCHHTRRAAASLRTEPEMSHHAQAEDRDNGPGRRPLPGRAAAGGRTMDEIRRHPDKGNGQQRPTKQKSEEQLQAYYKKTLEERLSAGALNTFPRAFKQVMEGRDIKLVINQTAQDCFGCLESISQIRTATRDKKDTVTREKHPKKPFQKWMKKRAIKKGNYLRFQRLFYLDRGKLAKIILDDIECLSCDIPLSEIYSVFKTRWETTGSFKSLGDFKTYGKADNTAFRELITAKEIEKNVQEMSKGSAPGPDGITLGDVVKMDPEFSRTMEIFNLWLTTGKIPDMVRGCRTVLIPKSSKPDRLKDINNWRPITIGSILLRLFSRIVTARLSKACPLNPRQRGFIRAAGCSENLKLLQTIIWSAKREHRPLGVVFVDIAKAFDTVSHQHIIHALQQREVDPHIVGLVSNMYENISTYITTKRNTHTDKIQIRVGVKQGDPMSPLLFNLAMDPLLCKLEESGKGYHRGQSSITAMAFADDLVLLSDSWENMNTNISILETFCNLTGLKTQGQKCHGFYIKPTKKSYTINDCAAWTINGTPLNMIDPGESEKYLGLRFDPWIGIARSGLSTKLDFWLQRIDQAPLKPLQKTDILKTYTIPRLIYIADHSEVKSALLETLDQKIRTAVKEWLHLPPCTCDAILYSSTRDGGLGITKLAGLIPSVQARRLHRIAQSSDDTMKCFMEKEKMEQLHKKLWIQAGGDRENIPSIWEAPPSSEPPNNVSTNSEWEAPTQKDKFPKPCNWRKNEFKKWTKLASQGRGIVNFERDKISNHWIQYYRRIPHRKLLTALQLRANVYPTREFLARGRQDQYIKACRHCDADNESCAHIIGNCPVTQDARIKRHNYICELLLEEAKKKDWVVFKEPHIRDSNKELYKPDLIFVKDGRALVVDVTVRYEAAKSSLEEAAAEKVRKYKHLETEVRHLTNAKDVTFVGFPLGARGKWHQDNFKLLTELGLSKSRQVKMAETFSTVALFSSVDIVHMFASRARKSMVM

SEQ ID NO: 646 - protein, 1665 aa, synthetic construct
MAPKKKRKVNISGSSCGSPNSADTSSDFKDLWTKLKECHDREVQGLQVKVTKLKQERILDAQRLEEFFTKNQQLREQQKVLHETIKVLEDRLRAGLCDRCAVTEEHMRKKQQEFENIRQQNLKLITELMNERNTLQEENKKLSEQLQQKIENDQQHQAAELECEEDVIPDSPITAFSFSGVNRLRRKENPHVRYIEQTHTKLEHSVCANEMRKVSKSSTHPQHNPNENEILVADTYDQSQSPMAKAHGTSSYTPDKSSFNLATVVAETLGLGVQEESETQGPMSPLGDELYHCLEGNHKKQPFESGSETPGTSESATPEGSPKRKVSSAEGAAKEEPKRRSARLSAKPPAKVEAKPKKAAAKDKSSDKKVQTKGKRGAKGKQAEVANQETKEDLPAENGETKTEESPASDEAGEKEAKSDSGSETPGTSESATPESYEQLAPQPCVGETLHSSLPRDSELFVPEEGSSEKESEDAPKTSPPTPGKHGLEQTGEEKVMVTVPDKNPPCPCCGTRVNSVLNLIEHLKVSHGKRGVCFRCAKCGKENSNYHSVVCHFKKCRGPETEKAPAGEWICEVCNRDFTTKIGLGQHKRLAHPAVRNQERIVASQPKETSNRGAHKRCWTKEEEELLIRLEAQFEGNKNINKLIAEHITTKTAKQISDKRRLLSRKPAEEPREEPGTCHHTRRAAASLRTEPEMSHHAQAEDRDNGPGRRPLPGRAAAGGRTMDEIRRHPDKGNGQQRPTKQKSEEQLQAYYKKTLEERLSAGALNTFPRAFKQVMEGRDIKLVINQTAQDCFGCLESISQIRTATRDKKDTVTREKHPKKPFQKWMKKRAIKKGNYLRFQRLFYLDRGKLAKIILDDIECLSCDIPLSEIYSVFKTRWETTGSFKSLGDFKTYGKADNTAFRELITAKEIEKNVQEMSKGSAPGPDGITLGDVVKMDPEFSRTMEIFNLWLTTGKIPDMVRGCRTVLIPKSSKPDRLKDINNWRPITIGSILLRLFSRIVTARLSKACPLNPRQRGFIRAAGCSENLKLLQTIIWSAKREHRPLGVVFVDIAKAFDTVSHQHIIHALQQREVDPHIVGLVSNMYENISTYITTKRNTHTDKIQIRVGVKQGDPMSPLLFNLAMDPLLCKLEESGKGYHRGQSSITAMAFADDLVLLSDSWENMNTNISILETFCNLTGLKTQGQKCHGFYIKPTKKSYTINDCAAWTINGTPLNMIDPGESEKYIGLQFDPWIGIARSGLSTKLDFWLQRIDQAPLKPLQKTDILKTYTIPRLIYIADHSEVKSALLETLDQKIRTAVKEWLHLPPCTCDAILYSSTRDGGLGITKLAGLIPSVQARRLHRIAQSSDDTMKCFMEKEKMEQLHKKLWIQAGGDRENIPSIWEAPPSSEPPNNVSTNSEWEAPTQKDKFPKPCNWRKNEFKKWTKLASQGRGIVNFERDKISNHWIQYYRRIPHRKLLTALQLRANVYPTREFLARGRQDQYIKACRHCDADNESCAHIIGNCPVTQDARIKRHNYICELLLEEAKKKDWVVFKEPHIRDSNKELYKPDLIFVKDGRALVVDVTVRYEAAKSSLEEAAAEKVRKYKHLETEVRHLTNAKDVTFVGFPLGARGKWHQDNFKLLTELGLSKSRQVKMAETFSTVALFSSVDIVHMFASRARKSMVM

SEQ ID NO: 647 - protein, 1665 aa, synthetic construct
MAPKKKRKVNISGSSCGSPNSADTSSDFKDLWTKLKECHDREVQGLQVKVTKLKQERILDAQRLEEFFTKNQQLREQQKVLHETIKVLEDRLRAGLCDRCAVTEEHMRKKQQEFENIRQQNLKLITELMNERNTLQEENKKLSEQLQQKIENDQQHQAAELECEEDVIPDSPITAFSFSGVNRLRRKENPHVRYIEQTHTKLEHSVCANEMRKVSKSSTHPQHNPNENEILVADTYDQSQSPMAKAHGTSSYTPDKSSFNLATVVAETLGLGVQEESETQGPMSPLGDELYHCLEGNHKKQPFESGSETPGTSESATPEGSPKRKVSSAEGAAKEEPKRRSARLSAKPPAKVEAKPKKAAAKDKSSDKKVQTKGKRGAKGKQAEVANQETKEDLPAENGETKTEESPASDEAGEKEAKSDSGSETPGTSESATPESYEQLAPQPCVGETLHSSLPRDSELFVPEEGSSEKESEDAPKTSPPTPGKHGLEQTGEEKVMVTVPDKNPPCPCCGTRVNSVLNLIEHLKVSHGKRGVCFRCAKCGKENSNYHSVVCHFKKCRGPETEKAPAGEWICEVCNRDFTTKIGLGQHKRLAHPAVRNQERIVASQPKETSNRGAHKRCWTKEEEELLIRLEAQFEGNKNINKLIAEHITTKTAKQISDKRRLLSRKPAEEPREEPGTCHHTRRAAASLRTEPEMSHHAQAEDRDNGPGRRPLPGRAAAGGRTMDEIRRHPDKGNGQQRPTKQKSEEQLQAYYKKTLEERLSAGALNTFPRAFKQVMEGRDIKLVINQTAQDCFGCLESISQIRTATRDKKDTVTREKHPKKPFQKWMKKRAIKKGNYLRFQRLFYLDRGKLAKIILDDIECLSCDIPLSEIYSVFKTRWETTGSFKSLGDFKTYGKADNTAFRELITAKEIEKNVQEMSKGSAPGPDGITLGDVVKMDPEFSRTMEIFNLWLTTGKIPDMVRGCRTVLIPKSSKPDRLKDINNWRPITIGSILLRLFSRIVTARLSKACPLNPRQRGFIRAAGCSENLKLLQTIIWSAKREHRPLGVVFVDIAKAFDTVSHQHIIHALQQREVDPHIVGLVSNMYENISTYITTKRNTHTDKIQIRVGVKQGDPMSPLLFNLAMDPLLCKLEESGKGYHRGQSSITAMAFADDLVLLSDSWENMNTNISILETFCNLTGLKTQGQKCHGFYIKPTKKSYTINDCAAWTINGTPLNMIDPGSSEKYLGLQFDPWIGIARSGLSTKLDFWLQRIDQAPLKPLQKTDILKTYTIPRLIYIADHSEVKSALLETLDQKIRTAVKEWLHLPPCTCDAILYSSTRDGGLGITKLAGLIPSVQARRLHRIAQSSDDTMKCFMEKEKMEQLHKKLWIQAGGDRENIPSIWEAPPSSEPPNNVSTNSEWEAPTQKDKFPKPCNWRKNEFKKWTKLASQGRGIVNFERDKISNHWIQYYRRIPHRKLLTALQLRANVYPTREFLARGRQDQYIKACRHCDADNESCAHIIGNCPVTQDARIKRHNYICELLLEEAKKKDWVVFKEPHIRDSNKELYKPDLIFVKDGRALVVDVTVRYEAAKSSLEEAAAEKVRKYKHLETEVRHLTNAKDVTFVGFPLGARGKWHQDNFKLLTELGLSKSRQVKMAETFSTVALFSSVDIVHMFASRARKSMVM

SEQ ID NO: 648 - protein, 1665 aa, synthetic construct
MAPKKKRKVNISGSSCGSPNSADTSSDFKDLWTKLKECHDREVQGLQVKVTKLKQERILDAQRLEEFFTKNQQLREQQKVLHETIKVLEDRLRAGLCDRCAVTEEHMRKKQQEFENIRQQNLKLITELMNERNTLQEENKKLSEQLQQKIENDQQHQAAELECEEDVIPDSPITAFSFSGVNRLRRKENPHVRYIEQTHTKLEHSVCANEMRKVSKSSTHPQHNPNENEILVADTYDQSQSPMAKAHGTSSYTPDKSSFNLATVVAETLGLGVQEESETQGPMSPLGDELYHCLEGNHKKQPFESGSETPGTSESATPEGSPKRKVSSAEGAAKEEPKRRSARLSAKPPAKVEAKPKKAAAKDKSSDKKVQTKGKRGAKGKQAEVANQETKEDLPAENGETKTEESPASDEAGEKEAKSDSGSETPGTSESATPESYEQLAPQPCVGETLHSSLPRDSELFVPEEGSSEKESEDAPKTSPPTPGKHGLEQTGEEKVMVTVPDKNPPCPCCGTRVNSVLNLIEHLKVSHGKRGVCFRCAKCGKENSNYHSVVCHFKKCRGPETEKAPAGEWICEVCNRDFTTKIGLGQHKRLAHPAVRNQERIVASQPKETSNRGAHKRCWTKEEEELLIRLEAQFEGNKNINKLIAEHITTKTAKQISDKRRLLSRKPAEEPREEPGTCHHTRRAAASLRTEPEMSHHAQAEDRDNGPGRRPLPGRAAAGGRTMDEIRRHPDKGNGQQRPTKQKSEEQLQAYYKKTLEERLSAGALNTFPRAFKQVMEGRDIKLVINQTAQDCFGCLESISQIRTATRDKKDTVTREKHPKKPFQKWMKKRAIKKGNYLRFQRLFYLDRGKLAKIILDDIECLSCDIPLSEIYSVFKTRWETTGSFKSLGDFKTYGKADNTAFRELITAKEIEKNVQEMSKGSAPGPDGITLRDVVKMDPEFSRTMEIFNLWLTTGKIPDMVRGCRTVLIPKSSKPDRLKDINNWRPITIGSILLRLFSRIVTARLSKACPLNPRQRGFIRAAGCSENLKLLQTIIWSAKREHRPLGVVFVDIAKAFDTVSHQHIIHALQQREVDPHIVGLVSNMYENISTYITTKRNTHTDKIQIRVGVKQGDPMSPLLFNLAMDPLLCKLEESGKGYHRGQSSITAMAFADDLVLLSDSWENMNTNISILETFCNLTGLKTQGQKCHGFYIKPTKKSYTINDCAAWTINGTPLNMIDPGESEKYLGLQFDPWIGIARSGLSTKLDFWLQRIDQAPLKPLQKTDILKTYTIPRLIYIADHSEVKSALLETLDQKIRTAVKEWLHLPPCTCDAILYSSTRDGGLGITKLAGLIPSVQARRLHRIAQSSDDTMKCFMEKEKMEQLHKKLWIQAGGDRENIPSIWEAPPSSEPPNNVSTNSEWEAPTQKDKFPKPCNWRKNEFKKWTKLASQGRGIVNFERDKISNHWIQYYRRIPHRKLLTALQLRANVYPTREFLARGRQDQYIKACRHCDADNESCAHIIGNCPVTQDARIKRHNYICELLLEEAKKKDWVVFKEPHIRDSNKELYKPDLIFVKDGRALVVDVTVRYEAAKSSLEEAAAEKVRKYKHLETEVRHLTNAKDVTFVGFPLGARGKWHQDNFKLLTELGLSKSRQVKMAETFSTVALFSSVDIVHMFASRARKSMVM

SEQ ID NO: 649 - protein, 1665 aa, synthetic construct
MAPKKKRKVNISGSSCGSPNSADTSSDFKDLWTKLKECHDREVQGLQVKVTKLKQERILDAQRLEEFFTKNQQLREQQKVLHETIKVLEDRLRAGLCDRCAVTEEHMRKKQQEFENIRQQNLKLITELMNERNTLQEENKKLSEQLQQKIENDQQHQAAELECEEDVIPDSPITAFSFSGVNRLRRKENPHVRYIEQTHTKLEHSVCANEMRKVSKSSTHPQHNPNENEILVADTYDQSQSPMAKAHGTSSYTPDKSSFNLATVVAETLGLGVQEESETQGPMSPLGDELYHCLEGNHKKQPFESGSETPGTSESATPEGSPKRKVSSAEGAAKEEPKRRSARLSAKPPAKVEAKPKKAAAKDKSSDKKVQTKGKRGAKGKQAEVANQETKEDLPAENGETKTEESPASDEAGEKEAKSDSGSETPGTSESATPESYEQLAPQPCVGETLHSSLPRDSELFVPEEGSSEKESEDAPKTSPPTPGKHGLEQTGEEKVMVTVPDKNPPCPCCGTRVNSVLNLIEHLKVSHGKRGVCFRCAKCGKENSNYHSVVCHFKKCRGPETEKAPAGEWICEVCNRDFTTKIGLGQHKRLAHPAVRNQERIVASQPKETSNRGAHKRCWTKEEEELLIRLEAQFEGNKNINKLIAEHITTKTAKQISDKRRLLSRKPAEEPREEPGTCHHTRRAAASLRTEPEMSHHAQAEDRDNGPGRRPLPGRAAAGGRTMDEIRRHPDKGNGQQRPTKQKSEEQLQAYYKKTLEERLSAGALNTFPRAFKQVMEGRDIKLVINQTAQDCFGCLESISQIRTATRDKKDTVTREKHPKKPFQKWMKKRAIKKGNYLRFQRLFYLDRGKLAKIILDDIECLSCDIPLSEIYSVFKTRWETTGSFKSLGDFKTYGKADNTAFRELITAKEIEKNVREMSKGSAPGPDGITLGDVVKMDPEFSRTMEIFNLWLTTGKIPDMVRGCRTVLIPKSSKPDRLKDINNWRPITIGSILLRLFSRIVTARLSKACPLNPRQRGFIRAAGCSENLKLLQTIIWSAKREHRPLGVVFVDIAKAFDTVSHQHIIHALQQREVDPHIVGLVSNMYENISTYITTKRNTHTDKIQIRVGVKQGDPMSPLLFNLAMDPLLCKLEESGKGYHRGQSSITAMAFADDLVLLSDSWENMNTNISILETFCNLTGLKTQGQKCHGFYIKPTKKSYTINDCAAWTINGTPLNMIDPGESEKYLGLQFDPWIGIARSGLSTKLDFWLQRIDQAPLKPLQKTDILKTYTIPRLIYIADHSEVKSALLETLDQKIRTAVKEWLHLPPCTCDAILYSSTRDGGLGITKLAGLIPSVQARRLHRIAQSSDDTMKCFMEKEKMEQLHKKLWIQAGGDRENIPSIWEAPPSSEPPNNVSTNSEWEAPTQKDKFPKPCNWRKNEFKKWTKLASQGRGIVNFERDKISNHWIQYYRRIPHRKLLTALQLRANVYPTREFLARGRQDQYIKACRHCDADNESCAHIIGNCPVTQDARIKRHNYICELLLEEAKKKDWVVFKEPHIRDSNKELYKPDLIFVKDGRALVVDVTVRYEAAKSSLEEAAAEKVRKYKHLETEVRHLTNAKDVTFVGFPLGARGKWHQDNFKLLTELGLSKSRQVKMAETFSTVALFSSVDIVHMFASRARKSMVM

SEQ ID NO: 650 - protein, 1665 aa, synthetic construct
MAPKKKRKVNISGSSCGSPNSADTSSDFKDLWTKLKECHDREVQGLQVKVTKLKQERILDAQRLEEFFTKNQQLREQQKVLHETIKVLEDRLRAGLCDRCAVTEEHMRKKQQEFENIRQQNLKLITELMNERNTLQEENKKLSEQLQQKIENDQQHQAAELECEEDVIPDSPITAFSFSGVNRLRRKENPHVRYIEQTHTKLEHSVCANEMRKVSKSSTHPQHNPNENEILVADTYDQSQSPMAKAHGTSSYTPDKSSFNLATVVAETLGLGVQEESETQGPMSPLGDELYHCLEGNHKKQPFESGSETPGTSESATPEGSPKRKVSSAEGAAKEEPKRRSARLSAKPPAKVEAKPKKAAAKDKSSDKKVQTKGKRGAKGKQAEVANQETKEDLPAENGETKTEESPASDEAGEKEAKSDSGSETPGTSESATPESYEQLAPQPCVGETLHSSLPRDSELFVPEEGSSEKESEDAPKTSPPTPGKHGLEQTGEEKVMVTVPDKNPPCPCCGTRVNSVLNLIEHLKVSHGKRGVCFRCAKCGKENSNYHSVVCHFKKCRGPETEKAPAGEWICEVCNRDFTTKIGLGQHKRLAHPAVRNQERIVASQPKETSNRGAHKRCWTKEEEELLIRLEAQFEGNKNINKLIAEHITTKTAKQISDKRRLLSRKPAEEPREEPGTCHHTRRAAASLRTEPEMSHHAQAEDRDNGPGRRPLPGRAAAGGRTMDEIRRHPDKGNGQQRPTKQKSEEQLQAYYKKTLEERLSAGALNTFPRAFKQVMEGRDIKLVINQTAQDCFGCLESISQIRTATRDKKDTVTREKHPKKPFQKWMKKRAIKKGNYLRFQRLFYLDRGKLAKIILDDIECLSCDIPLSEIYSVFKTRWETTGSFKSLGDFKTYGKADNTAFRELITAKEIEKNVQEMSKGSAPGPDGITLGDVVKMDPEFSRTMEIFNLWLTTGKIPDMVRGCRTVLIPKSSKPDRLKDINNWRPITIGSILLRLFSRIVTARLSKACPLNPRQRGFIRAAGCSENLKLLQTIIWSAKREHRPLGVVFVDIAKAFDTVSHQHIIHALQQREVDPHIVGLVSNMYENISTYITTKRNTHTDKIQIRVGVKQGDPMSPLLFNLAMDPLLCKLEESGKGYHRGQSSITAMAFADDLVLLSDSWENMNTNISILETFCNLTGLKTQGQKCHGFYIKPTKKSYTINDCAAWTINGTPLNMIDPGESEKYLGLQFDPWIGIARSGLSTKLDRWLQRIDQAPLKPLQKTDILKTYTIPRLIYIADHSEVKSALLETLDQKIRTAVKEWLHLPPCTCDAILYSSTRDGGLGITKLAGLIPSVQARRLHRIAQSSDDTMKCFMEKEKMEQLHKKLWIQAGGDRENIPSIWEAPPSSEPPNNVSTNSEWEAPTQKDKFPKPCNWRKNEFKKWTKLASQGRGIVNFERDKISNHWIQYYRRIPHRKLLTALQLRANVYPTREFLARGRQDQYIKACRHCDADNESCAHIIGNCPVTQDARIKRHNYICELLLEEAKKKDWVVFKEPHIRDSNKELYKPDLIFVKDGRALVVDVTVRYEAAKSSLEEAAAEKVRKYKHLETEVRHLTNAKDVTFVGFPLGARGKWHQDNFKLLTELGLSKSRQVKMAETFSTVALFSSVDIVHMFASRARKSMVM

SEQ ID NO: 651 - protein, 1665 aa, synthetic construct
MAPKKKRKVNISGSSCGSPNSADTSSDFKDLWTKLKECHDREVQGLQVKVTKLKQERILDAQRLEEFFTKNQQLREQQKVLHETIKVLEDRLRAGLCDRCAVTEEHMRKKQQEFENIRQQNLKLITELMNERNTLQEENKKLSEQLQQKIENDQQHQAAELECEEDVIPDSPITAFSFSGVNRLRRKENPHVRYIEQTHTKLEHSVCANEMRKVSKSSTHPQHNPNENEILVADTYDQSQSPMAKAHGTSSYTPDKSSFNLATVVAETLGLGVQEESETQGPMSPLGDELYHCLEGNHKKQPFESGSETPGTSESATPEGSPKRKVSSAEGAAKEEPKRRSARLSAKPPAKVEAKPKKAAAKDKSSDKKVQTKGKRGAKGKQAEVANQETKEDLPAENGETKTEESPASDEAGEKEAKSDSGSETPGTSESATPESYEQLAPQPCVGETLHSSLPRDSELFVPEEGSSEKESEDAPKTSPPTPGKHGLEQTGEEKVMVTVPWKNPPCPCCGTRVNSVLNLIEHLKVSHGKRGVCFRCAKCGKENSNYHSVVCHFKKCRGPETEKAPAGEWICEVCNRDFTTKIGLGQHKRLAHPAVRNQERIVASQPKETSNRGAHKRCWTKEEEELLIRLEAQFEGNKNINKLIAEHITTKTAKQISDKRRLLSRKPAEEPREEPGTCHHTRRAAASLRTEPEMSHHAQAEDRDNGPGRRPLPGRAAAGGRTMDEIRRHPDKGNGQQRPTKQKSEEQLQAYYKKTLEERLSAGALNTFPRAFKQVMEGRDIKLVINQTAQDCFGCLESISQIRTATRDKKDTVTREKHPKKPFQKWMKKRAIKKGNYLRFQRLFYLDRGKLAKIILDDIECLSCDIPLSEIYSVFKTRWETTGSFKSLGDFKTYGKADNTAFRELITAKEIEKNVQEMSKGSAPGPDGITLGDVVKMDPEFSRTMEIFNLWLTTGKIPDMVRGCRTVLIPKSSKPDRLKDINNWRPITIGSILLRLFSRIVTARLSKACPLNPRQRGFIRAAGCSENLKLLQTIIWSAKREHRPLGVVFVDIAKAFDTVSHQHIIHALQQREVDPHIVGLVSNMYENISTYITTKRNTHTDKIQIRVGVKQGDPMSPLLFNLAMDPLLCKLEESGKGYHRGQSSITAMAFADDLVLLSDSWENMNTNISILETFCNLTGLKTQGQKCHGFYIKPTKDSYTINDCAAWTINGTPLNMIDPGESEKYLGLQFDPWIGIARSGLSTKLDFWLQRIDQAPLKPLQKTDILKTYTIPRLIYIADHSEVKSALLETLDQKIRTAVKEWLHLPPCTCDAILYSSTRDGGLGITKLAGLIPSVQARRLHRIAQSSDDTMKCFMEKEKMEQLHKKLWIQAGGDRENIPSIWEAPPSSEPPNNVSTNSEWEAPTQKDKFPKPCNWRKNEFKKWTKLASQGRGIVNFERDKISNHWIQYYRRIPHRKLLTALQLRANVYPTREFLARGRQDQYIKACRHCDADNESCAHIIGNCPVTQDARIKRHNYICELLLEEAKKKDWVVFKEPHIRDSNKELYKPDLIFVKDGRALVVDVTVRYEAAKSSLEEAAAEKVRKYKHLETEVRHLTNAKDVTFVGFPLGARGKWHQDNFKLLTELGLSKSRQVKMAETFSTVALFSSVDIVHMFASRARKSMVM

SEQ ID NO: 652 - protein, 1665 aa, synthetic construct
MAPKKKRKVNISGSSCGSPNSADTSSDFKDLWTKLKECHDREVQGLQVKVTKLKQERILDAQRLEEFFTKNQQLREQQKVLHETIKVLEDRLRAGLCDRCAVTEEHMRKKQQEFENIRQQNLKLITELMNERNTLQEENKKLSEQLQQKIENDQQHQAAELECEEDVIPDSPITAFSFSGVNRLRRKENPHVRYIEQTHTKLEHSVCANEMRKVSKSSTHPQHNPNENEILVADTYDQSQSPMAKAHGTSSYTPDKSSFNLATVVAETLGLGVQEESETQGPMSPLGDELYHCLEGNHKKQPFESGSETPGTSESATPEGSPKRKVSSAEGAAKEEPKRRSARLSAKPPAKVEAKPKKAAAKDKSSDKKVQTKGKRGAKGKQAEVANQETKEDLPAENGETKTEESPASDEAGEKEAKSDSGSETPGTSESATPESYEQLAPQPCVGETLHSSLPRDSELFVPEEGSSEKESEDAPKTSPPTPGKHGLEQTGEEKVMVTVPDKNPPCPCCGTRVNSVLNLIEHLKVSHGKRGVCFRCAKCGKENSNYHSVVCHFKKCRGPETEKAPAGEWICEVCNRDFTTKIGLGQHKRLAHPAVRNQERIVASQPKETSNRGAHKRVWTKEEEELLIRLEAQFEGNKNINKLIAEHITTKTAKQISDKRRLLSRKPAEEPREEPGTCHHTRRAAASLRTEPEMSHHAQAEDRDNGPGRRPLPGRAAAGGRTMDEIRRHPDKGNGQQRPTKQKSEEQLQAYYKKTLEERLSAGALNTFPRAFKQVMEGRDIKLVINQTAQDCFGCLESISQIRTATRDKKDTVTREKHPKKPFQKWMKKRAIKKGNYLRFQRLFYLDRGKLAKIILDDIECLSCDIPLSEIYSVFKTRWETTGSFKSLGDFKTYGKADNTAFRELITAKEIEKNVQEMSKGSAPGPDGITLGDVVKMDPEFSRTMEIFNLWLTTGKIPDMVRGCRTVLIPKSSKPDRLKDINNWRPITIGSILLRLFSRIVTARLSKACPLNPRQRGFIRAAGCSENLKLLQTIIWSAKREHRPLGVVFVDIAKAFDTVSHQHIIHALQQREVDPHIVGLVSNMYENISTYITTKRNTHTDKIQIRVGVKQGDPMSPLLFNLAMDPLLCKLEESGKGYHRGQSSITAMAFADDLVLLSDSWENMNTNISILETFCNLTGLKTQGQKCHGFYIKPTKDSYTINDCAAWTINGTPLNMIDPGESEKYLGLQFDPWIGIARSGLSTKLDFWLQRIDQAPLKPLQKTDILKTYTIPRLIYIADHSEVKSALLETLDQKIRTAVKEWLHLPPCTCDAILYSSTRDGGLGITKLAGLIPSVQARRLHRIAQSSDDTMKCFMEKEKMEQLHKKLWIQAGGDRENIPSIWEAPPSSEPPNNVSTNSEWEAPTQKDKFPKPCNWRKNEFKKWTKLASQGRGIVNFERDKISNHWIQYYRRIPHRKLLTALQLRANVYPTREFLARGRQDQYIKACRHCDADNESCAHIIGNCPVTQDARIKRHNYICELLLEEAKKKDWVVFKEPHIRDSNKELYKPDLIFVKDGRALVVDVTVRYEAAKSSLEEAAAEKVRKYKHLETEVRHLTNAKDVTFVGFPLGARGKWHQDNFKLLTELGLSKSRQVKMAETFSTVALFSSVDIVHMFASRARKSMVM

SEQ ID NO: 653 - protein, 1665 aa, synthetic construct
MAPKKKRKVNISGSSCGSPNSADTSSDFKDLWTKLKECHDREVQGLQVKVTKLKQERILDAQRLEEFFTKNQQLREQQKVLHETIKVLEDRLRAGLCDRCAVTEEHMRKKQQEFENIRQQNLKLITELMNERNTLQEENKKLSEQLQQKIENDQQHQAAELECEEDVIPDSPITAFSFSGVNRLRRKENPHVRYIEQTHTKLEHSVCANEMRKVSKSSTHPQHNPNENEILVADTYDQSQSPMAKAHGTSSYTPDKSSFNLATVVAETLGLGVQEESETQGPMSPLGDELYHCLEGNHKKQPFESGSETPGTSESATPEGSPKRKVSSAEGAAKEEPKRRSARLSAKPPAKVEAKPKKAAAKDKSSDKKVQTKGKRGAKGKQAEVANQETKEDLPAENGETKTEESPASDEAGEKEAKSDSGSETPGTSESATPESYEQLAPQPCVGETLHSSLPRDSELFVPEEGSSEKESEDAPKTSPPTPGKHGLEQTGEEKVMVTVPDKNPPCPCCGTRVNSVLNLIEHLKVSHGKRGVCFRCAKCGKENSNYHSVVCHFKKCRGPETEKAPAGEWICEVCNRDFTTKIGLGQHKRLAHPAVRNQERIVASQPKETSNRGAHKRCWTKEEEELLIRLEAQFEGNKNINKLIAEHITTKTAKQISDKRRLLSRKPAEEPREEPGTCHHTRRAAASLRTEPEMSHHAQAEDRDNGPGRRPLPGRAAAGGRTMDEIRRHPDKGNGQQRPTKQKSEEQLQAYYKKTLEERLSAGALNTFPRAFKQVMEGRDIKLVINQTAQDCFGCLESISQIRTATRDKKDTVTREKHPKKPFQKWMKKRAIKKGNYLRFQRLFYLDRGKLAKIILDDIECLSCDIPLSEIYSVFKTRWETTGSFKSLGDFKTYGKADNTAFRELITAKEIEKNVQEMSKGSAPGPDGITLGDVVKMDPEFSVTMEIFNLWLTTGKIPDMVRGCRTVLIPKSSKPDRLKDINNWRPITIGSILLRLFSRIVTARLSKACPLNPRQRGFIRAAGCSENLKLLQTIIWSAKREHRPLGVVFVDIAKAFDTVSHQHIIHALQQREVDPHIVGLVSNMYENISTYITTKRNTHTDKIQIRVGVKQGDPMSPLLFNLAMDPLLCKLEESGKGYHRGQSSITAMAFADDLVLLSDSWENMNTNISILETFCNLTGLKTQGQKCHGFYIKPTKDSYTINDCAAWTINGTPLNMIDPGESEKYLGLQFDPWIGIARSGLSTKLDFWLQRIDQAPLKPLQKTDILKTYTIPRLIYIADHSEVKSALLETLDQKIRTAVKEWLHLPPCTCDAILYSSTRDGGLGITKLAGLIPSVQARRLHRIAQSSDDTMKCFMEKEKMEQLHKKLWIQAGGDRENIPSIWEAPPSSEPPNNVSTNSEWEAPTQKDKFPKPCNWRKNEFKKWTKLASQGRGIVNFERDKISNHWIQYYRRIPHRKLLTALQLRANVYPTREFLARGRQDQYIKACRHCDADNESCAHIIGNCPVTQDARIKRHNYICELLLEEAKKKDWVVFKEPHIRDSNKELYKPDLIFVKDGRALVVDVTVRYEAAKSSLEEAAAEKVRKYKHLETEVRHLTNAKDVTFVGFPLGARGKWHQDNFKLLTELGLSKSRQVKMAETFSTVALFSSVDIVHMFASRARKSMVM

SEQ ID NO: 654 - protein, 1665 aa, synthetic construct
MAPKKKRKVNISGSSCGSPNSADTSSDFKDLWTKLKECHDREVQGLQVKVTKLKQERILDAQRLEEFFTKNQQLREQQKVLHETIKVLEDRLRAGLCDRCAVTEEHMRKKQQEFENIRQQNLKLITELMNERNTLQEENKKLSEQLQQKIENDQQHQAAELECEEDVIPDSPITAFSFSGVNRLRRKENPHVRYIEQTHTKLEHSVCANEMRKVSKSSTHPQHNPNENEILVADTYDQSQSPMAKAHGTSSYTPDKSSFNLATVVAETLGLGVQEESETQGPMSPLGDELYHCLEGNHKKQPFESGSETPGTSESATPEGSPKRKVSSAEGAAKEEPKRRSARLSAKPPAKVEAKPKKAAAKDKSSDKKVQTKGKRGAKGKQAEVANQETKEDLPAENGETKTEESPASDEAGEKEAKSDSGSETPGTSESATPESYEQLAPQPCVGETLHSSLPRDSELFVPEEGSSEKESEDAPKTSPPTPGKHGLEQTGEEKVMVTVPDKNPPCPCCGTRVNSVLNLIEHLKVSHGKRGVCFRCAKCGKENSNYHSVVCHFKKCRGPETEKAPAGEWICEVCNRDFTTKIGLGQHKRLAHPAVRNQERIVASQPKETSNRGAHKRCWTKEEEELLIRLEAQFEGNKNINKLIAEHITTKTAKQISDKRRLLSRKPAEEPREEPGTCHHTRRAAASLRTEPEMSHHAQAEDRDNGPGRRPLPGRAAAGGRTMDEIRRHPDKGNGQQRPTKQKSEEQLQAYYKKTLEERLSAGALNTFPRAFKQVMEGRDIKLVINQTAQDCFGCLESISQIRTATRDKKDTVTREKHPKKPFQKWMKKRAIKKGNYLRFQRLFYLDRGKLAKIILDDIECLSCDIPLSEIYSVFKTRWETTGSFKSLGDFKTYGKADNTAFRELITAKEIEKNVQEMSKGSAPGPDGITLGDVVKMDPEFSRTMEIFNLWLTTGKIPDMVRGCRTVLIPKSSKPDRLKDINNWRPITIGSILLRLFSRIVTARLSKACPLNPRQRGFIRAAGCSENLKLLQTIIWSAKREHRPLGVVFVDIAKAFDTVSHQHIIHALQQREVDPHIVGLVSNMYENISTYITTKRNTHTDKIQIRVGVKQGDPMSPLLFNLAMDPLLCKLEESGKGYHRGQSSITAMAFADDLVLLSDSWENMNTNISILETFCNLTGLKTQGQKCHGFYIKPTKDSYTINDCAAWTINGTPLNMIDPGESEKYLGLQFDPWIGIARSGLSTKLDFWLQRIDQAPLKPLQKVDILKTYTIPRLIYIADHSEVKSALLETLDQKIRTAVKEWLHLPPCTCDAILYSSTRDGGLGITKLAGLIPSVQARRLHRIAQSSDDTMKCFMEKEKMEQLHKKLWIQAGGDRENIPSIWEAPPSSEPPNNVSTNSEWEAPTQKDKFPKPCNWRKNEFKKWTKLASQGRGIVNFERDKISNHWIQYYRRIPHRKLLTALQLRANVYPTREFLARGRQDQYIKACRHCDADNESCAHIIGNCPVTQDARIKRHNYICELLLEEAKKKDWVVFKEPHIRDSNKELYKPDLIFVKDGRALVVDVTVRYEAAKSSLEEAAAEKVRKYKHLETEVRHLTNAKDVTFVGFPLGARGKWHQDNFKLLTELGLSKSRQVKMAETFSTVALFSSVDIVHMFASRARKSMVM

SEQ ID NO: 655 - protein, 1665 aa, synthetic construct
MAPKKKRKVNISGSSCGSPNSADTSSDFKDLWTKLKECHDREVQGLQVKVTKLKQERILDAQRLEEFFTKNQQLREQQKVLHETIKVLEDRLRAGLCDRCAVTEEHMRKKQQEFENIRQQNLKLITELMNERNTLQEENKKLSEQLQQKIENDQQHQAAELECEEDVIPDSPITAFSFSGVNRLRRKENPHVRYIEQTHTKLEHSVCANEMRKVSKSSTHPQHNPNENEILVADTYDQSQSPMAKAHGTSSYTPDKSSFNLATVVAETLGLGVQEESETQGPMSPLGDELYHCLEGNHKKQPFESGSETPGTSESATPEGSPKRKVSSAEGAAKEEPKRRSARLSAKPPAKVEAKPKKAAAKDKSSDKKVQTKGKRGAKGKQAEVANQETKEDLPAENGETKTEESPASDEAGEKEAKSDSGSETPGTSESATPESYEQLAPQPCVGETLHSSLPRDSELFVPEEGSSEKESEDAPKTSPPTPGKHGLEQTGEEKVMVTVPDKNPPCPCCGTRVNSVLNLIEHLKVSHGKRGVCFRCAKCGKENSNYHSVVCHFKKCRGPETEKAPAGEWICEVCNRDFTTKIGLGQHKRLAHPAVRNQERIVASQPKETSNRGAHKRCWTKEEEELLIRLEAQFEGNKNINKLIAEHITTKTAKQISDKRRLLSRKPAEEPREEPGTCHHTRRAAASLRTEPEMSHHAQAEDRDNGPGRRPLPGRAAAGGRTMDEIRRHPDKGNGQQRPTKQKSEEQLQAYYKKTLEERLSAGALNTFPRAFKQVMEGRDIKLVINQTAQDCFGCLESISQIRTATRDKKDTVTREKHPKKPFQKWMKKRAIKKGNYLRFQRLFYLDRGKLAKIILDDIECLSCDIPLSEIYSVFKTRWETTGSFKSLGDFKTYGKADNTAFRELITAKEIEKNVQEMSKGSAPGPDGITLGDVVKMDPEFSRTMEIFNLWLTTGKIPDMVRECRTVLIPKSSKPDRLKDINNWRPITIGSILLRLFSRIVTARLSKACPLNPRQRGFIRAAGCSENLKLLQTIIWSAKREHRPLGVVFVDIAKAFDTVSHQHIIHALQQREVDPHIVGLVSNMYENISTYITTKRNTHTDKIQIRVGVKQGDPMSPLLFNLAMDPLLCKLEESGKGYHRGQSSITAMAFADDLVLLSDSWENMNTNISILETFCNLTGLKTQGQKCHGFYIKPTKDSYTINDCAAWTINGTPLNMIDPGESEKYLGLQFDPWIGIARSGLSTKLDFWLQRIDQAPLKPLQKTDILKTYTIPRLIYIADHSEVKSALLETLDQKIRTAVKEWLHLPPCTCDAILYSSTRDGGLGITKLAGLIPSVQARRLHRIAQSSDDTMKCFMEKEKMEQLHKKLWIQAGGDRENIPSIWEAPPSSEPPNNVSTNSEWEAPTQKDKFPKPCNWRKNEFKKWTKLASQGRGIVNFERDKISNHWIQYYRRIPHRKLLTALQLRANVYPTREFLARGRQDQYIKACRHCDADNESCAHIIGNCPVTQDARIKRHNYICELLLEEAKKKDWVVFKEPHIRDSNKELYKPDLIFVKDGRALVVDVTVRYEAAKSSLEEAAAEKVRKYKHLETEVRHLTNAKDVTFVGFPLGARGKWHQDNFKLLTELGLSKSRQVKMAETFSTVALFSSVDIVHMFASRARKSMVM

SEQ ID NO: 656 - protein, 1665 aa, synthetic construct
MAPKKKRKVNISGSSCGSPNSADTSSDFKDLWTKLKECHDREVQGLQVKVTKLKQERILDAQRLEEFFTKNQQLREQQKVLHETIKVLEDRLRAGLCDRCAVTEEHMRKKQQEFENIRQQNLKLITELMNERNTLQEENKKLSEQLQQKIENDQQHQAAELECEEDVIPDSPITAFSFSGVNRLRRKENPHVRYIEQTHTKLEHSVCANEMRKVSKSSTHPQHNPNENEILVADTYDQSQSPMAKAHGTSSYTPDKSSFNLATVVAETLGLGVQEESETQGPMSPLGDELYHCLEGNHKKQPFESGSETPGTSESATPEGSPKRKVSSAEGAAKEEPKRRSARLSAKPPAKVEAKPKKAAAKDKSSDKKVQTKGKRGAKGKQAEVANQETKEDLPAENGETKTEESPASDEAGEKEAKSDSGSETPGTSESATPESYEQLAPQPCVGETLHSSLPRDSELFVPEEGSSEKESEDAPKTSPPTPGKHGLEQTGEEKVMVTVPDKNPPCPCCGTRVNSVLNLIEHLKVSHGKRGVCFRCAKCGKENSNYHSVVCHFKKCRGPETEKAPAGEWICEVCNRDFTTKIGLGQHKRLAHPAVRNQERIVASQPKETSNRGAHKRCWTKEEEELLIRLEAQFEGNKNINKLIAEHITTKTAKQISDKRRLLSRKPAEEPREEPGTCHHTRRAAASLRTEPEMSHHAQAEDRDNGPGRRPLPGRAAAGGRTMDEIRRHPDKGNGQQRPTKQKSEEQLQAYYKKTLEERLSAGALNTFPRAFKQVMEGRDIKLVINQTAQDCFGCLESISQIRTATRDKKDTVTREKHPKKPFQKWMKKRAIKKGNYLRFQRLFYLDRGKLAKIILDDIECLSCDIPLSEIYSVFKTRWETTGSFKSLGDFKTYGKADNTAFRELITAKEIEKNVQEMSKGSAPGPDGITLGDVVKMDPEFSRTMEIFNLWLLTGKIPDMVRGCRTVLIPKSSKPDRLKDINNWRPITIGSILLRLFSRIVTARLSKACPLNPRQRGFIRAAGCSENLKLLQTIIWSAKREHRPLGVVFVDIAKAFDTVSHQHIIHALQQREVDPHIVGLVSNMYENISTYITTKRNTHTDKIQIRVGVKQGDPMSPLLFNLAMDPLLCKLEESGKGYHRGQSSITAMAFADDLVLLSDSWENMNTNISILETFCNLTGLKTQGQKCHGFYIKPTKDSYTINDCAAWTINGTPLNMIDPGESEKYLGLQFDPWIGIARSGLSTKLDFWLQRIDQAPLKPLQKTDILKTYTIPRLIYIADHSEVKSALLETLDQKIRTAVKEWLHLPPCTCDAILYSSTRDGGLGITKLAGLIPSVQARRLHRIAQSSDDTMKCFMEKEKMEQLHKKLWIQAGGDRENIPSIWEAPPSSEPPNNVSTNSEWEAPTQKDKFPKPCNWRKNEFKKWTKLASQGRGIVNFERDKISNHWIQYYRRIPHRKLLTALQLRANVYPTREFLARGRQDQYIKACRHCDADNESCAHIIGNCPVTQDARIKRHNYICELLLEEAKKKDWVVFKEPHIRDSNKELYKPDLIFVKDGRALVVDVTVRYEAAKSSLEEAAAEKVRKYKHLETEVRHLTNAKDVTFVGFPLGARGKWHQDNFKLLTELGLSKSRQVKMAETFSTVALFSSVDIVHMFASRARKSMVM

SEQ ID NO: 657 - protein, 1665 aa, synthetic construct
MAPKKKRKVNISGSSCGSPNSADTSSDFKDLWTKLKECHDREVQGLQVKVTKLKQERILDAQRLEEFFTKNQQLREQQKVLHETIKVLEDRLRAGLCDRCAVTEEHMRKKQQEFENIRQQNLKLITELMNERNTLQEENKKLSEQLQQKIENDQQHQAAELECEEDVIPDSPITAFSFSGVNRLRRKENPHVRYIEQTHTKLEHSVCANEMRKVSKSSTHPQHNPNENEILVADTYDQSQSPMAKAHGTSSYTPDKSSFNLATVVAETLGLGVQEESETQGPMSPLGDELYHCLEGNHKKQPFESGSETPGTSESATPEGSPKRKVSSAEGAAKEEPKRRSARLSAKPPAKVEAKPKKAAAKDKSSDKKVQTKGKRGAKGKQAEVANQETKEDLPAENGETKTEESPASDEAGEKEAKSDSGSETPGTSESATPESYEQLAPQPCVGETLHSSLPRDSELFVPEEGSSEKESEDAPKTSPPTPGKHGLEQTGEEKVMVTVPDKNPPCPCCGTRVNSVLNLIEHLKVSHGKRGVCFRCAKCGKENSNYHSVVCHFKKCRGPETEKAPAGEWICEVCNRDFTTKIGLGQHKRLAHPAVRNQERIVASQPKETSNRGAHKRCWTKEEEELLIRLEAQFEGNKNINKLIAEHITTKTAKQISDKRRLLSRKPAEEPREEPGTCHHTRRAAASLRTEPEMSHHAQAEDRDNGPGRRPLPGRAAAGGRTMDEIRRHPDKGNGQQRPTKQKSEEQLQAYYKKTLEERLSAGALNTFPRAFKQVMEGRDIKLVINQTAQDCFGCLESISQIRTATRDKKDTVTREKHPKKPFQKWMKKRAIKKGNYLRFQRLFYLDRGKLAKIILDDIECLSCDIPLSEIYSVFKTRWETTGSFKSLGDFKTYGKADNTAFRELITAKEIEKNVQEMSKGSAPGPDGITLGDVVKMDPEFSRTMEIFNLWLTTGKIPDMVRGCRTVLIPKSSKPDRLKDINNWRPITIGSILLRLFSRIVTARLSKACPLNPRQRGFIRAAGCSENLKLLQTIIWSAKREHRPLGVVFVDIAKAFDTVSHQHIIHALQQREVDPHIVGLVSNMYENISTYITTKRNTHTDKIQIRVGVKQGDPMSPLLFNLAMDPLLCKLEESGKGYHRGQSSITAMAFADDLVLLSDSWENMNTNISILETFCNLTGLKTQGQKCHGFYIKPTKDSYTINDCAAWTINGTPLNMIDPGESEKYLGLQVDPWIGIARSGLSTKLDFWLQRIDQAPLKPLQKTDILKTYTIPRLIYIADHSEVKSALLETLDQKIRTAVKEWLHLPPCTCDAILYSSTRDGGLGITKLAGLIPSVQARRLHRIAQSSDDTMKCFMEKEKMEQLHKKLWIQAGGDRENIPSIWEAPPSSEPPNNVSTNSEWEAPTQKDKFPKPCNWRKNEFKKWTKLASQGRGIVNFERDKISNHWIQYYRRIPHRKLLTALQLRANVYPTREFLARGRQDQYIKACRHCDADNESCAHIIGNCPVTQDARIKRHNYICELLLEEAKKKDWVVFKEPHIRDSNKELYKPDLIFVKDGRALVVDVTVRYEAAKSSLEEAAAEKVRKYKHLETEVRHLTNAKDVTFVGFPLGARGKWHQDNFKLLTELGLSKSRQVKMAETFSTVALFSSVDIVHMFASRARKSMVM

SEQ ID NO: 658 - protein, 1665 aa, synthetic construct
MAPKKKRKVNISGSSCGSPNSADTSSDFKDLWTKLKECHDREVQGLQVKVTKLKQERILDAQRLEEFFTKNQQLREQQKVLHETIKVLEDRLRAGLCDRCAVTEEHMRKKQQEFENIRQQNLKLITELMNERNTLQEENKKLSEQLQQKIENDQQHQAAELECEEDVIPDSPITAFSFSGVNRLRRKENPHVRYIEQTHTKLEHSVCANEMRKVSKSSTHPQHNPNENEILVADTYDQSQSPMAKAHGTSSYTPDKSSFNLATVVAETLGLGVQEESETQGPMSPLGDELYHCLEGNHKKQPFESGSETPGTSESATPEGSPKRKVSSAEGAAKEEPKRRSARLSAKPPAKVEAKPKKAAAKDKSSDKKVQTKGKRGAKGKQAEVANQETKEDLPAENGETKTEESPASDEAGEKEAKSDSGSETPGTSESATPESYEQLAPQPCVGETLHSSLPRDSELFVPEEGSSEKESEDAPKTSPPTPGKHGLEQTGEEKVMVTVPDKNPPCPCCGTRVNSVLNLIEHLKVSHGKRGVCFRCAKCGKENSNYHSVVCHFKKCRGPETEKAPAGEWICEVCNRDFTTKIGLGQHKRLAHPAVRNQERIVASQPKETSNRGAHKRCWTKEEEELLIRLEAQFEGNKNINKLIAEHITTKTAKQISDKRRLLSRKPAEEPREEPGTCHHTRRAAASLRTEPEMSHHAQAEDRDNGPGRRPLPGRAAAGGRTMDEIRRHPDKGNGQQRPTKQKSEEQLQAYYKKTLEERLSAGALNTFPRAFKQVMEGRDIKLVINQTAQDCFGCLESISQIRTATRDKKDTVTREKHPKKPFQKWMKKRAIKKGNYLRFQRLFYLDRGKLAKIILDDIECLSCDIPLSEIYSVFKTRWETTGSFKSLGDFKTYGKADNTAFRELITAKEIEKNVQEMSKGSAPGPDGITLGDVVKMDPEFSRTMEIFNLWLTTGKIPDSVRGCRTVLIPKSSKPDRLKDINNWRPITIGSILLRLFSRIVTARLSKACPLNPRQRGFIRAAGCSENLKLLQTIIWSAKREHRPLGVVFVDIAKAFDTVSHQHIIHALQQREVDPHIVGLVSNMYENISTYITTKRNTHTDKIQIRVGVKQGDPMSPLLFNLAMDPLLCKLEESGKGYHRGQSSITAMAFADDLVLLSDSWENMNTNISILETFCNLTGLKTQGQKCHGFYIKPTKDSYTINDCAAWTINGTPLNMIDPGESEKYLGLQFDPWIGIARSGLSTKLDFWLQRIDQAPLKPLQKTDILKTYTIPRLIYIADHSEVKSALLETLDQKIRTAVKEWLHLPPCTCDAILYSSTRDGGLGITKLAGLIPSVQARRLHRIAQSSDDTMKCFMEKEKMEQLHKKLWIQAGGDRENIPSIWEAPPSSEPPNNVSTNSEWEAPTQKDKFPKPCNWRKNEFKKWTKLASQGRGIVNFERDKISNHWIQYYRRIPHRKLLTALQLRANVYPTREFLARGRQDQYIKACRHCDADNESCAHIIGNCPVTQDARIKRHNYICELLLEEAKKKDWVVFKEPHIRDSNKELYKPDLIFVKDGRALVVDVTVRYEAAKSSLEEAAAEKVRKYKHLETEVRHLTNAKDVTFVGFPLGARGKWHQDNFKLLTELGLSKSRQVKMAETFSTVALFSSVDIVHMFASRARKSMVM

SEQ ID NO: 659 - protein, 1665 aa, synthetic construct
MAPKKKRKVNISGSSCGSPNSADTSSDFKDLWTKLKECHDREVQGLQVKVTKLKQERILDAQRLEEFFTKNQQLREQQKVLHETIKVLEDRLRAGLCDRCAVTEEHMRKKQQEFENIRQQNLKLITELMNERNTLQEENKKLSEQLQQKIENDQQHQAAELECEEDVIPDSPITAFSFSGVNRLRRKENPHVRYIEQTHTKLEHSVCANEMRKVSKSSTHPQHNPNENEILVADTYDQSQSPMAKAHGTSSYTPDKSSFNLATVVAETLGLGVQEESETQGPMSPLGDELYHCLEGNHKKQPFESGSETPGTSESATPEGSPKRKVSSAEGAAKEEPKRRSARLSAKPPAKVEAKPKKAAAKDKSSDKKVQTKGKRGAKGKQAEVANQETKEDLPAENGETKTEESPASDEAGEKEAKSDSGSETPGTSESATPESYEQLAPQPCVGETLHSSLPRDSELFVPEEGSSEKESEDAPKTSPPTPGKHGLEQTGEEKVMVTVPDKNPPCPCCGTRVNSVLNLIEHLKVSHGKRGVCFRCAKCGKENSNYHSVVCHFKKCRGPETEKAPAGEWICEVCNRDFTTKIGLGQHKRLAHPAVRNQERIVASQPKETSNRGAHKRCWTKEEEELLIRLEAQFEGNKNINKLIAEHITTKTAKQISDKRRLLSRKPAEEPREEPGTCHHTRRAAASLRTEPEMSHHAQAEDRDNGPGRRPLPGRAAAGGRTMDEIRRHPDKGNGQQRPTKQKSEEQLQAYYKKTLEERLSAGALNTFPRAFKQVMEGRDIKLVINQTAQDCFGCLESISQIRTATRDKKDTVTREKHPKKPFQKWMKKRAIKKGNYLRFQRLFYLDRGKLAKIILDDIECLSCDIPLSEIYSVFKTRWETTGSFKSLGDFKTYGKADNTAFRELITAKEIEKNVQEMSKGSAPGPDGITLGDVVKMDPEFSRTMEIFNLWLTTGKIPDMVRGCRTVLIPKSSKPDRLKDINNWRPITIGSILLRLFSRIVTARLSKACPLNPRQRGFIRAAGCSENLKLLQTIIWSAKREHRPLGVVFVDIAKAFDTVSHQHIIHALQQREVDPHIVGLVSNMYENISTYITTKRNTHTDKIQIRVGVKQGDPMSPLLFNLAMDPLLCKLEESGKGYHRGQSSITAMAFADDLVLLSDSWENMNTNISILETFCNLTGLKTQGQKCHGFYIKPTKDSYTINDCAAWTINGTPLNMIDPGESEKYLGLQFDPWIGIARSGLSTKLDFWLQRIDQAPLKPLQKTDILKTYTIPRLIYIADHSEVKSALLETLDQKIRTAVKEWLHLPPCTCDAILYSSTRDGGLGITKLAGLIPSVQARRLHRIAQSSDDTMKCFMEKEKMEQLHKKLWIQAGGDRENIPSIWEAPPSSEPPNNVSTNSEPEAPTQKDKFPKPCNWRKNEFKKWTKLASQGRGIVNFERDKISNHWIQYYRRIPHRKLLTALQLRANVYPTREFLARGRQDQYIKACRHCDADNESCAHIIGNCPVTQDARIKRHNYICELLLEEAKKKDWVVFKEPHIRDSNKELYKPDLIFVKDGRALVVDVTVRYEAAKSSLEEAAAEKVRKYKHLETEVRHLTNAKDVTFVGFPLGARGKWHQDNFKLLTELGLSKSRQVKMAETFSTVALFSSVDIVHMFASRARKSMVM

SEQ ID NO: 660 - protein, 1665 aa, synthetic construct
MAPKKKRKVNISGSSCGSPNSADTSSDFKDLWTKLKECHDREVQGLQVKVTKLKQERILDAQRLEEFFTKNQQLREQQKVLHETIKVLEDRLRAGLCDRCAVTEEHMRKKQQEFENIRQQNLKLITELMNERNTLQEENKKLSEQLQQKIENDQQHQAAELECEEDVIPDSPITAFSFSGVNRLRRKENPHVRYIEQTHTKLEHSVCANEMRKVSKSSTHPQHNPNENEILVADTYDQSQSPMAKAHGTSSYTPDKSSFNLATVVAETLGLGVQEESETQGPMSPLGDELYHCLEGNHKKQPFESGSETPGTSESATPEGSPKRKVSSAEGAAKEEPKRRSARLSAKPPAKVEAKPKKAAAKDKSSDKKVQTKGKRGAKGKQAEVANQETKEDLPAENGETKTEESPASDEAGEKEAKSDSGSETPGTSESATPESYEQLAPQPCVGETLHSSLPRDSELFVPEEGSSEKESEDAPKTSPPTPGKHGLEQTGEEKVMVTVPDKNPPCPCCGTRVNSVLNLIEHLKVSHGKRGVCFRCAKCGKENSNYHSVVCHFKKCRGPETEKAPAGEWICEVCNRDFTTKIGLGQHKRLAHPAVRNQERIVASQPKETSNRGAHKRCWTKEEEELLIRLEAQFEGNKNINKLIAEHITTKTAKQISDKRRLLSRKPAEEPREEPGTSHHTRRAAASLRTEPEMSHHAQAEDRDNGPGRRPLPGRAAAGGRTMDEIRRHPDKGNGQQRPTKQKSEEQLQAYYKKTLEERLSAGALNTFPRAFKQVMEGRDIKLVINQTAQDCFGCLESISQIRTATRDKKDTVTREKHPKKPFQKWMKKRAIKKGNYLRFQRLFYLDRGKLAKIILDDIECLSCDIPLSEIYSVFKTRWETTGSFKSLGDFKTYGKADNTAFRELITAKEIEKNVQEMSKGSAPGPDGITLGDVVKMDPEFSRTMEIFNLWLTTGKIPDMVRGCRTVLIPKSSKPDRLKDINNWRPITIGSILLRLFSRIVTARLSKACPLNPRQRGFIRAAGCSENLKLLQTIIWSAKREHRPLGVVFVDIAKAFDTVSHQHIIHALQQREVDPHIVGLVSNMYENISTYITTKRNTHTDKIQIRVGVKQGDPMSPLLFNLAMDPLLCKLEESGKGYHRGQSSITAMAFADDLVLLSDSWENMNTNISILETFCNLTGLKTQGQKCHGFYIKPTKDSYTINDCAAWTINGTPLNMIDPGESEKYLGLQFDPWIGIARSGLSTKLDFWLQRIDQAPLKPLQKTDILKTYTIPRLIYIADHSEVKSALLETLDQKIRTAVKEWLHLPPCTCDAILYSSTRDGGLGITKLAGLIPSVQARRLHRIAQSSDDTMKCFMEKEKMEQLHKKLWIQAGGDRENIPSIWEAPPSSEPPNNVSTNSEWEAPTQKDKFPKPCNWRKNEFKKWTKLASQGRGIVNFERDKISNHWIQYYRRIPHRKLLTALQLRANVYPTREFLARGRQDQYIKACRHCDADNESCAHIIGNCPVTQDARIKRHNYICELLLEEAKKKDWVVFKEPHIRDSNKELYKPDLIFVKDGRALVVDVTVRYEAAKSSLEEAAAEKVRKYKHLETEVRHLTNAKDVTFVGFPLGARGKWHQDNFKLLTELGLSKSRQVKMAETFSTVALFSSVDIVHMFASRARKSMVM

SEQ ID NO: 661 - protein, 1665 aa, synthetic construct
MAPKKKRKVNISGSSCGSPNSADTSSDFKDLWTKLKECHDREVQGLQVKVTKLKQERCLDAQRLEEFFTKNQQLREQQKVLHETIKVLEDRLRAGLCDRCAVTEEHMRKKQQEFENIRQQNLKLITELMNERNTLQEENKKLSEQLQQKIENDQQHQAAELECEEDVIPDSPITAFSFSGVNRLRRKENPHVRYIEQTHTKLEHSVCANEMRKVSKSSTHPQHNPNENEILVADTYDQSQSPMAKAHGTSSYTPDKSSFNLATVVAETLGLGVQEESETQGPMSPLGDELYHCLEGNHKKQPFESGSETPGTSESATPEGSPKRKVSSAEGAAKEEPKRRSARLSAKPPAKVEAKPKKAAAKDKSSDKKVQTKGKRGAKGKQAEVANQETKEDLPAENGETKTEESPASDEAGEKEAKSDSGSETPGTSESATPESYEQLAPQPCVGETLHSSLPRDSELFVPEEGSSEKESEDAPKTSPPTPGKHGLEQTGEEKVMVTVPDKNPPCPCCGTRVNSVLNLIEHLKVSHGKRGVCFRCAKCGKENSNYHSVVCHFKKCRGPETEKAPAGEWICEVCNRDFTTKIGLGQHKRLAHPAVRNQERIVASQPKETSNRGAHKRCWTKEEEELLIRLEAQFEGNKNINKLIAEHITTKTAKQISDKRRLLSRKPAEEPREEPGTCHHTRRAAASLRTEPEMSHHAQAEDRDNGPGRRPLPGRAAAGGRTMDEIRRHPDKGNGQQRPTKQKSEEQLQAYYKKTLEERLSAGALNTFPRAFKQVMEGRDIKLVINQTAQDCFGCLESISQIRTATRDKKDTVTREKHPKKPFQKWMKKRAIKKGNYLRFQRLFYLDRGKLAKIILDDIECLSCDIPLSEIYSVFKTRWETTGSFKSLGDFKTYGKADNTAFRELITAKEIEKNVQEMSKGSAPGPDGITLGDVVKMDPEFSRTMEIFNLWLTTGKIPDMVRGCRTVLIPKSSKPDRLKDINNWRPITIGSILLRLFSRIVTARLSKACPLNPRQRGFIRAAGCSENLKLLQTIIWSAKREHRPLGVVFVDIAKAFDTVSHQHIIHALQQREVDPHIVGLVSNMYENISTYITTKRNTHTDKIQIRVGVKQGDPMSPLLFNLAMDPLLCKLEESGKGYHRGQSSITAMAFADDLVLLSDSWENMNTNISILETFCNLTGLKTQGQKCHGFYIKPTKDSYTINDCAAWTINGTPLNMIDPGESEKYLGLQFDPWIGIARSGLSTKLDFWLQRIDQAPLKPLQKTDILKTYTIPRLIYIADHSEVKSALLETLDQKIRTAVKEWLHLPPCTCDAILYSSTRDGGLGITKLAGLIPSVQARRLHRIAQSSDDTMKCFMEKEKMEQLHKKLWIQAGGDRENIPSIWEAPPSSEPPNNVSTNSEWEAPTQKDKFPKPCNWRKNEFKKWTKLASQGRGIVNFERDKISNHWIQYYRRIPHRKLLTALQLRANVYPTREFLARGRQDQYIKACRHCDADNESCAHIIGNCPVTQDARIKRHNYICELLLEEAKKKDWVVFKEPHIRDSNKELYKPDLIFVKDGRALVVDVTVRYEAAKSSLEEAAAEKVRKYKHLETEVRHLTNAKDVTFVGFPLGARGKWHQDNFKLLTELGLSKSRQVKMAETFSTVALFSSVDIVHMFASRARKSMVM

SEQ ID NO: 662 - protein, 1665 aa, synthetic construct
MAPKKKRKVNASGSSCGSPNSADTSSDFKDLWTKLKECHDREVQGLQVKVTKLKQERILDAQRLEEFFTKNQQLREQQKVLHETIKVLEDRLRAGLCDRCAVTEEHMRKKQQEFENIRQQNLKLITELMNERNTLQEENKKLSEQLQQKIENDQQHQAAELECEEDVIPDSPITAFSFSGVNRLRRKENPHVRYIEQTHTKLEHSVCANEMRKVSKSSTHPQHNPNENEILVADTYDQSQSPMAKAHGTSSYTPDKSSFNLATVVAETLGLGVQEESETQGPMSPLGDELYHCLEGNHKKQPFESGSETPGTSESATPEGSPKRKVSSAEGAAKEEPKRRSARLSAKPPAKVEAKPKKAAAKDKSSDKKVQTKGKRGAKGKQAEVANQETKEDLPAENGETKTEESPASDEAGEKEAKSDSGSETPGTSESATPESYEQLAPQPCVGETLHSSLPRDSELFVPEEGSSEKESEDAPKTSPPTPGKHGLEQTGEEKVMVTVPDKNPPCPCCGTRVNSVLNLIEHLKVSHGKRGVCFRCAKCGKENSNYHSVVCHFKKCRGPETEKAPAGEWICEVCNRDFTTKIGLGQHKRLAHPAVRNQERIVASQPKETSNRGAHKRCWTKEEEELLIRLEAQFEGNKNINKLIAEHITTKTAKQISDKRRLLSRKPAEEPREEPGTCHHTRRAAASLRTEPEMSHHAQAEDRDNGPGRRPLPGRAAAGGRTMDEIRRHPDKGNGQQRPTKQKSEEQLQAYYKKTLEERLSAGALNTFPRAFKQVMEGRDIKLVINQTAQDCFGCLESISQIRTATRDKKDTVTREKHPKKPFQKWMKKRAIKKGNYLRFQRLFYLDRGKLAKIILDDIECLSCDIPLSEIYSVFKTRWETTGSFKSLGDFKTYGKADNTAFRELITAKEIEKNVQEMSKGSAPGPDGITLGDVVKMDPEFSRTMEIFNLWLTTGKIPDMVRGCRTVLIPKSSKPDRLKDINNWRPITIGSILLRLFSRIVTARLSKACPLNPRQRGFIRAAGCSENLKLLQTIIWSAKREHRPLGVVFVDIAKAFDTVSHQHIIHALQQREVDPHIVGLVSNMYENISTYITTKRNTHTDKIQIRVGVKQGDPMSPLLFNLAMDPLLCKLEESGKGYHRGQSSITAMAFADDLVLLSDSWENMNTNISILETFCNLTGLKTQGQKCHGFYIKPTKDSYTINDCAAWTINGTPLNMIDPGESEKYLGLQFDPWIGIARSGLSTKLDFWLQRIDQAPLKPLQKTDILKTYTIPRLIYIADHSEVKSALLETLDQKIRTAVKEWLHLPPCTCDAILYSSTRDGGLGITKLAGLIPSVQARRLHRIAQSSDDTMKCFMEKEKMEQLHKKLWIQAGGDRENIPSIWEAPPSSEPPNNVSTNSEWEAPTQKDKFPKPCNWRKNEFKKWTKLASQGRGIVNFERDKISNHWIQYYRRIPHRKLLTALQLRANVYPTREFLARGRQDQYIKACRHCDADNESCAHIIGNCPVTQDARIKRHNYICELLLEEAKKKDWVVFKEPHIRDSNKELYKPDLIFVKDGRALVVDVTVRYEAAKSSLEEAAAEKVRKYKHLETEVRHLTNAKDVTFVGFPLGARGKWHQDNFKLLTELGLSKSRQVKMAETFSTVALFSSVDIVHMFASRARKSMVM

SEQ ID NO: 663 - protein, 1665 aa, synthetic construct
MAPKKKRKVNISGSSCGSPNSADTSSDFKDLWTKLKECHDREVQGLQVKVTKLKQERILDAQRLEEFFTKNQQLREQQKVLHETIKVLEDRLRAGLCDRCAVTEEHMRKKQQEFENIRQQNLKLITELMNERNTLQEENKKLSEQLQQKIENDQQHQAAELECEEDVIPDSPITAFSFSGVNRLRRKENPHVRYIEQTHTKLEHSVCANEMRKVSKSSTHPQHNPNENEILVADTYDQSQSPMAKAHGTSSYTPDKSSFNLATVVAETLGLGVQEESETQGPMSPLGDELYHCLEGNHKKQPFESGSETPGTSESATPEGSPKRKVSSAEGAAKEEPKRRSARLSAKPPAKVEAKPKKAAAKDKSSDKKVQTKGKRGAKGKQAEVANQETKEDLPAENGETKTEESPASDEAGEKEAKSDSGSETPGTSESATPESYEQLAPQPCVGETLHSSLPRDSELFVPEEGSSEKESEDAPKTSPPTPGKHGLEQTGEEKVMVTVPDKNPPCPCCGTRVNSVLNLIEHLKVSHGKRGVCFRCAKCGKENSNYHSVVCHFKKCRGPETEKAPAGEWICEVCNRDFTTKIGLGQHKRLAHPAVRNQERIVASQPKETSNRGAHKRCWTKEEEELLIRLEAQFEGNKNINKLIAEHITTKTAKQISDKRRLLSRKPAEEPREEPGTCHHTRRAAASLRTEPEMSHHAQAEDRDNGPGRRPLPGRAAAGGRTMDEIRRHPDKGNGQQRPTKQKSEEQLQAYYKKTLEERLSAGALNTFPRAFKQVMEGRDIKLVINQTAQDCFGCLESISQIRTATRDKKDTVTREKHPKKPFQKWMKKRAIKKGNYLRFQRLFYLDRGKLAKIILDDIECLSCDIPLSEIYSVFKTRWETTGSFKSLGDFKTYGKADNTAFRELITAKEIEKNVQEMSKGSAPGPDGITLGDVVKMDPEFSRTMEIFNLWLTTGKIPDMVRGCRTVLIPKSSKPDRLKDINNWRPITIGSILLRLFSRIVTARLSKACPLNPRQRGFIRAAGCSENLKLLQTIIWSAKREHRPLGVVFVDIAKAFDTVSHQHIIHALQQREVDPHIVGLVSNMYENISTYITTKRNTHTDKIQIRVGVKQGDPMSPLLFNLAMDPLLCKLEESGKGYHRGQSSITAMAFADDLVLLSDSWENMNTNISILETFCNLTGLKTQGQKCHGFYIKPTKKSYTINDCAAWTINGTPLNMIDPGESEKYLGLQFDPWIGIARSGLSTKLDFWLQRIDQAPLKPLQKTDILKTYTIPRLIYIADHSEVKSALLETLDQKIRTAVKEWLHLPPCTCDAILYSSTRDGGLGITKLAGLIPSVQARRLHRIAQSSDDTMKCFMEKEKMEQLHKKLWIQAGGDRENIPSIWEAPPSSEPPNNVSTNSEWEAPTQKNKFPKPCNWRKNEFKKWTKLASQGRGIVNFERDKISNHWIQYYRRIPHRKLLTALQLRANVYPTREFLARGRQDQYIKACRHCDADNESCAHIIGNCPVTQDARIKRHNYICELLLEEAKKKDWVVFKEPHIRDSNKELYKPDLIFVKDGRALVVDVTVRYEAAKSSLEEAAAEKVRKYKHLETEVRHLTNAKDVTFVGFPLGARGKWHQDNFKLLTELGLSKSRQVKMAETFSTVALFSSVDIVHMFASRARKSMVM

SEQ ID NO: 664 - protein, 1665 aa, synthetic construct
MAPKKKRKVNISGSSCGSPNSADTSSDFKDLWTKLKECHDREVQGLQVKVTKLKQERILDAQRLEEFFTKNQQLREQQKVLHETIKVLEDRLRAGLCDRCAVTEEHMRKKQQEFENIRQQNLKLITELMNERNTLQEENKKLSEQLQQKIENDQQHQAAELECEEDVIPDSPITAFSFSGVNRLRRKENPHVRYIEQTHTKLEHSVCANEMRKVSKSSTHPQHNPNENEILVADTYDQSQSPMAKAHGTSSYTPDKSSFNLATVVAETLGLGVQEESETQGPMSPLGDELYHCLEGNHKKQPFESGSETPGTSESATPEGSPKRKVSSAEGAAKEEPKRRSARLSAKPPAKVEAKPKKAAAKDKSSDKKVQTKGKRGAKGKQAEVANQETKEDLPAENGETKTEESPASDEAGEKEAKSDSGSETPGTSESATPESYEQLAPQPCVGETLHSSLPRDSELFVPEEGSSEKESEDAPKTSPPTPGKHGLEQTGEEKVMVTVPDKNPPCPCCGTRVNSVLNLIEHLKVSHGKRGVCFRCAKCGKENSNYHSVVCHFKKCRGPETEKAPAGEWICEVCNRDFTTKIGLGQHKRLAHPAVRNQERIVASQPKETSNRGAHKRCWTKEEEELLIRLEAQFEGNKNINKLIAEHITTKTAKQISDKRRLLSRKPAEEPREEPGTCHHTRRAAASLRTEPEMSHHAQAEDRDNGPGRRPLPGRAAAGGRTMDEIRRHPDKGNGQQRPTKQKSEEQLQAYYKKTLEERLSAGALNTFPRAFKQVMEGRDIKLVINQTAQDCFGCLESISQIRTATRDKKDTVTREKHPKKPFQKWMKKRAIKKGNYLRFQRLFYLDRGKLAKIILDDIECLSCDIPLSEIYSVFKTRWETTGSFKSLGDFKTYGKADNTAFRELITAKEIEKNVQEMSKGSAPGPDGITLGDVVKMDPEFSRTMEIFNLWLTTGKIPDMVRGCRTVLIPKSSKPDRLKDINNWRPITIGSILLRLFSRIVTARLSKACPLNPRQRGFIRAAGCSENLKLLQTIIWSAKREHRPLGVVFVDIAKAFDTVSHQHIIHALQQREVDPHIVGLVSNMYENISTYITTKRNTHTDKIQIRVGVKQGDPMSPLLFNLAMDPLLCKLEESGKGYHRGQSSITAMAFADDLVLLSDSWENMNTNISILETFCNLTGLKTQGQKCHGFYIKPTKKSYTINDCAAWTINGTPLKMIDPGESEKYLGLQFDPWIGIARSGLSTKLDFWLQRIDQAPLKPLQKTDILKTYTIPRLIYIADHSEVKSALLETLDQKIRTAVKEWLHLPPCTCDAILYSSTRDGGLGITKLAGLIPSVQARRLHRIAQSSDDTMKCFMEKEKMEQLHKKLWIQAGGDRENIPSIWEAPPSSEPPNNVSTNSEWEAPTQKDKFPKPCNWRKNEFKKWTKLASQGRGIVNFERDKISNHWIQYYRRIPHRKLLTALQLRANVYPTREFLARGRQDQYIKACRHCDADNESCAHIIGNCPVTQDARIKRHNYICELLLEEAKKKDWVVFKEPHIRDSNKELYKPDLIFVKDGRALVVDVTVRYEAAKSSLEEAAAEKVRKYKHLETEVRHLTNAKDVTFVGFPLGARGKWHQDNFKLLTELGLSKSRQVKMAETFSTVALFSSVDIVHMFASRARKSMVM

SEQ ID NO: 665 - protein, 1665 aa, synthetic construct
MAPKKKRKVNISGSSCGSPNSADTSSDFKDLWTKLKECHDREVQGLQVKVTKLKQERILDAQRLEEFFTKNQQLREQQKVLHETIKVLEDRLRAGLCDRCAVTEEHMRKKQQEFENIRQQNLKLITELMNERNTLQEENKKLSEQLQQKIENDQQHQAAELECEEDVIPDSPITAFSFSGVNRLRRKENPHVRYIEQTHTKLEHSVCANEMRKVSKSSTHPQHNPNENEILVADTYDQSQSPMAKAHGTSSYTPDKSSFNLATVVAETLGLGVQEESETQGPMSPLGDELYHCLEGNHKKQPFESGSETPGTSESATPEGSPKRKVSSAEGAAKEEPKRRSARLSAKPPAKVEAKPKKAAAKDKSSDKKVQTKGKRGAKGKQAEVANQETKEDLPAENGETKTEESPASDEAGEKEAKSDSGSETPGTSESATPESYEQLAPQPCVGETLHSSLPRDSELFVPEEGSSEKESEDAPKTSPPTPGKHGLEQTGEEKVMVTVPDKNPPCPCCGTRVNSVLNLIEHLKVSHGKRGVCFRCAKCGKENSNYHSVVCHFKKCRGPETEKAPAGEWICEVCNRDFTTKIGLGQHKRLAHPAVRNQERIVASQPKETSNRGAHKRCWTKEEEELLIRLEAQFEGNKNINKLIAEHITTKTAKQISDKRRLLSRKPAEEPREEPGTCHHTRRAAASLRTEPEMSHHAQAEDRDNGPGRRPLPGRAAAGGRTMDEIRRHPDKGNGQQRPTKQKSEEQLQAYYKKTLEERLSAGALNTFPRAFKQVMEGRDIKLVINQTAQDCFGCLESISQIRTATRDKKDTVTREKHPKKPFQKWMKKRAIKKGNYLRFQRLFYLDRGKLAKIILDDIECLSCDIPLSEIYSVFKTRWETTGSFKSLGDFKTYGKADNTAFRELITAKEIEKNVQEMSKGSAPGPDGITLGDVVKMDPEFSRTMEIFNLWLTTGKIPDMVRGCRTVLIPKSSKPDRLKDINNWRPITIGSILLRLFSRIVTKRLSKACPLNPRQRGFIRAAGCSENLKLLQTIIWSAKREHRPLGVVFVDIAKAFDTVSHQHIIHALQQREVDPHIVGLVSNMYENISTYITTKRNTHTDKIQIRVGVKQGDPMSPLLFNLAMDPLLCKLEESGKGYHRGQSSITAMAFADDLVLLSDSWENMNTNISILETFCNLTGLKTQGQKCHGFYIKPTKKSYTINDCAAWTINGTPLNMIDPGESEKYLGLQFDPWIGIARSGLSTKLDFWLQRIDQAPLKPLQKTDILKTYTIPRLIYIADHSEVKSALLETLDQKIRTAVKEWLHLPPCTCDAILYSSTRDGGLGITKLAGLIPSVQARRLHRIAQSSDDTMKCFMEKEKMEQLHKKLWIQAGGDRENIPSIWEAPPSSEPPNNVSTNSEWEAPTQKDKFPKPCNWRKNEFKKWTKLASQGRGIVNFERDKISNHWIQYYRRIPHRKLLTALQLRANVYPTREFLARGRQDQYIKACRHCDADNESCAHIIGNCPVTQDARIKRHNYICELLLEEAKKKDWVVFKEPHIRDSNKELYKPDLIFVKDGRALVVDVTVRYEAAKSSLEEAAAEKVRKYKHLETEVRHLTNAKDVTFVGFPLGARGKWHQDNFKLLTELGLSKSRQVKMAETFSTVALFSSVDIVHMFASRARKSMVM

SEQ ID NO: 666 - protein, 1665 aa, synthetic construct
MAPKKKRKVNISGSSCGSPNSADTSSDFKDLWTKLKECHDREVQGLQVKVTKLKQERILDAQRLEEFFTKNQQLREQQKVLHETIKVLEDRLRAGLCDRCAVTEEHMRKKQQEFENIRQQNLKLITELMNERNTLQEENKKLSEQLQQKIENDQQHQAAELECEEDVIPDSPITAFSFSGVNRLRRKENPHVRYIEQTHTKLEHSVCANEMRKVSKSSTHPQHNPNENEILVADTYDQSQSPMAKAHGTSSYTPDKSSFNLATVVAETLGLGVQEESETQGPMSPLGDELYHCLEGNHKKQPFESGSETPGTSESATPEGSPKRKVSSAEGAAKEEPKRRSARLSAKPPAKVEAKPKKAAAKDKSSDKKVQTKGKRGAKGKQAEVANQETKEDLPAENGETKTEESPASDEAGEKEAKSDSGSETPGTSESATPESYEQLAPQPCVGETLHSSLPRDSELFVPEEGSSEKESEDAPKTSPPTPGKHGLEQTGEEKVMVTVPDKNPPCPCCGTRVNSVLNLIEHLKVSHGKRGVCFRCAKCGKENSNYHSVVCHFKKCRGPETEKAPAGEWICEVCNRDFTTKIGLGQHKRLAHPAVRNQERIVASQPKETSNRGAHKRCWTKEEEELLIRLEAQFEGNKNINKLIAEHITTKTAKQISDKRRLLSRKPAEEPREEPGTCHHTRRAAASLRTEPEMSHHAQAEDRDNGPGRRPLPGRAAAGGRTMDEIRRHPDKGNGQQRPTKQKSEEQLQAYYKKTLEERLSAGALNTFPRAFKQVMEGRDIKLVINQTAQDCFGCLESISQIRTATRDKKDTVTREKHPKKPFQKWMKKRAIKKGNYLRFQRLFYLDRGKLAKIILDDIECLSCDIPLSEIYSVFKTRWETTGSFKSLGDFKTYGKADNTAFRELITAKEIEKNVQEMSKGSAPGPDGITLGDVVKMDPEFSRTMEIFNLWLTTGKIPDMVRGCRTVLIPKSSKPDRLKDINNWRPITIGSILLRLFSRIVTARLSKACPLNPRQRGFIRAAGCSENLKLLQTIIWSAKREHRPLGVVFVDIAKAFDTVSHQHIIHALQQREVDPHIVGLVSNMYENISTYITTKRNTHTDKIQIRVGVKQGDPMSPLLFNLAMDPLLCKLEESGKGYHRGQSSITALAFADDLVLLSDSWENMNTNISILETFCNLTGLKTQGQKCHGFYIKPTKKSYTINDCAAWTINGTPLNMIDPGESEKYLGLQFDPWIGIARSGLSTKLDFWLQRIDQAPLKPLQKTDILKTYTIPRLIYIADHSEVKSALLETLDQKIRTAVKEWLHLPPCTCDAILYSSTRDGGLGITKLAGLIPSVQARRLHRIAQSSDDTMKCFMEKEKMEQLHKKLWIQAGGDRENIPSIWEAPPSSEPPNNVSTNSEWEAPTQKDKFPKPCNWRKNEFKKWTKLASQGRGIVNFERDKISNHWIQYYRRIPHRKLLTALQLRANVYPTREFLARGRQDQYIKACRHCDADNESCAHIIGNCPVTQDARIKRHNYICELLLEEAKKKDWVVFKEPHIRDSNKELYKPDLIFVKDGRALVVDVTVRYEAAKSSLEEAAAEKVRKYKHLETEVRHLTNAKDVTFVGFPLGARGKWHQDNFKLLTELGLSKSRQVKMAETFSTVALFSSVDIVHMFASRARKSMVM

SEQ ID NO: 667 - protein, 1665 aa, synthetic construct
MAPKKKRKVNISGSSCGSPNSADTSSDFKDLWTKLKECHDREVQGLQVKVTKLKQERILDAQRLEEFFTKNQQLREQQKVLHETIKVLEDRLRAGLCDRCAVTEEHMRKKQQEFENIRQQNLKLITELMNERNTLQEENKKLSEQLQQKIENDQQHQAAELECEEDVIPDSPITAFSFSGVNRLRRKENPHVRYIEQTHTKLEHSVCANEMRKVSKSSTHPQHNPNENEILVADTYDQSQSPMAKAHGTSSYTPDKSSFNLATVVAETLGLGVQEESETQGPMSPLGDELYHCLEGNHKKQPFESGSETPGTSESATPEGSPKRKVSSAEGAAKEEPKRRSARLSAKPPAKVEAKPKKAAAKDKSSDKKVQTKGKRGAKGKQAEVANQETKEDLPAENGETKTEESPASDEAGEKEAKSDSGSETPGTSESATPESYEQLAPQPCVGETLHSSLPRDSELFVPEEGSSEKESEDAPKTSPPTPGKHGLEQTGEEKVMVTVPDKNPPCPCCGTRVNSVLNLIEHLKVSHGKRGVCFRCAKCGKENSNYHSVVCHFKKCRGPETEKAPAGEWICEVCNRDFTTKIGLGQHKRLAHPAVRNQERIVASQPKETSNRGAHKRCWTKEEEELLIRLEAQFEGNKNINKLIAEHITTKTAKQISDKRRLLSRKPAEEPREEPGTCHHTRRAAASLRTEPEMSHHAQAEDRDNGPGRRPLPGRAAAGGRTMDEIRRHPDKGNGQQRPTKQKSEEQLQAYYKKTLEERLSAGALNTFPRAFKQVMEGRDIKLVINQTAQDCFGCLESISQIRTATRDKKDTVTREKHPKKPFQKWMKKRAIKKGNYLRFQRLFYLDRGKLAKIILDDIECLSCDIPLSEIYSVFKTRWETTGSFKSLGDFKTYGKADNTAFRELITAKEIEKNVQEMSKGSSPGPDGITLGDVVKMDPEFSRTMEIFNLWLTTGKIPDMVRGCRTVLIPKSSKPDRLKDINNWRPITIGSILLRLFSRIVTARLSKACPLNPRQRGFIRAAGCSENLKLLQTIIWSAKREHRPLGVVFVDIAKAFDTVSHQHIIHALQQREVDPHIVGLVSNMYENISTYITTKRNTHTDKIQIRVGVKQGDPMSPLLFNLALDPLLCKLEESGKGYHRGQSSITAMAFADDLVLLSDSWENMNTNISILETFCNLTGLKTQGQKCHGFYIKPTKKSYTINDCAAWTINGTPLNMIDPGESEKYLGLQFDPWIGIARSGLSTKLDFWLQRIDQAPLKPLQKTDILKTYTIPRLIYIADHSEVKSALLETLDQKIRTAVKEWLHLPPCTCDAILYSSTRDGGLGITKLAGLIPSVQARRLHRIAQSSDDTMKCFMEKEKMEQLHKKLWIQAGGDRENIPSIWEAPPSSEPPNNVSTNSEWEAPTQKDKFPKPCNWRKNEFKKWTKLASQGRGIVNFERDKISNHWIQYYRRIPHRKLLTALQLRANVYPTREFLARGRQDQYIKACRHCDADNESCAHIIGNCPVTQDARIKRHNYICELLLEEAKKKDWVVFKEPHIRDSNKELYKPDLIFVKDGRALVVDVTVRYEAAKSSLEEAAAEKVRKYKHLETEVRHLTNAKDVTFVGFPLGARGKWHQDNFKLLTELGLSKSRQVKMAETFSTVALFSSVDIVHMFASRARKSMVM

SEQ ID NO: 668 - protein, 2087 aa, synthetic construct
MAPKKKRKVSASQDSRSRDNGPDGMEPEGVIESNWNEIVDSFDDMNLSESLLRGIYAYGFEKPSAIQQRAILPCIKGYDVIAQAQSGTGKTATFAISILQQIELDLKATQALVLAPTRELAQQIQKVVMALGDYMGASCHACIGGTNVRAEVQKLQMEAPHIIVGTPGRVFDMLNRRYLSPKYIKMFVLDEADEMLSRGFKDQIYDIFQKLNSNTQVVLLSATMPSDVLEVTKKFMRDPIRILVKKEELTLEGIRQFYINVEREEWKLDTLCDLYETLTITQAVIFINTRRKVDWLTEKMHARDFTVSAMHGDMDQKERDVIMREFRSGSSRVLITTDLLARGIDVQQVSLVINYDLPTNRENYIHRIGRGGRFGRKGVAINMVTEEDKRTLRDIETFYNTSIEEMPLNVADLISGSETPGTSESATPEGSNISGSSCGSPNSADTSSDFKDLWTKLKECHDREVQGLQVKVTKLKQERILDAQRLEEFFTKNQQLREQQKVLHETIKVLEDRLRAGLCDRCAVTEEHMRKKQQEFENIRQQNLKLITELMNERNTLQEENKKLSEQLQQKIENDQQHQAAELECEEDVIPDSPITAFSFSGVNRLRRKENPHVRYIEQTHTKLEHSVCANEMRKVSKSSTHPQHNPNENEILVADTYDQSQSPMAKAHGTSSYTPDKSSFNLATVVAETLGLGVQEESETQGPMSPLGDELYHCLEGNHKKQPFESGSETPGTSESATPEGSPKRKVSSAEGAAKEEPKRRSARLSAKPPAKVEAKPKKAAAKDKSSDKKVQTKGKRGAKGKQAEVANQETKEDLPAENGETKTEESPASDEAGEKEAKSDSGSETPGTSESATPESYEQLAPQPCVGETLHSSLPRDSELFVPEEGSSEKESEDAPKTSPPTPGKHGLEQTGEEKVMVTVPDKNPPCPCCGTRVNSVLNLIEHLKVSHGKRRVCFRCAKCGKENSNYHSVVCHFKKCRGPETEKAPAGEWICEVCNRDFTTKIGLGQHKRLAHPAVRNQERIVASQPKETSNRGAHKRCWTKEEEELLIRLEAQFEGHKNINKLIAEHITTKTAKQISDKRRLLSRKPAEEPRMEPGTCHHTRRAAASLRTEPEMSHQAQAEDRDNGPGRRPLPGRPAAGGRTMDEIRRHPDKGNGQQRPTKQKSEEQLQAYYKKTLEERLSAGALNTFPRAFKQVMEGRDIKLVINQTAQDCFGCLESISQIRTATRDKKYTGTREKHPKRPFQKWMKKRAIKKGNYLRFQRLFYLDRGKLAKIILDDIECLSCDIPLSEIYSVFKTRWETTGSFKSLGDFKTYGKADNTAFRELITAKEIEKNVQEMSKGSAPGPDGITLGDVVKMDPEFSLTMEIFNLWLTTGKIPDMVRGCRTVLIPKSSKPDRLKDINNWRPITIGSILLRLFSRIVTARLSKACPLNPRQRGFIRAAGCSENLKLLQTIIWSAKREHRPLGVVFVDIAKAFDTVSHQHIIHALQQREVDPHIVGLVSNMYENISTYITTKRNTHTDKIQIRVGVKQGDPMSPLLFNLAMDPLLCKLEESGKGYHRGQSSITAMAFADDLVLLSDSWEGMNTNISILETFCNLTGLKTQGQKCHGFYIKPTKDSYTINDCAAWTINGTPLNMIDPGESEKYLGLQFDPWIGIARSGLSTKLDEWLQRIDQAPLKPLQKTDILKTYTIPRLIYIADHSEVKAALLETLDRKIRTAVKEWLHLPPCTCDAILYSSTRDGGLGITKLAGLIPSVQARRLHRIAQSSDDTMKCFMEKERMEQLHKKLWIQAGGDRENIPSIWEAPPSSEPPNNVSTNSEWEAPTQKPKFPKPCNWRKNEFKKWTKLASQGRGIVNFERDKISNHWIQYYRGIPHRKLLTALQLRANVYPTREFLARGRQDQYIKACRHCDADIESCAHIIGNCPVTQDARIKRHNKICELLLEEAKKKDWVVFKEPHIRDSNKELYKPDLIFVKDGRALVVDVTVRYEAAKSSLEEAAAEKVRKYKHLETEVRHLTNAKDVTFVGFPLGARGKWHQDNFKLLTELGLSKSRQVKMAETFSTVALFSSVDIVHMFASRARKSMVM

SEQ ID NO: 669 - protein, 1665 aa, synthetic construct; identical to SEQ ID NO: 636

SEQ ID NO: 670 - protein, 1174 aa, synthetic construct
MAEKVMVTVPDKNPPCPCCGTRVNSVLNLIEHLKVSHGKRGVCFRCAKCGKENSNYHSVVCHFPKCRGPETEKAPAGEWICEVCNRDFTTKIGLGQHKRLAHPAVRNQERIVASQPKETSNRGAHKRCWTKEEEELLIRLEAQFEGNKNINKLIAEHITTKTAKQISDKRRLLSRKPAEEPREEPGTCHHTRRAAASLRTEPEMSHHAQAEDRDNGPGRRPLPGRAAAGGRTMDEIRRHPDKGNGQQRPTKQKSEEQLQAYYKKTLEERLSAGALNTFPRAFKQVMEGRDIKLVINQTAQDCFGCLESISQIRTATRDKKDTVTREKHPKKPFQKWMKDRAIKKGNYLRFQRLFYLDRGKLAKIILDDIECLSCDIPLSEIYSVFKTRWETTGSFKSLGDFKTYGKADNTAFRELITAKEIEKNVQEMSKGSAPGPDGITLGDVVKMDPEFSRTMEIFNLWLTTGKIPDMVRGCRTVLIPKSSKPDRLKDINNWRPITIGSILLRLFSRIVTARLSKACPLNPRQRGFIRAAGCSENLKLLQTIIWSAKREHRPLGVVFVDIAKAFDTVSHQHIIHALQQREVDPHIVGLVSNMYENISTYITTKRNTHTDKIQIRVGVKQGDPMSPLLFNLAMDPLLCKLEESGKGYHRGQSSITAMAFADDLVLLSDSWENMNTNISILETFCNLTGLKTQGQKCHGFYIKPTKDSYTINDCAAWTINGTPLNMIDPGESEKYLGLQFDPWIGIARSGLSTKLDFWLQRIDQAPLKPLQKTDILKTYTIPRLIYIADHSEVKTALLETLDQKIRTAVKEWLHLPPCTCDAILYSSTRDGGLGITKLAGLIPSVQARRLHRIAQSSDDTMKCFMEKEKMEQLHKKLWIQAGGDRENIPSIWEAPPSSEPPNNVSTNSEWEAPTQKDKFPKPCNWRKNEFKKWTKLASQGRGIVNFERDKISNHWIQYYRRIPHRKLLTALQLRANVYPTREFLARGRQDQYIKACRHCDADIESCAHIIGNCPVTQDARIKRHNYICELLLEEAKKKDWVVFKEPHIRDSNKELYKPDLIFVKDARALVVDVTVRYEAAKSSLEEAAAEKVRKYKHLETEVRHLTNAKDVTFVGFPLGARGKWHQDNFKLLTELGLSKSRQVKMAETFSTVALFSSVDIVHMFASRARKSMVM

SEQ ID NO: 671 - protein, 1608 aa, synthetic construct
MAPKKKRKVNISGSSCGSPNSADTSSDFKDLWTKLKECHDREVQGLQVKVTKLKQERILDAQRLEEFFTKNQQLREQQKVLHETIKVLEDRLRAGLCDRCAVTEEHMRKKQQEFENIRQQNLKLITELMNERNTLQEENKKLSEQLQQKIENDQQHQAAELECEEDVIPDSPITAFSFSGVNRLRRKENPHVRYIEQTHTKLEHSVCANEMRKVSKSSTHPQHNPNENEILVADTYDQSQSPMAKAHGTSSYTPDKSSFNLATVVAETLGLGVQEESETQGPMSPLGDELYHCLEGNHKKQPFESGSETPGTSESATPEGSPKRKVSSAEGAAKEEPKRRSARLSAKPPAKVEAKPKKAAAKDKSSDKKVQTKGKRGAKGKQAEVANQETKEDLPAENGETKTEESPASDEAGEKEAKSDSGSETPGTSESATPESEKVMVTVPDKNPPCPCCGTRVNSVLNLIEHLKVSHGKRGVCFRCAKCGKENSNYHSVVCHFKKCRGPETEKAPAGEWICEVCNRDFTTKIGLGQHKRLAHPAVRNQERIVASQPKETSNRGAHKRCWTKEEEELLIRLEAQFEGNKNINKLIAEHITTKTAKQISDKRRLLSRKPAEEPREEPGTCHHTRRAAASLRTEPEMSHHAQAEDRDNGPGRRPLPGRAAAGGRTMDEIRRHPDKGNGQQRPTKQKSEEQLQAYYKKTLEERLSAGALNTFPRAFKQVMEGRDIKLVINQTAQDCFGCLESISQIRTATRDKKDTVTREKHPKKPFQKWMKKRAIKKGNYLRFQRLFYLDRGKLAKIILDDIECLSCDIPLSEIYSVFKTRWETTGSFKSLGDFKTYGKADNTAFRELITAKEIEKNVQEMSKGSAPGPDGITLGDVVKMDPEFSRTMEIFNLWLTTGKIPDMVRGCRTVLIPKSSKPDRLKDINNWRPITIGSILLRLFSRIVTARLSKACPLNPRQRGFIRAAGCSENLKLLQTIIWSAKREHRPLGVVFVDIAKAFDTVSHQHIIHALQQREVDPHIVGLVSNMYENISTYITTKRNTHTDKIQIRVGVKQGDPMSPLLFNLAMDPLLCKLEESGKGYHRGQSSITAMAFADDLVLLSDSWENMNTNISILETFCNLTGLKTQGQKCHGFYIKPTKKSYTINDCAAWTINGTPLNMIDPGESEKYLGLQFDPWIGIARSGLSTKLDFWLQRIDQAPLKPLQKTDILKTYTIPRLIYIADHSEVKSALLETLDQKIRTAVKEWLHLPPCTCDAILYSSTRDGGLGITKLAGLIPSVQARRLHRIAQSSDDTMKCFMEKEKMEQLHKKLWIQAGGDRENIPSIWEAPPSSEPPNNVSTNSEWEAPTQKDKFPKPCNWRKNEFKKWTKLASQGRGIVNFERDKISNHWIQYYRRIPHRKLLTALQLRANVYPTREFLARGRQDQYIKACRHCDADNESCAHIIGNCPVTQDARIKRHNYICELLLEEAKKKDWVVFKEPHIRDSNKELYKPDLIFVKDGRALVVDVTVRYEAAKSSLEEAAAEKVRKYKHLETEVRHLTNAKDVTFVGFPLGARGKWHQDNFKLLTELGLSKSRQVKMAETFSTVALFSSVDIVHMFASRARKSMVM

SEQ ID NO: 672 - protein, 1390 aa, synthetic construct
MASCPKPGPPVSAGAMSLESGLTTHSVLAIERGPNSLANSGSDFGGGGLGLPLRLLRVSVGTQTSRSDWVDLVSWSHPGPTSKSQQVDLVSLFPKHRVDLLSKNDQVDLVAQFLPSKFPPNLAENDLALLVNLEFYRSDLHVYECVHFAAHWEGLSGLPEVYEQLAPQPCVGETLHSSLPRDSELFVPEEGSSEKESEDAPKTSPPTPGKHGLEQTGEEKVMVTVPDKNPPCPCCGTRVNSVLNLIEHLKVSHGKRGVCFRCAKCGKENSNYHSVVCHFPKCRGPETEKAPAGEWICEVCNRDFTTKIGLGQHKRLAHPAVRNQERIVASQPKETSNRGAHKRCWTKEEEELLIRLEAQFEGNKNINKLIAEHITTKTAKQISDKRRLLSRKPAEEPREEPGTCHHTRRAAASLRTEPEMSHHAQAEDRDNGPGRRPLPGRAAAGGRTMDEIRRHPDKGNGQQRPTKQKSEEQLQAYYKKTLEERLSAGALNTFPRAFKQVMEGRDIKLVINQTAQDCFGCLESISQIRTATRDKKDTVTREKHPKKPFQKWMKDRAIKKGNYLRFQRLFYLDRGKLAKIILDDIECLSCDIPLSEIYSVFKTRWETTGSFKSLGDFKTYGKADNTAFRELITAKEIEKNVQEMSKGSAPGPDGITLGDVVKMDPEFSRTMEIFNLWLTTGKIPDMVRGCRTVLIPKSSKPDRLKDINNWRPITIGSILLRLFSRIVTARLSKACPLNPRQRGFIRAAGCSENLKLLQTIIWSAKREHRPLGVVFVDIAKAFDTVSHQHIIHALQQREVDPHIVGLVSNMYENISTYITTKRNTHTDKIQIRVGVKQGDPMSPLLFNLAMDPLLCKLEESGKGYHRGQSSITAMAFADDLVLLSDSWENMNTNISILETFCNLTGLKTQGQKCHGFYIKPTKDSYTINDCAAWTINGTPLNMIDPGESEKYLGLQFDPWIGIARSGLSTKLDFWLQRIDQAPLKPLQKTDILKTYTIPRLIYIADHSEVKTALLETLDQKIRTAVKEWLHLPPCTCDAILYSSTRDGGLGITKLAGLIPSVQARRLHRIAQSSDDTMKCFMEKEKMEQLHKKLWIQAGGDRENIPSIWEAPPSSEPPNNVSTNSEWEAPTQKDKFPKPCNWRKNEFKKWTKLASQGRGIVNFERDKISNHWIQYYRRIPHRKLLTALQLRANVYPTREFLARGRQDQYIKACRHCDADIESCAHIIGNCPVTQDARIKRHNYICELLLEEAKKKDWVVFKEPHIRDSNKELYKPDLIFVKDARALVVDVTVRYEAAKSSLEEAAAEKVRKYKHLETEVRHLTNAKDVTFVGFPLGAAGKWHQDNFKLLTELGLSKSRQVKMAETFSTVALFSSVDIVHMFASRARKSMVM

SEQ ID NO: 673 - protein, 1390 aa, synthetic construct
MASCPKPGPPVSAGAMSLESGLTTHSVLAIERGPNSLANSGSDFGGGGLGLPLRLLRVSVGTQTSRSDWVDLVSWSHPGPTSKSQQVDLVSLFPKHRVDLLSKNDQVDLVAQFLPSKFPPNLAENDLALLVNLEFYRSDLHVYECVHFAAHWEGLSGLPEVYEQLAPQPCVGETLHSSLPRDSELFVPEEGSSEKESEDAPKTSPPTPGKHGLEQTGEEKVMVTVPDKNPPCPCCGTRVNSVLNLIEHLKVSHGKRGVCFRCAKCGKENSNYHSVVCHFPKCRGPETEKAPAGEWICEVCNRDFTTKIGLGQHKRLAHPAVRNQERIVASQPKETSNRGAHKRCWTKEEEELLIRLEAQFEGNKNINKLIAEHITTKTAKQISDKRRLLSRKPAEEPREEPGTCHHTRRAAASLRTEPEMSHHAQAEDRDNGPGRRPLPGRAAAGGRTMDEIRRHPDKGNGQQRPTKQKSEEQLQAYYKKTLEERLSAGALNTFPRAFKQVMEGRDIKLVINQTAQDCFGCLESISQIRTATRDKKDTVTREKHPKKPFQKWMKDRAIKKGNYLRFQRLFYLDRGKLAKIILDDIECLSCDIPLSEIYSVFKTRWETTGSFKSLGDFKTYGKADNTAFRELITAKEIEKNVQEMSKGSAPGPDGITLGDVVKMDPEFSRTMEIFNLWLTTGKIPDMVRGCRTVLIPKSSKPDRLKDINNWRPITIGSILLRLFSRIVTARLSKACPLNPRQRGFIRAAGCSENLKLLQTIIWSAKREHRPLGVVFVDIAKAFDTVSHQHIIHALQQREVDPHIVGLVSNMYENISTYITTKRNTHTDKIQIRVGVKQGDPMSPLLFNLAMDPLLCKLEESGKGYHRGQSSITAMAFADDLVLLSDSWENMNTNISILETFCNLTGLKTQGQKCHGFYIKPTKDSYTINDCAAWTINGTPLNMIDPGESEKYLGLQFDPWIGIARSGLSTKLDFWLQRIDQAPLKPLQKTDILKTYTIPRLIYIADHSEVKTALLETLDQKIRTAVKEWLHLPPCTCDAILYSSTRDGGLGITKLAGLIPSVQARRLHRIAQSSDDTMKCFMEKEKMEQLHKKLWIQAGGDRENIPSIWEAPPSSEPPNNVSTNSEWEAPTQKDKFPKPCNWRKNEFKKWTKLASQGRGIVNFERDKISNHWIQYYRRIPHRKLLTALQLRANVYPTREFLARGRQDQYIKACRHCDADIESCAHIIGNCPVTQDARIKRANYICELLLEEAKKKDWVVFKEPHIRDSNKELYKPDLIFVKDARALVVDVTVRYEAAKSSLEEAAAEKVRKYKHLETEVRHLTNAKDVTFVGFPLGAAGKWHQDNFKLLTELGLSKSRQVKMAETFSTVALFSSVDIVHMFASRARKSMVM

SEQ ID NO: 674 - protein, 1390 aa, synthetic construct
MASCPKPGPPVSAGAMSLESGLTTHSVLAIERGPNSLANSGSDFGGGGLGLPLRLLRVSVGTQTSRSDWVDLVSWSHPGPTSKSQQVDLVSLFPKHRVDLLSKNDQVDLVAQFLPSKFPPNLAENDLALLVNLEFYRSDLHVYECVHFAAHWEGLSGLPEVYEQLAPQPCVGETLHSSLPRDSELFVPEEGSSEKESEDAPKTSPPTPGKHGLEQTGEEKVMVTVPDKNPPCPCCGTRVNSVLNLIEHLKVSHGKRGVCFRCAKCGKENSNYHSVVCHFPKCRGPETEKAPAGEWICEVCNRDFTTKIGLGQHKRLAHPAVRNQERIVASQPKETSNRGAHKRCWTKEEEELLIRLEAQFEGNKNINKLIAEHITTKTAKQISDKRRLLSRKPAEEPREEPGTCHHTRRAAASLRTEPEMSHHAQAEDRDNGPGRRPLPGRAAAGGRTMDEIRRHPDKGNGQQRPTKQKSEEQLQAYYKKTLEERLSAGALNTFPRAFKQVMEGRDIKLVINQTAQDCFGCLESISQIRTATRDKKDTVTREKHPKKPFQKWMKDRAIKKGNYLRFQRLFYLDRGKLAKIILDDIECLSCDIPLSEIYSVFKTRWETTGSFKSLGDFKTYGKADNTAFRELITAKEIEKNVQEMSKGSAPGPDGITLGDVVKMDPEFSRTMEIFNLWLTTGKIPDMVRGCRTVLIPKSSKPDRLKDINNWRPITIGSILLRLFSRIVTARLSKACPLNPRQRGFIRAAGCSENLKLLQTIIWSAKREHRPLGVVFVDIAKAFDTVSHQHIIHALQQREVDPHIVGLVSNMYENISTYITTKRNTHTDKIQIRVGVKQGDPMSPLLFNLAMDPLLCKLEESGKGYHRGQSSITAMAFADDLVLLSDSWENMNTNISILETFCNLTGLKTQGQKCHGFYIKPTKDSYTINDCAAWTINGTPLNMIDPGESEKYLGLQFDPWIGIARSGLSTKLDFWLQRIDQAPLKPLQKTDILKTYTIPRLIYIADHSEVKTALLETLDQKIRTAVKEWLHLPPCTCDAILYSSTRDGGLGITKLAGLIPSVQARRLHRIAQSSDDTMKCFMEKEKMEQLHKKLWIQAGGDRENIPSIWEAPPSSEPPNNVSTNSEWEAPTQKDKFPKPCNWRKNEFKKWTKLASQGRGIVNFERDKISNHWIQYYRRIPHRKLLTALQLRANVYPTREFLARGRQDQYIKACRHCDADIESCAHIIGNCPVTQDARIKRANYICELLLEEAKKKDWVVFKEPHIRDSNKELYKPDLIFVKDARALVVDVTVRYEAAKSSLEEAAAEKVRKAKHLETEVRHLTNAKDVTFVGFPLGARGKWHQDNFKLLTELGLSKSRQVKMAETFSTVALFSSVDIVHMFASRARKSMVM

SEQ ID NO: 675 - protein, 2080 aa, synthetic construct
MAPKKKRKVDRKTRLSEPPTLALRLKPYKTAIQQLRSVIRALKENTTVTFLPTPSLILQTVRSHCVSKITFNSSCLYITDKSFQPKTINNSTPLLGNFMYLTSSKDLTKFYVQDISDLSAKISMCAPDFNMEFSSACVHGQDIVRESENSAVHVDLDFGVVADLLKWIGPHTRVKRNVKKAPCPTGTVQILVHAGPPAIKFILTNGSELEFTANNRVSFHGVKNMRINVQLKNFYQTLLNCAVTKLPCTLRIVTEHDTLLYVASRNGLFAVENFLTEEPFQRGDPFDKNYVGNSGKSRSGSETPGTSESATPEGSNISGSSCGSPNSADTSSDFKDLWTKLKECHDREVQGLQVKVTKLKQERILDAQRLEEFFTKNQQLREQQKVLHETIKVLEDRLRAGLCDRCAVTEEHMRKKQQEFENIRQQNLKLITELMNERNTLQEENKKLSEQLQQKIENDQQHQAAELECEEDVIPDSPITAFSFSGVNRLRRKENPHVRYIEQTHTKLEHSVCANEMRKVSKSSTHPQHNPNENEILVADTYDQSQSPMAKAHGTSSYTPDKSSFNLATVVAETLGLGVQEESETQGPMSPLGDELYHCLEGNHKKQPFESGSETPGTSESATPEGSPKRKVSSAEGAAKEEPKRRSARLSAKPPAKVEAKPKKAAAKDKSSDKKVQTKGKRGAKGKQAEVANQETKEDLPAENGETKTEESPASDEAGEKEAKSDSGSETPGTSESATPESYEQLAPQPCVGETLHSSLPRDSELFVPEEGSSEKESEDAPKTSPPTPGKHGLEQTGEEKVMVTVPDKNPPCPCCGTRVNSVLNLIEHLKVSHGKRGVCFRCAKCGKENSNYHSVVCHFKKCRGPETEKAPAGEWICEVCNRDFTTKIGLGQHKRLAHPAVRNQERIVASQPKETSNRGAHKRCWTKEEEELLIRLEAQFEGNKNINKLIAEHITTKTAKQISDKRRLLSRKPAEEPREEPGTCHHTRRAAASLRTEPEMSHHAQAEDRDNGPGRRPLPGRAAAGGRTMDEIRRHPDKGNGQQRPTKQKSEEQLQAYYKKTLEERLSAGALNTFPRAFKQVMEGRDIKLVINQTAQDCFGCLESISQIRTATRDKKDTVTREKHPKKPFQKWMKKRAIKKGNYLRFQRLFYLDRGKLAKIILDDIECLSCDIPLSEIYSVFKTRWETTGSFKSLGDFKTYGKADNTAFRELITAKEIEKNVQEMSKGSAPGPDGITLGDVVKMDPEFSRTMEIFNLWLTTGKIPDMVRGCRTVLIPKSSKPDRLKDINNWRPITIGSILLRLFSRIVTARLSKACPLNPRQRGFIRAAGCSENLKLLQTIIWSAKREHRPLGVVFVDIAKAFDTVSHQHIIHALQQREVDPHIVGLVSNMYENISTYITTKRNTHTDKIQIRVGVKQGDPMSPLLFNLAMDPLLCKLEESGKGYHRGQSSITAMAFADDLVLLSDSWENMNTNISILETFCNLTGLKTQGQKCHGFYIKPTKKSYTINDCAAWTINGTPLNMIDPGESEKYLGLQFDPWIGIARSGLSTKLDFWLQRIDQAPLKPLQKTDILKTYTIPRLIYIADHSEVKSALLETLDQKIRTAVKEWLHLPPCTCDAILYSSTRDGGLGITKLAGLIPSVQARRLHRIAQSSDDTMKCFMEKEKMEQLHKKLWIQAGGDRENIPSIWEAPPSSEPPNNVSTNSEWEAPTQKDKFPKPCNWRKNEFKKWTKLASQGRGIVNFERDKISNHWIQYYRRIPHRKLLTALQLRANVYPTREFLARGRQDQYIKACRHCDADNESCAHIIGNCPVTQDARIKRHNYICELLLEEAKKKDWVVFKEPHIRDSNKELYKPDLIFVKDGRALVVDVTVRYEAAKSSLEEAAAEKVRKYKHLETEVRHLTNAKDVTFVGFPLGARGKWHQDNFKLLTELGLSKSRQVKMAETFSTVALFSSVDIVHMFASRARKSMVMSGSETPGTSESATPESNKSKNQKPKPQRGPRGRVRGQSRSGPVVFPSGAVLVGGRYIPPPKKAIRGPRRGLVQAPKSSERTSPRKRRSGGSKRTADGSEFESPKKKRKV

SEQ ID NO: 676 - protein, 1665 aa, synthetic construct
MAPKKKRKVNISGSSCGSPNSADTSSDFKDLWTKLKECHDREVQGLQVKVTKLKQERILDAQRLEEFFTKNQQLREQQKVLHETIKVLEDRLRAGLCDRCAVTEEHMRKKQQEFENIRQQNLKLITELMNERNTLQEENKKLSEQLQQKIENDQQHQAAELECEEDVIPDSPITAFSFSGVNRLRRKENPHVRYIEQTHTKLEHSVCANEMRKVSKSSTHPQHNPNENEILVADTYDQSQSPMAKAHGTSSYTPDKSSFNLATVVAETLGLGVQEESETQGPMSPLGDELYHCLEGNHKKQPFESGSETPGTSESATPEGSPKRKVSSAEGAAKEEPKRRSARLSAKPPAKVEAKPKKAAAKDKSSDKKVQTKGKRGAKGKQAEVANQETKEDLPAENGETKTEESPASDEAGEKEAKSDSGSETPGTSESATPESYEQLAPQPCVGETLHSSLPRDSELFVPEEGSSEKESEDAPKTSPPTPGKHGLEQTGEEKVMVTVPDKNPPCPCCGTRVNSVLNLIEHLKVSHGKRGVCFRCAKCGKENSNYHSVVCHFKKCRGPETEKAPAGEWICEVCNRDFTTKIGLGQHKRLAHPAVRNQERIVASQPKETSNRGAHKRCWTKEEEELLIRLEAQFEGNKNINKLIAEHITTKTAKQISDKRRLLSRKPAEEPREEPGTCHHTRRAAASLRTEPEMSHHAQAEDRDNGPGRRPLPGRAAAGGRTMDEIRRHPDKGNGQQRPTKQKSEEQLQAYYKKTLEERLSAGALNTFPRAFKQVMEGRDIKLVINQTAQDCFGCLESISQIRTATRDKKDTVTREKHPQTTIREYYKKRAIKKGNYLRFQRLFYLDRGKLAKIILDDIECLSCDIPLSEIYSVFKTRWETTGSFKSLGDFKTYGKADNTAFRELITAKEIEKNVQEMSKGSAPGPDGITLGDVVKMDPEFSRTMEIFNLWLTTGKIPDMVRGCRTVLIPKSSKPDRLKDINNWRPITIGSILLRLFSRIVTARLSKACPLNPRQRGFIRAAGCSENLKLLQTIIWSAKREHRPLGVVFVDIAKAFDTVSHQHIIHALQQREVDPHIVGLVSNMYENISTYITTKRNTHTDKIQIRVGVKQGDPMSPLLFNLAMDPLLCKLEESGKGYHRGQSSITAMAFADDLVLLSDSWENMNTNISILETFCNLTGLKTQGQKCHGFYIKPTKKSYTINDCAAWTINGTPLNMIDPGESEKYLGLQFDPWIGIARSGLSTKLDFWLQRIDQAPLKPLQKTDILKTYTIPRLIYIADHSEVKSALLETLDQKIRTAVKEWLHLPPCTCDAILYSSTRDGGLGITKLAGLIPSVQARRLHRIAQSSDDTMKCFMEKEKMEQLHKKLWIQAGGDRENIPSIWEAPPSSEPPNNVSTNSEWEAPTQKDKFPKPCNWRKNEFKKWTKLASQGRGIVNFERDKISNHWIQYYRRIPHRKLLTALQLRANVYPTREFLARGRQDQYIKACRHCDADNESCAHIIGNCPVTQDARIKRHNYICELLLEEAKKKDWVVFKEPHIRDSNKELYKPDLIFVKDGRALVVDVTVRYEAAKSSLEEAAAEKVRKYKHLETEVRHLTNAKDVTFVGFPLGARGKWHQDNFKLLTELGLSKSRQVKMAETFSTVALFSSVDIVHMFASRARKSMVM

SEQ ID NO: 677 - protein, 1671 aa, synthetic construct
MAPAAKRVKLDSGGSNISGSSCGSPNSADTSSDFKDLWTKLKECHDREVQGLQVKVTKLKQERILDAQRLEEFFTKNQQLREQQKVLHETIKVLEDRLRAGLCDRCAVTEEHMRKKQQEFENIRQQNLKLITELMNERNTLQEENKKLSEQLQQKIENDQQHQAAELECEEDVIPDSPITAFSFSGVNRLRRKENPHVRYIEQTHTKLEHSVCANEMRKVSKSSTHPQHNPNENEILVADTYDQSQSPMAKAHGTSSYTPDKSSFNLATVVAETLGLGVQEESETQGPMSPLGDELYHCLEGNHKKQPFESGSETPGTSESATPEGSPKRKVSSAEGAAKEEPKRRSARLSAKPPAKVEAKPKKAAAKDKSSDKKVQTKGKRGAKGKQAEVANQETKEDLPAENGETKTEESPASDEAGEKEAKSDSGSETPGTSESATPESYEQLAPQPCVGETLHSSLPRDSELFVPEEGSSEKESEDAPKTSPPTPGKHGLEQTGEEKVMVTVPDKNPPCPCCGTRVNSVLNLIEHLKVSHGKRGVCFRCAKCGKENSNYHSVVCHFKKCRGPETEKAPAGEWICEVCNRDFTTKIGLGQHKRLAHPAVRNQERIVASQPKETSNRGAHKRCWTKEEEELLIRLEAQFEGNKNINKLIAEHITTKTAKQISDKRRLLSRKPAEEPREEPGTCHHTRRAAASLRTEPEMSHHAQAEDRDNGPGRRPLPGRAAAGGRTMDEIRRHPDKGNGQQRPTKQKSEEQLQAYYKKTLEERLSAGALNTFPRAFKQVMEGRDIKLVINQTAQDCFGCLESISQIRTATRDKKDTVTREKHPKKPFQKWMKKRAIKKGNYLRFQRLFYLDRGKLAKIILDDIECLSCDIPLSEIYSVFKTRWETTGSFKSLGDFKTYGKADNTAFRELITAKEIEKNVQEMSKGSAPGPDGITLGDVVKMDPEFSRTMEIFNLWLTTGKIPDMVRGCRTVLIPKSSKPDRLKDINNWRPITIGSILLRLFSRIVTARLSKACPLNPRQRGFIRAAGCSENLKLLQTIIWSAKREHRPLGVVFVDIAKAFDTVSHQHIIHALQQREVDPHIVGLVSNMYENISTYITTKRNTHTDKIQIRVGVKQGDPMSPLLFNLAMDPLLCKLEESGKGYHRGQSSITAMAFADDLVLLSDSWENMNTNISILETFCNLTGLKTQGQKCHGFYIKPTKKSYTINDCAAWTINGTPLNMIDPGESEKYLGLQFDPWIGIARSGLSTKLDFWLQRIDQAPLKPLQKTDILKTYTIPRLIYIADHSEVKSALLETLDQKIRTAVKEWLHLPPCTCDAILYSSTRDGGLGITKLAGLIPSVQARRLHRIAQSSDDTMKCFMEKEKMEQLHKKLWIQAGGDRENIPSIWEAPPSSEPPNNVSTNSEWEAPTQKDKFPKPCNWRKNEFKKWTKLASQGRGIVNFERDKISNHWIQYYRRIPHRKLLTALQLRANVYPTREFLARGRQDQYIKACRHCDADNESCAHIIGNCPVTQDARIKRHNYICELLLEEAKKKDWVVFKEPHIRDSNKELYKPDLIFVKDGRALVVDVTVRYEAAKSSLEEAAAEKVRKYKHLETEVRHLTNAKDVTFVGFPLGARGKWHQDNFKLLTELGLSKSRQVKMAETFSTVALFSSVDIVHMFASRARKSMVM

SEQ ID NO: 678 - protein, 1742 aa, synthetic construct
MAPKKKRKVWKPGDECFALYWEDNKFYRAEVEALHSSGMTAVVKFIDYGNYEEVLLSNIKPIQTEAWEESGSETPGTSESATPEGSNISGSSCGSPNSADTSSDFKDLWTKLKECHDREVQGLQVKVTKLKQERILDAQRLEEFFTKNQQLREQQKVLHETIKVLEDRLRAGLCDRCAVTEEHMRKKQQEFENIRQQNLKLITELMNERNTLQEENKKLSEQLQQKIENDQQHQAAELECEEDVIPDSPITAFSFSGVNRLRRKENPHVRYIEQTHTKLEHSVCANEMRKVSKSSTHPQHNPNENEILVADTYDQSQSPMAKAHGTSSYTPDKSSFNLATVVAETLGLGVQEESETQGPMSPLGDELYHCLEGNHKKQPFESGSETPGTSESATPEGSPKRKVSSAEGAAKEEPKRRSARLSAKPPAKVEAKPKKAAAKDKSSDKKVQTKGKRGAKGKQAEVANQETKEDLPAENGETKTEESPASDEAGEKEAKSDSGSETPGTSESATPESYEQLAPQPCVGETLHSSLPRDSELFVPEEGSSEKESEDAPKTSPPTPGKHGLEQTGEEKVMVTVPDKNPPCPCCGTRVNSVLNLIEHLKVSHGKRGVCFRCAKCGKENSNYHSVVCHFKKCRGPETEKAPAGEWICEVCNRDFTTKIGLGQHKRLAHPAVRNQERIVASQPKETSNRGAHKRCWTKEEEELLIRLEAQFEGNKNINKLIAEHITTKTAKQISDKRRLLSRKPAEEPREEPGTCHHTRRAAASLRTEPEMSHHAQAEDRDNGPGRRPLPGRAAAGGRTMDEIRRHPDKGNGQQRPTKQKSEEQLQAYYKKTLEERLSAGALNTFPRAFKQVMEGRDIKLVINQTAQDCFGCLESISQIRTATRDKKDTVTREKHPKKPFQKWMKKRAIKKGNYLRFQRLFYLDRGKLAKIILDDIECLSCDIPLSEIYSVFKTRWETTGSFKSLGDFKTYGKADNTAFRELITAKEIEKNVQEMSKGSAPGPDGITLGDVVKMDPEFSRTMEIFNLWLTTGKIPDMVRGCRTVLIPKSSKPDRLKDINNWRPITIGSILLRLFSRIVTARLSKACPLNPRQRGFIRAAGCSENLKLLQTIIWSAKREHRPLGVVFVDIAKAFDTVSHQHIIHALQQREVDPHIVGLVSNMYENISTYITTKRNTHTDKIQIRVGVKQGDPMSPLLFNLAMDPLLCKLEESGKGYHRGQSSITAMAFADDLVLLSDSWENMNTNISILETFCNLTGLKTQGQKCHGFYIKPTKDSYTINDCAAWTINGTPLNMIDPGESEKYLGLQFDPWIGIARSGLSTKLDFWLQRIDQAPLKPLQKTDILKTYTIPRLIYIADHSEVKSALLETLDQKIRTAVKEWLHLPPCTCDAILYSSTRDGGLGITKLAGLIPSVQARRLHRIAQSSDDTMKCFMEKEKMEQLHKKLWIQAGGDRENIPSIWEAPPSSEPPNNVSTNSEWEAPTQKDKFPKPCNWRKNEFKKWTKLASQGRGIVNFERDKISNHWIQYYRRIPHRKLLTALQLRANVYPTREFLARGRQDQYIKACRHCDADNESCAHIIGNCPVTQDARIKRHNYICELLLEEAKKKDWVVFKEPHIRDSNKELYKPDLIFVKDGRALVVDVTVRYEAAKSSLEEAAAEKVRKYKHLETEVRHLTNAKDVTFVGFPLGARGKWHQDNFKLLTELGLSKSRQVKMAETFSTVALFSSVDIVHMFASRARKSMVM

SEQ ID NO: 679 - protein, 1700 aa, synthetic construct
MASKQEMASASSSQRGRSGSGNFGGGRGGGFGGNDNFPKKKRKVNISGSSCGSPNSADTSSDFKDLWTKLKECHDREVQGLQVKVTKLKQERILDAQRLEEFFTKNQQLREQQKVLHETIKVLEDRLRAGLCDRCAVTEEHMRKKQQEFENIRQQNLKLITELMNERNTLQEENKKLSEQLQQKIENDQQHQAAELECEEDVIPDSPITAFSFSGVNRLRRKENPHVRYIEQTHTKLEHSVCANEMRKVSKSSTHPQHNPNENEILVADTYDQSQSPMAKAHGTSSYTPDKSSFNLATVVAETLGLGVQEESETQGPMSPLGDELYHCLEGNHKKQPFESGSETPGTSESATPEGSPKRKVSSAEGAAKEEPKRRSARLSAKPPAKVEAKPKKAAAKDKSSDKKVQTKGKRGAKGKQAEVANQETKEDLPAENGETKTEESPASDEAGEKEAKSDSGSETPGTSESATPESYEQLAPQPCVGETLHSSLPRDSELFVPEEGSSEKESEDAPKTSPPTPGKHGLEQTGEEKVMVTVPDKNPPCPCCGTRVNSVLNLIEHLKVSHGKRGVCFRCAKCGKENSNYHSVVCHFKKCRGPETEKAPAGEWICEVCNRDFTTKIGLGQHKRLAHPAVRNQERIVASQPKETSNRGAHKRCWTKEEEELLIRLEAQFEGNKNINKLIAEHITTKTAKQISDKRRLLSRKPAEEPREEPGTCHHTRRAAASLRTEPEMSHHAQAEDRDNGPGRRPLPGRAAAGGRTMDEIRRHPDKGNGQQRPTKQKSEEQLQAYYKKTLEERLSAGALNTFPRAFKQVMEGRDIKLVINQTAQDCFGCLESISQIRTATRDKKDTVTREKHPKKPFQKWMKKRAIKKGNYLRFQRLFYLDRGKLAKIILDDIECLSCDIPLSEIYSVFKTRWETTGSFKSLGDFKTYGKADNTAFRELITAKEIEKNVQEMSKGSAPGPDGITLGDVVKMDPEFSRTMEIFNLWLTTGKIPDMVRGCRTVLIPKSSKPDRLKDINNWRPITIGSILLRLFSRIVTARLSKACPLNPRQRGFIRAAGCSENLKLLQTIIWSAKREHRPLGVVFVDIAKAFDTVSHQHIIHALQQREVDPHIVGLVSNMYENISTYITTKRNTHTDKIQIRVGVKQGDPMSPLLFNLAMDPLLCKLEESGKGYHRGQSSITAMAFADDLVLLSDSWENMNTNISILETFCNLTGLKTQGQKCHGFYIKPTKKSYTINDCAAWTINGTPLNMIDPGESEKYLGLQFDPWIGIARSGLSTKLDFWLQRIDQAPLKPLQKTDILKTYTIPRLIYIADHSEVKSALLETLDQKIRTAVKEWLHLPPCTCDAILYSSTRDGGLGITKLAGLIPSVQARRLHRIAQSSDDTMKCFMEKEKMEQLHKKLWIQAGGDRENIPSIWEAPPSSEPPNNVSTNSEWEAPTQKDKFPKPCNWRKNEFKKWTKLASQGRGIVNFERDKISNHWIQYYRRIPHRKLLTALQLRANVYPTREFLARGRQDQYIKACRHCDADNESCAHIIGNCPVTQDARIKRHNYICELLLEEAKKKDWVVFKEPHIRDSNKELYKPDLIFVKDGRALVVDVTVRYEAAKSSLEEAAAEKVRKYKHLETEVRHLTNAKDVTFVGFPLGARGKWHQDNFKLLTELGLSKSRQVKMAETFSTVALFSSVDIVHMFASRARKSMVM

SEQ ID NO: 680 - protein, 1721 aa, synthetic construct
MANYNNQSSNFGPMKGGNFGGRSSGPYGGGGQYFAKPRNQGGYGGSSSSSSYGSGRRFPKKKRKVNISGSSCGSPNSADTSSDFKDLWTKLKECHDREVQGLQVKVTKLKQERILDAQRLEEFFTKNQQLREQQKVLHETIKVLEDRLRAGLCDRCAVTEEHMRKKQQEFENIRQQNLKLITELMNERNTLQEENKKLSEQLQQKIENDQQHQAAELECEEDVIPDSPITAFSFSGVNRLRRKENPHVRYIEQTHTKLEHSVCANEMRKVSKSSTHPQHNPNENEILVADTYDQSQSPMAKAHGTSSYTPDKSSFNLATVVAETLGLGVQEESETQGPMSPLGDELYHCLEGNHKKQPFESGSETPGTSESATPEGSPKRKVSSAEGAAKEEPKRRSARLSAKPPAKVEAKPKKAAAKDKSSDKKVQTKGKRGAKGKQAEVANQETKEDLPAENGETKTEESPASDEAGEKEAKSDSGSETPGTSESATPESYEQLAPQPCVGETLHSSLPRDSELFVPEEGSSEKESEDAPKTSPPTPGKHGLEQTGEEKVMVTVPDKNPPCPCCGTRVNSVLNLIEHLKVSHGKRGVCFRCAKCGKENSNYHSVVCHFKKCRGPETEKAPAGEWICEVCNRDFTTKIGLGQHKRLAHPAVRNQERIVASQPKETSNRGAHKRCWTKEEEELLIRLEAQFEGNKNINKLIAEHITTKTAKQISDKRRLLSRKPAEEPREEPGTCHHTRRAAASLRTEPEMSHHAQAEDRDNGPGRRPLPGRAAAGGRTMDEIRRHPDKGNGQQRPTKQKSEEQLQAYYKKTLEERLSAGALNTFPRAFKQVMEGRDIKLVINQTAQDCFGCLESISQIRTATRDKKDTVTREKHPKKPFQKWMKKRAIKKGNYLRFQRLFYLDRGKLAKIILDDIECLSCDIPLSEIYSVFKTRWETTGSFKSLGDFKTYGKADNTAFRELITAKEIEKNVQEMSKGSAPGPDGITLGDVVKMDPEFSRTMEIFNLWLTTGKIPDMVRGCRTVLIPKSSKPDRLKDINNWRPITIGSILLRLFSRIVTARLSKACPLNPRQRGFIRAAGCSENLKLLQTIIWSAKREHRPLGVVFVDIAKAFDTVSHQHIIHALQQREVDPHIVGLVSNMYENISTYITTKRNTHTDKIQIRVGVKQGDPMSPLLFNLAMDPLLCKLEESGKGYHRGQSSITAMAFADDLVLLSDSWENMNTNISILETFCNLTGLKTQGQKCHGFYIKPTKKSYTINDCAAWTINGTPLNMIDPGESEKYLGLQFDPWIGIARSGLSTKLDFWLQRIDQAPLKPLQKTDILKTYTIPRLIYIADHSEVKSALLETLDQKIRTAVKEWLHLPPCTCDAILYSSTRDGGLGITKLAGLIPSVQARRLHRIAQSSDDTMKCFMEKEKMEQLHKKLWIQAGGDRENIPSIWEAPPSSEPPNNVSTNSEWEAPTQKDKFPKPCNWRKNEFKKWTKLASQGRGIVNFERDKISNHWIQYYRRIPHRKLLTALQLRANVYPTREFLARGRQDQYIKACRHCDADNESCAHIIGNCPVTQDARIKRHNYICELLLEEAKKKDWVVFKEPHIRDSNKELYKPDLIFVKDGRALVVDVTVRYEAAKSSLEEAAAEKVRKYKHLETEVRHLTNAKDVTFVGFPLGARGKWHQDNFKLLTELGLSKSRQVKMAETFSTVALFSSVDIVHMFASRARKSMVM

SEQ ID NO: 681 - protein, 1909 aa, synthetic construct
MGDEDWEAEINPHMSSYVPIFEKDRYSGENGDNFNRTPASSSEMDDGPSRRDHFMKSGFASGRNFGNRDAGECNKRDNTSTMGGFGVGKSFGNRGFSNSRFEDGDSSGFWRESSNDCEDNPTRNRGFSKRGGYRDGNNSEASGPYRRGGRGSFRGCRGGFGLGSPNNDLDPDECMQRTGGLFGSRRPVLSGTGNGDTSQSRSGSGSERGGYKGLNEEVITGSGKNSWKSEAEGGESSDTQGPKVTYPKKKRKVNISGSSCGSPNSADTSSDFKDLWTKLKECHDREVQGLQVKVTKLKQERILDAQRLEEFFTKNQQLREQQKVLHETIKVLEDRLRAGLCDRCAVTEEHMRKKQQEFENIRQQNLKLITELMNERNTLQEENKKLSEQLQQKIENDQQHQAAELECEEDVIPDSPITAFSFSGVNRLRRKENPHVRYIEQTHTKLEHSVCANEMRKVSKSSTHPQHNPNENEILVADTYDQSQSPMAKAHGTSSYTPDKSSFNLATVVAETLGLGVQEESETQGPMSPLGDELYHCLEGNHKKQPFESGSETPGTSESATPEGSPKRKVSSAEGAAKEEPKRRSARLSAKPPAKVEAKPKKAAAKDKSSDKKVQTKGKRGAKGKQAEVANQETKEDLPAENGETKTEESPASDEAGEKEAKSDSGSETPGTSESATPESYEQLAPQPCVGETLHSSLPRDSELFVPEEGSSEKESEDAPKTSPPTPGKHGLEQTGEEKVMVTVPDKNPPCPCCGTRVNSVLNLIEHLKVSHGKRGVCFRCAKCGKENSNYHSVVCHFKKCRGPETEKAPAGEWICEVCNRDFTTKIGLGQHKRLAHPAVRNQERIVASQPKETSNRGAHKRCWTKEEEELLIRLEAQFEGNKNINKLIAEHITTKTAKQISDKRRLLSRKPAEEPREEPGTCHHTRRAAASLRTEPEMSHHAQAEDRDNGPGRRPLPGRAAAGGRTMDEIRRHPDKGNGQQRPTKQKSEEQLQAYYKKTLEERLSAGALNTFPRAFKQVMEGRDIKLVINQTAQDCFGCLESISQIRTATRDKKDTVTREKHPKKPFQKWMKKRAIKKGNYLRFQRLFYLDRGKLAKIILDDIECLSCDIPLSEIYSVFKTRWETTGSFKSLGDFKTYGKADNTAFRELITAKEIEKNVQEMSKGSAPGPDGITLGDVVKMDPEFSRTMEIFNLWLTTGKIPDMVRGCRTVLIPKSSKPDRLKDINNWRPITIGSILLRLFSRIVTARLSKACPLNPRQRGFIRAAGCSENLKLLQTIIWSAKREHRPLGVVFVDIAKAFDTVSHQHIIHALQQREVDPHIVGLVSNMYENISTYITTKRNTHTDKIQIRVGVKQGDPMSPLLFNLAMDPLLCKLEESGKGYHRGQSSITAMAFADDLVLLSDSWENMNTNISILETFCNLTGLKTQGQKCHGFYIKPTKKSYTINDCAAWTINGTPLNMIDPGESEKYLGLQFDPWIGIARSGLSTKLDFWLQRIDQAPLKPLQKTDILKTYTIPRLIYIADHSEVKSALLETLDQKIRTAVKEWLHLPPCTCDAILYSSTRDGGLGITKLAGLIPSVQARRLHRIAQSSDDTMKCFMEKEKMEQLHKKLWIQAGGDRENIPSIWEAPPSSEPPNNVSTNSEWEAPTQKDKFPKPCNWRKNEFKKWTKLASQGRGIVNFERDKISNHWIQYYRRIPHRKLLTALQLRANVYPTREFLARGRQDQYIKACRHCDADNESCAHIIGNCPVTQDARIKRHNYICELLLEEAKKKDWVVFKEPHIRDSNKELYKPDLIFVKDGRALVVDVTVRYEAAKSSLEEAAAEKVRKYKHLETEVRHLTNAKDVTFVGFPLGARGKWHQDNFKLLTELGLSKSRQVKMAETFSTVALFSSVDIVHMFASRARKSMVM

SEQ ID NO: 682 - protein, 1740 aa, synthetic construct
MAQAIAETPENDIPETEVEDDEGWMSHVLQFEDKSRKVKDASMQDSDTFEIYDPRNPVNKRRREESKKLMREKKERRPKKKRKVNISGSSCGSPNSADTSSDFKDLWTKLKECHDREVQGLQVKVTKLKQERILDAQRLEEFFTKNQQLREQQKVLHETIKVLEDRLRAGLCDRCAVTEEHMRKKQQEFENIRQQNLKLITELMNERNTLQEENKKLSEQLQQKIENDQQHQAAELECEEDVIPDSPITAFSFSGVNRLRRKENPHVRYIEQTHTKLEHSVCANEMRKVSKSSTHPQHNPNENEILVADTYDQSQSPMAKAHGTSSYTPDKSSFNLATVVAETLGLGVQEESETQGPMSPLGDELYHCLEGNHKKQPFESGSETPGTSESATPEGSPKRKVSSAEGAAKEEPKRRSARLSAKPPAKVEAKPKKAAAKDKSSDKKVQTKGKRGAKGKQAEVANQETKEDLPAENGETKTEESPASDEAGEKEAKSDSGSETPGTSESATPESYEQLAPQPCVGETLHSSLPRDSELFVPEEGSSEKESEDAPKTSPPTPGKHGLEQTGEEKVMVTVPDKNPPCPCCGTRVNSVLNLIEHLKVSHGKRGVCFRCAKCGKENSNYHSVVCHFKKCRGPETEKAPAGEWICEVCNRDFTTKIGLGQHKRLAHPAVRNQERIVASQPKETSNRGAHKRCWTKEEEELLIRLEAQFEGNKNINKLIAEHITTKTAKQISDKRRLLSRKPAEEPREEPGTCHHTRRAAASLRTEPEMSHHAQAEDRDNGPGRRPLPGRAAAGGRTMDEIRRHPDKGNGQQRPTKQKSEEQLQAYYKKTLEERLSAGALNTFPRAFKQVMEGRDIKLVINQTAQDCFGCLESISQIRTATRDKKDTVTREKHPKKPFQKWMKKRAIKKGNYLRFQRLFYLDRGKLAKIILDDIECLSCDIPLSEIYSVFKTRWETTGSFKSLGDFKTYGKADNTAFRELITAKEIEKNVQEMSKGSAPGPDGITLGDVVKMDPEFSRTMEIFNLWLTTGKIPDMVRGCRTVLIPKSSKPDRLKDINNWRPITIGSILLRLFSRIVTARLSKACPLNPRQRGFIRAAGCSENLKLLQTIIWSAKREHRPLGVVFVDIAKAFDTVSHQHIIHALQQREVDPHIVGLVSNMYENISTYITTKRNTHTDKIQIRVGVKQGDPMSPLLFNLAMDPLLCKLEESGKGYHRGQSSITAMAFADDLVLLSDSWENMNTNISILETFCNLTGLKTQGQKCHGFYIKPTKKSYTINDCAAWTINGTPLNMIDPGESEKYLGLQFDPWIGIARSGLSTKLDFWLQRIDQAPLKPLQKTDILKTYTIPRLIYIADHSEVKSALLETLDQKIRTAVKEWLHLPPCTCDAILYSSTRDGGLGITKLAGLIPSVQARRLHRIAQSSDDTMKCFMEKEKMEQLHKKLWIQAGGDRENIPSIWEAPPSSEPPNNVSTNSEWEAPTQKDKFPKPCNWRKNEFKKWTKLASQGRGIVNFERDKISNHWIQYYRRIPHRKLLTALQLRANVYPTREFLARGRQDQYIKACRHCDADNESCAHIIGNCPVTQDARIKRHNYICELLLEEAKKKDWVVFKEPHIRDSNKELYKPDLIFVKDGRALVVDVTVRYEAAKSSLEEAAAEKVRKYKHLETEVRHLTNAKDVTFVGFPLGARGKWHQDNFKLLTELGLSKSRQVKMAETFSTVALFSSVDIVHMFASRARKSMVM

SEQ ID NO: 683 - protein, 1709 aa, synthetic construct
MADLLGSILSSMEKPPSLGDQETRRKAREQAARLKKLQEQEKQQKVPKKKRKVNISGSSCGSPNSADTSSDFKDLWTKLKECHDREVQGLQVKVTKLKQERILDAQRLEEFFTKNQQLREQQKVLHETIKVLEDRLRAGLCDRCAVTEEHMRKKQQEFENIRQQNLKLITELMNERNTLQEENKKLSEQLQQKIENDQQHQAAELECEEDVIPDSPITAFSFSGVNRLRRKENPHVRYIEQTHTKLEHSVCANEMRKVSKSSTHPQHNPNENEILVADTYDQSQSPMAKAHGTSSYTPDKSSFNLATVVAETLGLGVQEESETQGPMSPLGDELYHCLEGNHKKQPFESGSETPGTSESATPEGSPKRKVSSAEGAAKEEPKRRSARLSAKPPAKVEAKPKKAAAKDKSSDKKVQTKGKRGAKGKQAEVANQETKEDLPAENGETKTEESPASDEAGEKEAKSDSGSETPGTSESATPESYEQLAPQPCVGETLHSSLPRDSELFVPEEGSSEKESEDAPKTSPPTPGKHGLEQTGEEKVMVTVPDKNPPCPCCGTRVNSVLNLIEHLKVSHGKRGVCFRCAKCGKENSNYHSVVCHFKKCRGPETEKAPAGEWICEVCNRDFTTKIGLGQHKRLAHPAVRNQERIVASQPKETSNRGAHKRCWTKEEEELLIRLEAQFEGNKNINKLIAEHITTKTAKQISDKRRLLSRKPAEEPREEPGTCHHTRRAAASLRTEPEMSHHAQAEDRDNGPGRRPLPGRAAAGGRTMDEIRRHPDKGNGQQRPTKQKSEEQLQAYYKKTLEERLSAGALNTFPRAFKQVMEGRDIKLVINQTAQDCFGCLESISQIRTATRDKKDTVTREKHPKKPFQKWMKKRAIKKGNYLRFQRLFYLDRGKLAKIILDDIECLSCDIPLSEIYSVFKTRWETTGSFKSLGDFKTYGKADNTAFRELITAKEIEKNVQEMSKGSAPGPDGITLGDVVKMDPEFSRTMEIFNLWLTTGKIPDMVRGCRTVLIPKSSKPDRLKDINNWRPITIGSILLRLFSRIVTARLSKACPLNPRQRGFIRAAGCSENLKLLQTIIWSAKREHRPLGVVFVDIAKAFDTVSHQHIIHALQQREVDPHIVGLVSNMYENISTYITTKRNTHTDKIQIRVGVKQGDPMSPLLFNLAMDPLLCKLEESGKGYHRGQSSITAMAFADDLVLLSDSWENMNTNISILETFCNLTGLKTQGQKCHGFYIKPTKKSYTINDCAAWTINGTPLNMIDPGESEKYLGLQFDPWIGIARSGLSTKLDFWLQRIDQAPLKPLQKTDILKTYTIPRLIYIADHSEVKSALLETLDQKIRTAVKEWLHLPPCTCDAILYSSTRDGGLGITKLAGLIPSVQARRLHRIAQSSDDTMKCFMEKEKMEQLHKKLWIQAGGDRENIPSIWEAPPSSEPPNNVSTNSEWEAPTQKDKFPKPCNWRKNEFKKWTKLASQGRGIVNFERDKISNHWIQYYRRIPHRKLLTALQLRANVYPTREFLARGRQDQYIKACRHCDADNESCAHIIGNCPVTQDARIKRHNYICELLLEEAKKKDWVVFKEPHIRDSNKELYKPDLIFVKDGRALVVDVTVRYEAAKSSLEEAAAEKVRKYKHLETEVRHLTNAKDVTFVGFPLGARGKWHQDNFKLLTELGLSKSRQVKMAETFSTVALFSSVDIVHMFASRARKSMVM

SEQ ID NO: 684 - protein, 1928 aa, synthetic construct
MAMARGPKKHLKRVAAPKHWMLDKLTGVFAPRPSTGPHKLRECLPLIVFLRNRLKYALTGDEVKKICMQHFLKIDGKVRVDITYPAGFIDVISIEKTGEHFRLVYNTKGCFAVHRITVEEAKYKLCKVRKITVGTKGIPHLVTHDARTIRYPDPLIKVNDTVQIDLGTGKITSFIKFDTGNVCMVIAGANLGRVGVITNRERHPGSCDVVHVKDANGNSFATRISNIFVIGNGNKPWISLPRGKGIRLTIAEERDKRLAAKQSSGPKKKRKVNISGSSCGSPNSADTSSDFKDLWTKLKECHDREVQGLQVKVTKLKQERILDAQRLEEFFTKNQQLREQQKVLHETIKVLEDRLRAGLCDRCAVTEEHMRKKQQEFENIRQQNLKLITELMNERNTLQEENKKLSEQLQQKIENDQQHQAAELECEEDVIPDSPITAFSFSGVNRLRRKENPHVRYIEQTHTKLEHSVCANEMRKVSKSSTHPQHNPNENEILVADTYDQSQSPMAKAHGTSSYTPDKSSFNLATVVAETLGLGVQEESETQGPMSPLGDELYHCLEGNHKKQPFESGSETPGTSESATPEGSPKRKVSSAEGAAKEEPKRRSARLSAKPPAKVEAKPKKAAAKDKSSDKKVQTKGKRGAKGKQAEVANQETKEDLPAENGETKTEESPASDEAGEKEAKSDSGSETPGTSESATPESYEQLAPQPCVGETLHSSLPRDSELFVPEEGSSEKESEDAPKTSPPTPGKHGLEQTGEEKVMVTVPDKNPPCPCCGTRVNSVLNLIEHLKVSHGKRGVCFRCAKCGKENSNYHSVVCHFKKCRGPETEKAPAGEWICEVCNRDFTTKIGLGQHKRLAHPAVRNQERIVASQPKETSNRGAHKRCWTKEEEELLIRLEAQFEGNKNINKLIAEHITTKTAKQISDKRRLLSRKPAEEPREEPGTCHHTRRAAASLRTEPEMSHHAQAEDRDNGPGRRPLPGRAAAGGRTMDEIRRHPDKGNGQQRPTKQKSEEQLQAYYKKTLEERLSAGALNTFPRAFKQVMEGRDIKLVINQTAQDCFGCLESISQIRTATRDKKDTVTREKHPKKPFQKWMKKRAIKKGNYLRFQRLFYLDRGKLAKIILDDIECLSCDIPLSEIYSVFKTRWETTGSFKSLGDFKTYGKADNTAFRELITAKEIEKNVQEMSKGSAPGPDGITLGDVVKMDPEFSRTMEIFNLWLTTGKIPDMVRGCRTVLIPKSSKPDRLKDINNWRPITIGSILLRLFSRIVTARLSKACPLNPRQRGFIRAAGCSENLKLLQTIIWSAKREHRPLGVVFVDIAKAFDTVSHQHIIHALQQREVDPHIVGLVSNMYENISTYITTKRNTHTDKIQIRVGVKQGDPMSPLLFNLAMDPLLCKLEESGKGYHRGQSSITAMAFADDLVLLSDSWENMNTNISILETFCNLTGLKTQGQKCHGFYIKPTKKSYTINDCAAWTINGTPLNMIDPGESEKYLGLQFDPWIGIARSGLSTKLDFWLQRIDQAPLKPLQKTDILKTYTIPRLIYIADHSEVKSALLETLDQKIRTAVKEWLHLPPCTCDAILYSSTRDGGLGITKLAGLIPSVQARRLHRIAQSSDDTMKCFMEKEKMEQLHKKLWIQAGGDRENIPSIWEAPPSSEPPNNVSTNSEWEAPTQKDKFPKPCNWRKNEFKKWTKLASQGRGIVNFERDKISNHWIQYYRRIPHRKLLTALQLRANVYPTREFLARGRQDQYIKACRHCDADNESCAHIIGNCPVTQDARIKRHNYICELLLEEAKKKDWVVFKEPHIRDSNKELYKPDLIFVKDGRALVVDVTVRYEAAKSSLEEAAAEKVRKYKHLETEVRHLTNAKDVTFVGFPLGARGKWHQDNFKLLTELGLSKSRQVKMAETFSTVALFSSVDIVHMFASRARKSMVM

SEQ ID NO: 685 - protein, 1791 aa, synthetic construct
MAGRGKQGGKARAKAKTRSSRAGLQFPVGRVHRLLRKGNYAERVGAGAPVYLAAVLEYLTAEILELAGNAARDNKKTRIIPRHLQLAIRNDEELNKLLGKVTIAQGGVLPNIQAVLLPKKTESHHKAKPKKKRKVNISGSSCGSPNSADTSSDFKDLWTKLKECHDREVQGLQVKVTKLKQERILDAQRLEEFFTKNQQLREQQKVLHETIKVLEDRLRAGLCDRCAVTEEHMRKKQQEFENIRQQNLKLITELMNERNTLQEENKKLSEQLQQKIENDQQHQAAELECEEDVIPDSPITAFSFSGVNRLRRKENPHVRYIEQTHTKLEHSVCANEMRKVSKSSTHPQHNPNENEILVADTYDQSQSPMAKAHGTSSYTPDKSSFNLATVVAETLGLGVQEESETQGPMSPLGDELYHCLEGNHKKQPFESGSETPGTSESATPEGSPKRKVSSAEGAAKEEPKRRSARLSAKPPAKVEAKPKKAAAKDKSSDKKVQTKGKRGAKGKQAEVANQETKEDLPAENGETKTEESPASDEAGEKEAKSDSGSETPGTSESATPESYEQLAPQPCVGETLHSSLPRDSELFVPEEGSSEKESEDAPKTSPPTPGKHGLEQTGEEKVMVTVPDKNPPCPCCGTRVNSVLNLIEHLKVSHGKRGVCFRCAKCGKENSNYHSVVCHFKKCRGPETEKAPAGEWICEVCNRDFTTKIGLGQHKRLAHPAVRNQERIVASQPKETSNRGAHKRCWTKEEEELLIRLEAQFEGNKNINKLIAEHITTKTAKQISDKRRLLSRKPAEEPREEPGTCHHTRRAAASLRTEPEMSHHAQAEDRDNGPGRRPLPGRAAAGGRTMDEIRRHPDKGNGQQRPTKQKSEEQLQAYYKKTLEERLSAGALNTFPRAFKQVMEGRDIKLVINQTAQDCFGCLESISQIRTATRDKKDTVTREKHPKKPFQKWMKKRAIKKGNYLRFQRLFYLDRGKLAKIILDDIECLSCDIPLSEIYSVFKTRWETTGSFKSLGDFKTYGKADNTAFRELITAKEIEKNVQEMSKGSAPGPDGITLGDVVKMDPEFSRTMEIFNLWLTTGKIPDMVRGCRTVLIPKSSKPDRLKDINNWRPITIGSILLRLFSRIVTARLSKACPLNPRQRGFIRAAGCSENLKLLQTIIWSAKREHRPLGVVFVDIAKAFDTVSHQHIIHALQQREVDPHIVGLVSNMYENISTYITTKRNTHTDKIQIRVGVKQGDPMSPLLFNLAMDPLLCKLEESGKGYHRGQSSITAMAFADDLVLLSDSWENMNTNISILETFCNLTGLKTQGQKCHGFYIKPTKKSYTINDCAAWTINGTPLNMIDPGESEKYLGLQFDPWIGIARSGLSTKLDFWLQRIDQAPLKPLQKTDILKTYTIPRLIYIADHSEVKSALLETLDQKIRTAVKEWLHLPPCTCDAILYSSTRDGGLGITKLAGLIPSVQARRLHRIAQSSDDTMKCFMEKEKMEQLHKKLWIQAGGDRENIPSIWEAPPSSEPPNNVSTNSEWEAPTQKDKFPKPCNWRKNEFKKWTKLASQGRGIVNFERDKISNHWIQYYRRIPHRKLLTALQLRANVYPTREFLARGRQDQYIKACRHCDADNESCAHIIGNCPVTQDARIKRHNYICELLLEEAKKKDWVVFKEPHIRDSNKELYKPDLIFVKDGRALVVDVTVRYEAAKSSLEEAAAEKVRKYKHLETEVRHLTNAKDVTFVGFPLGARGKWHQDNFKLLTELGLSKSRQVKMAETFSTVALFSSVDIVHMFASRARKSMVM

SEQ ID NO: 686 - protein, 1755 aa, synthetic construct
MAYLKRPPESPPIVEEWNSRAGGNQRNRGNRLQDNRQFRGRDNRWGWPSDNRSNQWHGRSWGNNYPQHRQEPYYPQQYGHYGYNQRPPYGYYPKKKRKVNISGSSCGSPNSADTSSDFKDLWTKLKECHDREVQGLQVKVTKLKQERILDAQRLEEFFTKNQQLREQQKVLHETIKVLEDRLRAGLCDRCAVTEEHMRKKQQEFENIRQQNLKLITELMNERNTLQEENKKLSEQLQQKIENDQQHQAAELECEEDVIPDSPITAFSFSGVNRLRRKENPHVRYIEQTHTKLEHSVCANEMRKVSKSSTHPQHNPNENEILVADTYDQSQSPMAKAHGTSSYTPDKSSFNLATVVAETLGLGVQEESETQGPMSPLGDELYHCLEGNHKKQPFESGSETPGTSESATPEGSPKRKVSSAEGAAKEEPKRRSARLSAKPPAKVEAKPKKAAAKDKSSDKKVQTKGKRGAKGKQAEVANQETKEDLPAENGETKTEESPASDEAGEKEAKSDSGSETPGTSESATPESYEQLAPQPCVGETLHSSLPRDSELFVPEEGSSEKESEDAPKTSPPTPGKHGLEQTGEEKVMVTVPDKNPPCPCCGTRVNSVLNLIEHLKVSHGKRGVCFRCAKCGKENSNYHSVVCHFKKCRGPETEKAPAGEWICEVCNRDFTTKIGLGQHKRLAHPAVRNQERIVASQPKETSNRGAHKRCWTKEEEELLIRLEAQFEGNKNINKLIAEHITTKTAKQISDKRRLLSRKPAEEPREEPGTCHHTRRAAASLRTEPEMSHHAQAEDRDNGPGRRPLPGRAAAGGRTMDEIRRHPDKGNGQQRPTKQKSEEQLQAYYKKTLEERLSAGALNTFPRAFKQVMEGRDIKLVINQTAQDCFGCLESISQIRTATRDKKDTVTREKHPKKPFQKWMKKRAIKKGNYLRFQRLFYLDRGKLAKIILDDIECLSCDIPLSEIYSVFKTRWETTGSFKSLGDFKTYGKADNTAFRELITAKEIEKNVQEMSKGSAPGPDGITLGDVVKMDPEFSRTMEIFNLWLTTGKIPDMVRGCRTVLIPKSSKPDRLKDINNWRPITIGSILLRLFSRIVTARLSKACPLNPRQRGFIRAAGCSENLKLLQTIIWSAKREHRPLGVVFVDIAKAFDTVSHQHIIHALQQREVDPHIVGLVSNMYENISTYITTKRNTHTDKIQIRVGVKQGDPMSPLLFNLAMDPLLCKLEESGKGYHRGQSSITAMAFADDLVLLSDSWENMNTNISILETFCNLTGLKTQGQKCHGFYIKPTKKSYTINDCAAWTINGTPLNMIDPGESEKYLGLQFDPWIGIARSGLSTKLDFWLQRIDQAPLKPLQKTDILKTYTIPRLIYIADHSEVKSALLETLDQKIRTAVKEWLHLPPCTCDAILYSSTRDGGLGITKLAGLIPSVQARRLHRIAQSSDDTMKCFMEKEKMEQLHKKLWIQAGGDRENIPSIWEAPPSSEPPNNVSTNSEWEAPTQKDKFPKPCNWRKNEFKKWTKLASQGRGIVNFERDKISNHWIQYYRRIPHRKLLTALQLRANVYPTREFLARGRQDQYIKACRHCDADNESCAHIIGNCPVTQDARIKRHNYICELLLEEAKKKDWVVFKEPHIRDSNKELYKPDLIFVKDGRALVVDVTVRYEAAKSSLEEAAAEKVRKYKHLETEVRHLTNAKDVTFVGFPLGARGKWHQDNFKLLTELGLSKSRQVKMAETFSTVALFSSVDIVHMFASRARKSMVM

SEQ ID NO: 687 - protein, 1848 aa, synthetic construct
MASCPKPGPPVSAGAMSLESGLTTHSVLAIERGPNSLANSGSDFGGGGLGLPLRLLRVSVGTQTSRSDWVDLVSWSHPGPTSKSQQVDLVSLFPKHRVDLLSKNDQVDLVAQFLPSKFPPNLAENDLALLVNLEFYRSDLHVYECVHFAAHWEGLSGLPEVYEQLAPQPCVGETLHSSLPRDSEAPKKKRKVNISGSSCGSPNSADTSSDFKDLWTKLKECHDREVQGLQVKVTKLKQERILDAQRLEEFFTKNQQLREQQKVLHETIKVLEDRLRAGLCDRCAVTEEHMRKKQQEFENIRQQNLKLITELMNERNTLQEENKKLSEQLQQKIENDQQHQAAELECEEDVIPDSPITAFSFSGVNRLRRKENPHVRYIEQTHTKLEHSVCANEMRKVSKSSTHPQHNPNENEILVADTYDQSQSPMAKAHGTSSYTPDKSSFNLATVVAETLGLGVQEESETQGPMSPLGDELYHCLEGNHKKQPFESGSETPGTSESATPEGSPKRKVSSAEGAAKEEPKRRSARLSAKPPAKVEAKPKKAAAKDKSSDKKVQTKGKRGAKGKQAEVANQETKEDLPAENGETKTEESPASDEAGEKEAKSDSGSETPGTSESATPESYEQLAPQPCVGETLHSSLPRDSELFVPEEGSSEKESEDAPKTSPPTPGKHGLEQTGEEKVMVTVPDKNPPCPCCGTRVNSVLNLIEHLKVSHGKRGVCFRCAKCGKENSNYHSVVCHFKKCRGPETEKAPAGEWICEVCNRDFTTKIGLGQHKRLAHPAVRNQERIVASQPKETSNRGAHKRCWTKEEEELLIRLEAQFEGNKNINKLIAEHITTKTAKQISDKRRLLSRKPAEEPREEPGTCHHTRRAAASLRTEPEMSHHAQAEDRDNGPGRRPLPGRAAAGGRTMDEIRRHPDKGNGQQRPTKQKSEEQLQAYYKKTLEERLSAGALNTFPRAFKQVMEGRDIKLVINQTAQDCFGCLESISQIRTATRDKKDTVTREKHPKKPFQKWMKKRAIKKGNYLRFQRLFYLDRGKLAKIILDDIECLSCDIPLSEIYSVFKTRWETTGSFKSLGDFKTYGKADNTAFRELITAKEIEKNVQEMSKGSAPGPDGITLGDVVKMDPEFSRTMEIFNLWLTTGKIPDMVRGCRTVLIPKSSKPDRLKDINNWRPITIGSILLRLFSRIVTARLSKACPLNPRQRGFIRAAGCSENLKLLQTIIWSAKREHRPLGVVFVDIAKAFDTVSHQHIIHALQQREVDPHIVGLVSNMYENISTYITTKRNTHTDKIQIRVGVKQGDPMSPLLFNLAMDPLLCKLEESGKGYHRGQSSITAMAFADDLVLLSDSWENMNTNISILETFCNLTGLKTQGQKCHGFYIKPTKKSYTINDCAAWTINGTPLNMIDPGESEKYLGLQFDPWIGIARSGLSTKLDFWLQRIDQAPLKPLQKTDILKTYTIPRLIYIADHSEVKSALLETLDQKIRTAVKEWLHLPPCTCDAILYSSTRDGGLGITKLAGLIPSVQARRLHRIAQSSDDTMKCFMEKEKMEQLHKKLWIQAGGDRENIPSIWEAPPSSEPPNNVSTNSEWEAPTQKDKFPKPCNWRKNEFKKWTKLASQGRGIVNFERDKISNHWIQYYRRIPHRKLLTALQLRANVYPTREFLARGRQDQYIKACRHCDADNESCAHIIGNCPVTQDARIKRHNYICELLLEEAKKKDWVVFKEPHIRDSNKELYKPDLIFVKDGRALVVDVTVRYEAAKSSLEEAAAEKVRKYKHLETEVRHLTNAKDVTFVGFPLGARGKWHQDNFKLLTELGLSKSRQVKMAETFSTVALFSSVDIVHMFASRARKSMVM

SEQ ID NO: 688 - protein, 1882 aa, synthetic construct
MASCPKPGPPVSAGAMSLESGLTTHSVLAIERGPNSLANSGSDFGGGGLGLPLRLLRVSVGTQTSRSDWVDLVSWSHPGPTSKSQQVDLVSLFPKHRVDLLSKNDQVDLVAQFLPSKFPPNLAENDLALLVNLEFYRSDLHVYECVHFAAHWEGLSGLPEVYEQLAPQPCVGETLHSSLPRDSELFVPEEGSSEKESEDAPKTSPPTPGKHGLEQTGEAPKKKRKVNISGSSCGSPNSADTSSDFKDLWTKLKECHDREVQGLQVKVTKLKQERILDAQRLEEFFTKNQQLREQQKVLHETIKVLEDRLRAGLCDRCAVTEEHMRKKQQEFENIRQQNLKLITELMNERNTLQEENKKLSEQLQQKIENDQQHQAAELECEEDVIPDSPITAFSFSGVNRLRRKENPHVRYIEQTHTKLEHSVCANEMRKVSKSSTHPQHNPNENEILVADTYDQSQSPMAKAHGTSSYTPDKSSFNLATVVAETLGLGVQEESETQGPMSPLGDELYHCLEGNHKKQPFESGSETPGTSESATPEGSPKRKVSSAEGAAKEEPKRRSARLSAKPPAKVEAKPKKAAAKDKSSDKKVQTKGKRGAKGKQAEVANQETKEDLPAENGETKTEESPASDEAGEKEAKSDSGSETPGTSESATPESYEQLAPQPCVGETLHSSLPRDSELFVPEEGSSEKESEDAPKTSPPTPGKHGLEQTGEEKVMVTVPDKNPPCPCCGTRVNSVLNLIEHLKVSHGKRGVCFRCAKCGKENSNYHSVVCHFKKCRGPETEKAPAGEWICEVCNRDFTTKIGLGQHKRLAHPAVRNQERIVASQPKETSNRGAHKRCWTKEEEELLIRLEAQFEGNKNINKLIAEHITTKTAKQISDKRRLLSRKPAEEPREEPGTCHHTRRAAASLRTEPEMSHHAQAEDRDNGPGRRPLPGRAAAGGRTMDEIRRHPDKGNGQQRPTKQKSEEQLQAYYKKTLEERLSAGALNTFPRAFKQVMEGRDIKLVINQTAQDCFGCLESISQIRTATRDKKDTVTREKHPKKPFQKWMKKRAIKKGNYLRFQRLFYLDRGKLAKIILDDIECLSCDIPLSEIYSVFKTRWETTGSFKSLGDFKTYGKADNTAFRELITAKEIEKNVQEMSKGSAPGPDGITLGDVVKMDPEFSRTMEIFNLWLTTGKIPDMVRGCRTVLIPKSSKPDRLKDINNWRPITIGSILLRLFSRIVTARLSKACPLNPRQRGFIRAAGCSENLKLLQTIIWSAKREHRPLGVVFVDIAKAFDTVSHQHIIHALQQREVDPHIVGLVSNMYENISTYITTKRNTHTDKIQIRVGVKQGDPMSPLLFNLAMDPLLCKLEESGKGYHRGQSSITAMAFADDLVLLSDSWENMNTNISILETFCNLTGLKTQGQKCHGFYIKPTKKSYTINDCAAWTINGTPLNMIDPGESEKYLGLQFDPWIGIARSGLSTKLDFWLQRIDQAPLKPLQKTDILKTYTIPRLIYIADHSEVKSALLETLDQKIRTAVKEWLHLPPCTCDAILYSSTRDGGLGITKLAGLIPSVQARRLHRIAQSSDDTMKCFMEKEKMEQLHKKLWIQAGGDRENIPSIWEAPPSSEPPNNVSTNSEWEAPTQKDKFPKPCNWRKNEFKKWTKLASQGRGIVNFERDKISNHWIQYYRRIPHRKLLTALQLRANVYPTREFLARGRQDQYIKACRHCDADNESCAHIIGNCPVTQDARIKRHNYICELLLEEAKKKDWVVFKEPHIRDSNKELYKPDLIFVKDGRALVVDVTVRYEAAKSSLEEAAAEKVRKYKHLETEVRHLTNAKDVTFVGFPLGARGKWHQDNFKLLTELGLSKSRQVKMAETFSTVALFSSVDIVHMFASRARKSMVM

SEQ ID NO: 689 - protein, 1559 aa, synthetic construct
MRKKQQEFENIRQQNLKLITELMNERNTLQEENKKLSEQLQQKIENDQQHQAAELECEEDVIPDSPITAFSFSGVNRLRRKENPHVRYIEQTHTKLEHSVCANEMRKVSKSSTHPQHNPNENEILVADTYDQSQSPMAKAHGTSSYTPDKSSFNLATVVAETLGLGVQEESETQGPMSPLGDELYHCLEGNHKKQPFESGSETPGTSESATPEGSPKRKVSSAEGAAKEEPKRRSARLSAKPPAKVEAKPKKAAAKDKSSDKKVQTKGKRGAKGKQAEVANQETKEDLPAENGETKTEESPASDEAGEKEAKSDSGSETPGTSESATPESYEQLAPQPCVGETLHSSLPRDSELFVPEEGSSEKESEDAPKTSPPTPGKHGLEQTGEEKVMVTVPDKNPPCPCCGTRVNSVLNLIEHLKVSHGKRGVCFRCAKCGKENSNYHSVVCHFKKCRGPETEKAPAGEWICEVCNRDFTTKIGLGQHKRLAHPAVRNQERIVASQPKETSNRGAHKRCWTKEEEELLIRLEAQFEGNKNINKLIAEHITTKTAKQISDKRRLLSRKPAEEPREEPGTCHHTRRAAASLRTEPEMSHHAQAEDRDNGPGRRPLPGRAAAGGRTMDEIRRHPDKGNGQQRPTKQKSEEQLQAYYKKTLEERLSAGALNTFPRAFKQVMEGRDIKLVINQTAQDCFGCLESISQIRTATRDKKDTVTREKHPKKPFQKWMKKRAIKKGNYLRFQRLFYLDRGKLAKIILDDIECLSCDIPLSEIYSVFKTRWETTGSFKSLGDFKTYGKADNTAFRELITAKEIEKNVQEMSKGSAPGPDGITLGDVVKMDPEFSRTMEIFNLWLTTGKIPDMVRGCRTVLIPKSSKPDRLKDINNWRPITIGSILLRLFSRIVTARLSKACPLNPRQRGFIRAAGCSENLKLLQTIIWSAKREHRPLGVVFVDIAKAFDTVSHQHIIHALQQREVDPHIVGLVSNMYENISTYITTKRNTHTDKIQIRVGVKQGDPMSPLLFNLAMDPLLCKLEESGKGYHRGQSSITAMAFADDLVLLSDSWENMNTNISILETFCNLTGLKTQGQKCHGFYIKPTKKSYTINDCAAWTINGTPLNMIDPGESEKYLGLQFDPWIGIARSGLSTKLDFWLQRIDQAPLKPLQKTDILKTYTIPRLIYIADHSEVKSALLETLDQKIRTAVKEWLHLPPCTCDAILYSSTRDGGLGITKLAGLIPSVQARRLHRIAQSSDDTMKCFMEKEKMEQLHKKLWIQAGGDRENIPSIWEAPPSSEPPNNVSTNSEWEAPTQKDKFPKPCNWRKNEFKKWTKLASQGRGIVNFERDKISNHWIQYYRRIPHRKLLTALQLRANVYPTREFLARGRQDQYIKACRHCDADNESCAHIIGNCPVTQDARIKRHNYICELLLEEAKKKDWVVFKEPHIRDSNKELYKPDLIFVKDGRALVVDVTVRYEAAKSSLEEAAAEKVRKYKHLETEVRHLTNAKDVTFVGFPLGARGKWHQDNFKLLTELGLSKSRQVKMAETFSTVALFSSVDIVHMFASRARKSMVM

SEQ ID NO: 690 - protein, 1701 aa, synthetic construct
MANRPQGQSTQPSNAAGTNTTSASTPRSNSTPISTNSNPKKKRKVNISGSSCGSPNSADTSSDFKDLWTKLKECHDREVQGLQVKVTKLKQERILDAQRLEEFFTKNQQLREQQKVLHETIKVLEDRLRAGLCDRCAVTEEHMRKKQQEFENIRQQNLKLITELMNERNTLQEENKKLSEQLQQKIENDQQHQAAELECEEDVIPDSPITAFSFSGVNRLRRKENPHVRYIEQTHTKLEHSVCANEMRKVSKSSTHPQHNPNENEILVADTYDQSQSPMAKAHGTSSYTPDKSSFNLATVVAETLGLGVQEESETQGPMSPLGDELYHCLEGNHKKQPFESGSETPGTSESATPEGSPKRKVSSAEGAAKEEPKRRSARLSAKPPAKVEAKPKKAAAKDKSSDKKVQTKGKRGAKGKQAEVANQETKEDLPAENGETKTEESPASDEAGEKEAKSDSGSETPGTSESATPESYEQLAPQPCVGETLHSSLPRDSELFVPEEGSSEKESEDAPKTSPPTPGKHGLEQTGEEKVMVTVPDKNPPCPCCGTRVNSVLNLIEHLKVSHGKRGVCFRCAKCGKENSNYHSVVCHFKKCRGPETEKAPAGEWICEVCNRDFTTKIGLGQHKRLAHPAVRNQERIVASQPKETSNRGAHKRCWTKEEEELLIRLEAQFEGNKNINKLIAEHITTKTAKQISDKRRLLSRKPAEEPREEPGTCHHTRRAAASLRTEPEMSHHAQAEDRDNGPGRRPLPGRAAAGGRTMDEIRRHPDKGNGQQRPTKQKSEEQLQAYYKKTLEERLSAGALNTFPRAFKQVMEGRDIKLVINQTAQDCFGCLESISQIRTATRDKKDTVTREKHPKKPFQKWMKKRAIKKGNYLRFQRLFYLDRGKLAKIILDDIECLSCDIPLSEIYSVFKTRWETTGSFKSLGDFKTYGKADNTAFRELITAKEIEKNVQEMSKGSAPGPDGITLGDVVKMDPEFSRTMEIFNLWLTTGKIPDMVRGCRTVLIPKSSKPDRLKDINNWRPITIGSILLRLFSRIVTARLSKACPLNPRQRGFIRAAGCSENLKLLQTIIWSAKREHRPLGVVFVDIAKAFDTVSHQHIIHALQQREVDPHIVGLVSNMYENISTYITTKRNTHTDKIQIRVGVKQGDPMSPLLFNLAMDPLLCKLEESGKGYHRGQSSITAMAFADDLVLLSDSWENMNTNISILETFCNLTGLKTQGQKCHGFYIKPTKKSYTINDCAAWTINGTPLNMIDPGESEKYLGLQFDPWIGIARSGLSTKLDFWLQRIDQAPLKPLQKTDILKTYTIPRLIYIADHSEVKSALLETLDQKIRTAVKEWLHLPPCTCDAILYSSTRDGGLGITKLAGLIPSVQARRLHRIAQSSDDTMKCFMEKEKMEQLHKKLWIQAGGDRENIPSIWEAPPSSEPPNNVSTNSEWEAPTQKDKFPKPCNWRKNEFKKWTKLASQGRGIVNFERDKISNHWIQYYRRIPHRKLLTALQLRANVYPTREFLARGRQDQYIKACRHCDADNESCAHIIGNCPVTQDARIKRHNYICELLLEEAKKKDWVVFKEPHIRDSNKELYKPDLIFVKDGRALVVDVTVRYEAAKSSLEEAAAEKVRKYKHLETEVRHLTNAKDVTFVGFPLGARGKWHQDNFKLLTELGLSKSRQVKMAETFSTVALFSSVDIVHMFASRARKSMVM

SEQ ID NO: 691 - protein, 1705 aa, synthetic construct
MANSTGGFDGQARQPTPPFFGRDRSPLRRSPPRASYVAPLTAPKKKRKVNISGSSCGSPNSADTSSDFKDLWTKLKECHDREVQGLQVKVTKLKQERILDAQRLEEFFTKNQQLREQQKVLHETIKVLEDRLRAGLCDRCAVTEEHMRKKQQEFENIRQQNLKLITELMNERNTLQEENKKLSEQLQQKIENDQQHQAAELECEEDVIPDSPITAFSFSGVNRLRRKENPHVRYIEQTHTKLEHSVCANEMRKVSKSSTHPQHNPNENEILVADTYDQSQSPMAKAHGTSSYTPDKSSFNLATVVAETLGLGVQEESETQGPMSPLGDELYHCLEGNHKKQPFESGSETPGTSESATPEGSPKRKVSSAEGAAKEEPKRRSARLSAKPPAKVEAKPKKAAAKDKSSDKKVQTKGKRGAKGKQAEVANQETKEDLPAENGETKTEESPASDEAGEKEAKSDSGSETPGTSESATPESYEQLAPQPCVGETLHSSLPRDSELFVPEEGSSEKESEDAPKTSPPTPGKHGLEQTGEEKVMVTVPDKNPPCPCCGTRVNSVLNLIEHLKVSHGKRGVCFRCAKCGKENSNYHSVVCHFKKCRGPETEKAPAGEWICEVCNRDFTTKIGLGQHKRLAHPAVRNQERIVASQPKETSNRGAHKRCWTKEEEELLIRLEAQFEGNKNINKLIAEHITTKTAKQISDKRRLLSRKPAEEPREEPGTCHHTRRAAASLRTEPEMSHHAQAEDRDNGPGRRPLPGRAAAGGRTMDEIRRHPDKGNGQQRPTKQKSEEQLQAYYKKTLEERLSAGALNTFPRAFKQVMEGRDIKLVINQTAQDCFGCLESISQIRTATRDKKDTVTREKHPKKPFQKWMKKRAIKKGNYLRFQRLFYLDRGKLAKIILDDIECLSCDIPLSEIYSVFKTRWETTGSFKSLGDFKTYGKADNTAFRELITAKEIEKNVQEMSKGSAPGPDGITLGDVVKMDPEFSRTMEIFNLWLTTGKIPDMVRGCRTVLIPKSSKPDRLKDINNWRPITIGSILLRLFSRIVTARLSKACPLNPRQRGFIRAAGCSENLKLLQTIIWSAKREHRPLGVVFVDIAKAFDTVSHQHIIHALQQREVDPHIVGLVSNMYENISTYITTKRNTHTDKIQIRVGVKQGDPMSPLLFNLAMDPLLCKLEESGKGYHRGQSSITAMAFADDLVLLSDSWENMNTNISILETFCNLTGLKTQGQKCHGFYIKPTKKSYTINDCAAWTINGTPLNMIDPGESEKYLGLQFDPWIGIARSGLSTKLDFWLQRIDQAPLKPLQKTDILKTYTIPRLIYIADHSEVKSALLETLDQKIRTAVKEWLHLPPCTCDAILYSSTRDGGLGITKLAGLIPSVQARRLHRIAQSSDDTMKCFMEKEKMEQLHKKLWIQAGGDRENIPSIWEAPPSSEPPNNVSTNSEWEAPTQKDKFPKPCNWRKNEFKKWTKLASQGRGIVNFERDKISNHWIQYYRRIPHRKLLTALQLRANVYPTREFLARGRQDQYIKACRHCDADNESCAHIIGNCPVTQDARIKRHNYICELLLEEAKKKDWVVFKEPHIRDSNKELYKPDLIFVKDGRALVVDVTVRYEAAKSSLEEAAAEKVRKYKHLETEVRHLTNAKDVTFVGFPLGARGKWHQDNFKLLTELGLSKSRQVKMAETFSTVALFSSVDIVHMFASRARKSMVM

SEQ ID NO: 692 - protein, 1690 aa, synthetic construct
MAVANANSTPPPYERTRLSPPRASYDDPKKKRKVNISGSSCGSPNSADTSSDFKDLWTKLKECHDREVQGLQVKVTKLKQERILDAQRLEEFFTKNQQLREQQKVLHETIKVLEDRLRAGLCDRCAVTEEHMRKKQQEFENIRQQNLKLITELMNERNTLQEENKKLSEQLQQKIENDQQHQAAELECEEDVIPDSPITAFSFSGVNRLRRKENPHVRYIEQTHTKLEHSVCANEMRKVSKSSTHPQHNPNENEILVADTYDQSQSPMAKAHGTSSYTPDKSSFNLATVVAETLGLGVQEESETQGPMSPLGDELYHCLEGNHKKQPFESGSETPGTSESATPEGSPKRKVSSAEGAAKEEPKRRSARLSAKPPAKVEAKPKKAAAKDKSSDKKVQTKGKRGAKGKQAEVANQETKEDLPAENGETKTEESPASDEAGEKEAKSDSGSETPGTSESATPESYEQLAPQPCVGETLHSSLPRDSELFVPEEGSSEKESEDAPKTSPPTPGKHGLEQTGEEKVMVTVPDKNPPCPCCGTRVNSVLNLIEHLKVSHGKRGVCFRCAKCGKENSNYHSVVCHFKKCRGPETEKAPAGEWICEVCNRDFTTKIGLGQHKRLAHPAVRNQERIVASQPKETSNRGAHKRCWTKEEEELLIRLEAQFEGNKNINKLIAEHITTKTAKQISDKRRLLSRKPAEEPREEPGTCHHTRRAAASLRTEPEMSHHAQAEDRDNGPGRRPLPGRAAAGGRTMDEIRRHPDKGNGQQRPTKQKSEEQLQAYYKKTLEERLSAGALNTFPRAFKQVMEGRDIKLVINQTAQDCFGCLESISQIRTATRDKKDTVTREKHPKKPFQKWMKKRAIKKGNYLRFQRLFYLDRGKLAKIILDDIECLSCDIPLSEIYSVFKTRWETTGSFKSLGDFKTYGKADNTAFRELITAKEIEKNVQEMSKGSAPGPDGITLGDVVKMDPEFSRTMEIFNLWLTTGKIPDMVRGCRTVLIPKSSKPDRLKDINNWRPITIGSILLRLFSRIVTARLSKACPLNPRQRGFIRAAGCSENLKLLQTIIWSAKREHRPLGVVFVDIAKAFDTVSHQHIIHALQQREVDPHIVGLVSNMYENISTYITTKRNTHTDKIQIRVGVKQGDPMSPLLFNLAMDPLLCKLEESGKGYHRGQSSITAMAFADDLVLLSDSWENMNTNISILETFCNLTGLKTQGQKCHGFYIKPTKKSYTINDCAAWTINGTPLNMIDPGESEKYLGLQFDPWIGIARSGLSTKLDFWLQRIDQAPLKPLQKTDILKTYTIPRLIYIADHSEVKSALLETLDQKIRTAVKEWLHLPPCTCDAILYSSTRDGGLGITKLAGLIPSVQARRLHRIAQSSDDTMKCFMEKEKMEQLHKKLWIQAGGDRENIPSIWEAPPSSEPPNNVSTNSEWEAPTQKDKFPKPCNWRKNEFKKWTKLASQGRGIVNFERDKISNHWIQYYRRIPHRKLLTALQLRANVYPTREFLARGRQDQYIKACRHCDADNESCAHIIGNCPVTQDARIKRHNYICELLLEEAKKKDWVVFKEPHIRDSNKELYKPDLIFVKDGRALVVDVTVRYEAAKSSLEEAAAEKVRKYKHLETEVRHLTNAKDVTFVGFPLGARGKWHQDNFKLLTELGLSKSRQVKMAETFSTVALFSSVDIVHMFASRARKSMVM

SEQ ID NO: 693 - protein, 1709 aa, synthetic construct
MANKPGQNEGGVRGGRGGGYKELDEQELEETKRRRREAEEDDGEMYPKKKRKVNISGSSCGSPNSADTSSDFKDLWTKLKECHDREVQGLQVKVTKLKQERILDAQRLEEFFTKNQQLREQQKVLHETIKVLEDRLRAGLCDRCAVTEEHMRKKQQEFENIRQQNLKLITELMNERNTLQEENKKLSEQLQQKIENDQQHQAAELECEEDVIPDSPITAFSFSGVNRLRRKENPHVRYIEQTHTKLEHSVCANEMRKVSKSSTHPQHNPNENEILVADTYDQSQSPMAKAHGTSSYTPDKSSFNLATVVAETLGLGVQEESETQGPMSPLGDELYHCLEGNHKKQPFESGSETPGTSESATPEGSPKRKVSSAEGAAKEEPKRRSARLSAKPPAKVEAKPKKAAAKDKSSDKKVQTKGKRGAKGKQAEVANQETKEDLPAENGETKTEESPASDEAGEKEAKSDSGSETPGTSESATPESYEQLAPQPCVGETLHSSLPRDSELFVPEEGSSEKESEDAPKTSPPTPGKHGLEQTGEEKVMVTVPDKNPPCPCCGTRVNSVLNLIEHLKVSHGKRGVCFRCAKCGKENSNYHSVVCHFKKCRGPETEKAPAGEWICEVCNRDFTTKIGLGQHKRLAHPAVRNQERIVASQPKETSNRGAHKRCWTKEEEELLIRLEAQFEGNKNINKLIAEHITTKTAKQISDKRRLLSRKPAEEPREEPGTCHHTRRAAASLRTEPEMSHHAQAEDRDNGPGRRPLPGRAAAGGRTMDEIRRHPDKGNGQQRPTKQKSEEQLQAYYKKTLEERLSAGALNTFPRAFKQVMEGRDIKLVINQTAQDCFGCLESISQIRTATRDKKDTVTREKHPKKPFQKWMKKRAIKKGNYLRFQRLFYLDRGKLAKIILDDIECLSCDIPLSEIYSVFKTRWETTGSFKSLGDFKTYGKADNTAFRELITAKEIEKNVQEMSKGSAPGPDGITLGDVVKMDPEFSRTMEIFNLWLTTGKIPDMVRGCRTVLIPKSSKPDRLKDINNWRPITIGSILLRLFSRIVTARLSKACPLNPRQRGFIRAAGCSENLKLLQTIIWSAKREHRPLGVVFVDIAKAFDTVSHQHIIHALQQREVDPHIVGLVSNMYENISTYITTKRNTHTDKIQIRVGVKQGDPMSPLLFNLAMDPLLCKLEESGKGYHRGQSSITAMAFADDLVLLSDSWENMNTNISILETFCNLTGLKTQGQKCHGFYIKPTKKSYTINDCAAWTINGTPLNMIDPGESEKYLGLQFDPWIGIARSGLSTKLDFWLQRIDQAPLKPLQKTDILKTYTIPRLIYIADHSEVKSALLETLDQKIRTAVKEWLHLPPCTCDAILYSSTRDGGLGITKLAGLIPSVQARRLHRIAQSSDDTMKCFMEKEKMEQLHKKLWIQAGGDRENIPSIWEAPPSSEPPNNVSTNSEWEAPTQKDKFPKPCNWRKNEFKKWTKLASQGRGIVNFERDKISNHWIQYYRRIPHRKLLTALQLRANVYPTREFLARGRQDQYIKACRHCDADNESCAHIIGNCPVTQDARIKRHNYICELLLEEAKKKDWVVFKEPHIRDSNKELYKPDLIFVKDGRALVVDVTVRYEAAKSSLEEAAAEKVRKYKHLETEVRHLTNAKDVTFVGFPLGARGKWHQDNFKLLTELGLSKSRQVKMAETFSTVALFSSVDIVHMFASRARKSMVM

SEQ ID NO: 694 - protein, 1753 aa, synthetic construct
MAKTNQADTRPAVAAGRAGWEVEELGIDKDGRERSRDRQRDRGRDHHYDKDRRRSRSRERERGKERDYDYDHDRDRDRDYGRERGSRYRNPKKKRKVNISGSSCGSPNSADTSSDFKDLWTKLKECHDREVQGLQVKVTKLKQERILDAQRLEEFFTKNQQLREQQKVLHETIKVLEDRLRAGLCDRCAVTEEHMRKKQQEFENIRQQNLKLITELMNERNTLQEENKKLSEQLQQKIENDQQHQAAELECEEDVIPDSPITAFSFSGVNRLRRKENPHVRYIEQTHTKLEHSVCANEMRKVSKSSTHPQHNPNENEILVADTYDQSQSPMAKAHGTSSYTPDKSSFNLATVVAETLGLGVQEESETQGPMSPLGDELYHCLEGNHKKQPFESGSETPGTSESATPEGSPKRKVSSAEGAAKEEPKRRSARLSAKPPAKVEAKPKKAAAKDKSSDKKVQTKGKRGAKGKQAEVANQETKEDLPAENGETKTEESPASDEAGEKEAKSDSGSETPGTSESATPESYEQLAPQPCVGETLHSSLPRDSELFVPEEGSSEKESEDAPKTSPPTPGKHGLEQTGEEKVMVTVPDKNPPCPCCGTRVNSVLNLIEHLKVSHGKRGVCFRCAKCGKENSNYHSVVCHFKKCRGPETEKAPAGEWICEVCNRDFTTKIGLGQHKRLAHPAVRNQERIVASQPKETSNRGAHKRCWTKEEEELLIRLEAQFEGNKNINKLIAEHITTKTAKQISDKRRLLSRKPAEEPREEPGTCHHTRRAAASLRTEPEMSHHAQAEDRDNGPGRRPLPGRAAAGGRTMDEIRRHPDKGNGQQRPTKQKSEEQLQAYYKKTLEERLSAGALNTFPRAFKQVMEGRDIKLVINQTAQDCFGCLESISQIRTATRDKKDTVTREKHPKKPFQKWMKKRAIKKGNYLRFQRLFYLDRGKLAKIILDDIECLSCDIPLSEIYSVFKTRWETTGSFKSLGDFKTYGKADNTAFRELITAKEIEKNVQEMSKGSAPGPDGITLGDVVKMDPEFSRTMEIFNLWLTTGKIPDMVRGCRTVLIPKSSKPDRLKDINNWRPITIGSILLRLFSRIVTARLSKACPLNPRQRGFIRAAGCSENLKLLQTIIWSAKREHRPLGVVFVDIAKAFDTVSHQHIIHALQQREVDPHIVGLVSNMYENISTYITTKRNTHTDKIQIRVGVKQGDPMSPLLFNLAMDPLLCKLEESGKGYHRGQSSITAMAFADDLVLLSDSWENMNTNISILETFCNLTGLKTQGQKCHGFYIKPTKKSYTINDCAAWTINGTPLNMIDPGESEKYLGLQFDPWIGIARSGLSTKLDFWLQRIDQAPLKPLQKTDILKTYTIPRLIYIADHSEVKSALLETLDQKIRTAVKEWLHLPPCTCDAILYSSTRDGGLGITKLAGLIPSVQARRLHRIAQSSDDTMKCFMEKEKMEQLHKKLWIQAGGDRENIPSIWEAPPSSEPPNNVSTNSEWEAPTQKDKFPKPCNWRKNEFKKWTKLASQGRGIVNFERDKISNHWIQYYRRIPHRKLLTALQLRANVYPTREFLARGRQDQYIKACRHCDADNESCAHIIGNCPVTQDARIKRHNYICELLLEEAKKKDWVVFKEPHIRDSNKELYKPDLIFVKDGRALVVDVTVRYEAAKSSLEEAAAEKVRKYKHLETEVRHLTNAKDVTFVGFPLGARGKWHQDNFKLLTELGLSKSRQVKMAETFSTVALFSSVDIVHMFASRARKSMVM

SEQ ID NO: 695 - protein, 1864 aa, synthetic construct
MADVMDVFIPKPFRAFAFVTFADDQIAQSLCGEDLIIKGISVHISNAEPKHNSNRQLERSGRFGGNPGGFGNQGGFGNSRGGGAGLGNNQGSNMGGGMNFGAFSINPAMMAAAQAALQSSWGMMGMLASQQNQSGPSGNNQNQGNMQREPNQAFGSGNNSYSGSNSGAAIGWGSASNAGSGSGFNGGFGSSMDSKSSGWGMPKKKRKVNISGSSCGSPNSADTSSDFKDLWTKLKECHDREVQGLQVKVTKLKQERILDAQRLEEFFTKNQQLREQQKVLHETIKVLEDRLRAGLCDRCAVTEEHMRKKQQEFENIRQQNLKLITELMNERNTLQEENKKLSEQLQQKIENDQQHQAAELECEEDVIPDSPITAFSFSGVNRLRRKENPHVRYIEQTHTKLEHSVCANEMRKVSKSSTHPQHNPNENEILVADTYDQSQSPMAKAHGTSSYTPDKSSFNLATVVAETLGLGVQEESETQGPMSPLGDELYHCLEGNHKKQPFESGSETPGTSESATPEGSPKRKVSSAEGAAKEEPKRRSARLSAKPPAKVEAKPKKAAAKDKSSDKKVQTKGKRGAKGKQAEVANQETKEDLPAENGETKTEESPASDEAGEKEAKSDSGSETPGTSESATPESYEQLAPQPCVGETLHSSLPRDSELFVPEEGSSEKESEDAPKTSPPTPGKHGLEQTGEEKVMVTVPDKNPPCPCCGTRVNSVLNLIEHLKVSHGKRGVCFRCAKCGKENSNYHSVVCHFKKCRGPETEKAPAGEWICEVCNRDFTTKIGLGQHKRLAHPAVRNQERIVASQPKETSNRGAHKRCWTKEEEELLIRLEAQFEGNKNINKLIAEHITTKTAKQISDKRRLLSRKPAEEPREEPGTCHHTRRAAASLRTEPEMSHHAQAEDRDNGPGRRPLPGRAAAGGRTMDEIRRHPDKGNGQQRPTKQKSEEQLQAYYKKTLEERLSAGALNTFPRAFKQVMEGRDIKLVINQTAQDCFGCLESISQIRTATRDKKDTVTREKHPKKPFQKWMKKRAIKKGNYLRFQRLFYLDRGKLAKIILDDIECLSCDIPLSEIYSVFKTRWETTGSFKSLGDFKTYGKADNTAFRELITAKEIEKNVQEMSKGSAPGPDGITLGDVVKMDPEFSRTMEIFNLWLTTGKIPDMVRGCRTVLIPKSSKPDRLKDINNWRPITIGSILLRLFSRIVTARLSKACPLNPRQRGFIRAAGCSENLKLLQTIIWSAKREHRPLGVVFVDIAKAFDTVSHQHIIHALQQREVDPHIVGLVSNMYENISTYITTKRNTHTDKIQIRVGVKQGDPMSPLLFNLAMDPLLCKLEESGKGYHRGQSSITAMAFADDLVLLSDSWENMNTNISILETFCNLTGLKTQGQKCHGFYIKPTKKSYTINDCAAWTINGTPLNMIDPGESEKYLGLQFDPWIGIARSGLSTKLDFWLQRIDQAPLKPLQKTDILKTYTIPRLIYIADHSEVKSALLETLDQKIRTAVKEWLHLPPCTCDAILYSSTRDGGLGITKLAGLIPSVQARRLHRIAQSSDDTMKCFMEKEKMEQLHKKLWIQAGGDRENIPSIWEAPPSSEPPNNVSTNSEWEAPTQKDKFPKPCNWRKNEFKKWTKLASQGRGIVNFERDKISNHWIQYYRRIPHRKLLTALQLRANVYPTREFLARGRQDQYIKACRHCDADNESCAHIIGNCPVTQDARIKRHNYICELLLEEAKKKDWVVFKEPHIRDSNKELYKPDLIFVKDGRALVVDVTVRYEAAKSSLEEAAAEKVRKYKHLETEVRHLTNAKDVTFVGFPLGARGKWHQDNFKLLTELGLSKSRQVKMAETFSTVALFSSVDIVHMFASRARKSMVM

SEQ ID NO: 696 - protein, 1708 aa, synthetic construct
MAEPKHNSNRQLERSGRFGGNPGGFGNQGGFGNSRGGGAGLGNNQPKKKRKVNISGSSCGSPNSADTSSDFKDLWTKLKECHDREVQGLQVKVTKLKQERILDAQRLEEFFTKNQQLREQQKVLHETIKVLEDRLRAGLCDRCAVTEEHMRKKQQEFENIRQQNLKLITELMNERNTLQEENKKLSEQLQQKIENDQQHQAAELECEEDVIPDSPITAFSFSGVNRLRRKENPHVRYIEQTHTKLEHSVCANEMRKVSKSSTHPQHNPNENEILVADTYDQSQSPMAKAHGTSSYTPDKSSFNLATVVAETLGLGVQEESETQGPMSPLGDELYHCLEGNHKKQPFESGSETPGTSESATPEGSPKRKVSSAEGAAKEEPKRRSARLSAKPPAKVEAKPKKAAAKDKSSDKKVQTKGKRGAKGKQAEVANQETKEDLPAENGETKTEESPASDEAGEKEAKSDSGSETPGTSESATPESYEQLAPQPCVGETLHSSLPRDSELFVPEEGSSEKESEDAPKTSPPTPGKHGLEQTGEEKVMVTVPDKNPPCPCCGTRVNSVLNLIEHLKVSHGKRGVCFRCAKCGKENSNYHSVVCHFKKCRGPETEKAPAGEWICEVCNRDFTTKIGLGQHKRLAHPAVRNQERIVASQPKETSNRGAHKRCWTKEEEELLIRLEAQFEGNKNINKLIAEHITTKTAKQISDKRRLLSRKPAEEPREEPGTCHHTRRAAASLRTEPEMSHHAQAEDRDNGPGRRPLPGRAAAGGRTMDEIRRHPDKGNGQQRPTKQKSEEQLQAYYKKTLEERLSAGALNTFPRAFKQVMEGRDIKLVINQTAQDCFGCLESISQIRTATRDKKDTVTREKHPKKPFQKWMKKRAIKKGNYLRFQRLFYLDRGKLAKIILDDIECLSCDIPLSEIYSVFKTRWETTGSFKSLGDFKTYGKADNTAFRELITAKEIEKNVQEMSKGSAPGPDGITLGDVVKMDPEFSRTMEIFNLWLTTGKIPDMVRGCRTVLIPKSSKPDRLKDINNWRPITIGSILLRLFSRIVTARLSKACPLNPRQRGFIRAAGCSENLKLLQTIIWSAKREHRPLGVVFVDIAKAFDTVSHQHIIHALQQREVDPHIVGLVSNMYENISTYITTKRNTHTDKIQIRVGVKQGDPMSPLLFNLAMDPLLCKLEESGKGYHRGQSSITAMAFADDLVLLSDSWENMNTNISILETFCNLTGLKTQGQKCHGFYIKPTKKSYTINDCAAWTINGTPLNMIDPGESEKYLGLQFDPWIGIARSGLSTKLDFWLQRIDQAPLKPLQKTDILKTYTIPRLIYIADHSEVKSALLETLDQKIRTAVKEWLHLPPCTCDAILYSSTRDGGLGITKLAGLIPSVQARRLHRIAQSSDDTMKCFMEKEKMEQLHKKLWIQAGGDRENIPSIWEAPPSSEPPNNVSTNSEWEAPTQKDKFPKPCNWRKNEFKKWTKLASQGRGIVNFERDKISNHWIQYYRRIPHRKLLTALQLRANVYPTREFLARGRQDQYIKACRHCDADNESCAHIIGNCPVTQDARIKRHNYICELLLEEAKKKDWVVFKEPHIRDSNKELYKPDLIFVKDGRALVVDVTVRYEAAKSSLEEAAAEKVRKYKHLETEVRHLTNAKDVTFVGFPLGARGKWHQDNFKLLTELGLSKSRQVKMAETFSTVALFSSVDIVHMFASRARKSMVM

SEQ ID NO: 697 - protein, 1715 aa, synthetic construct
MAFNRGGGNGRGGRGRGGPMGRGGYGGGGSGGGGRGGFPSGGGGGGGQQRAGPKKKRKVNISGSSCGSPNSADTSSDFKDLWTKLKECHDREVQGLQVKVTKLKQERILDAQRLEEFFTKNQQLREQQKVLHETIKVLEDRLRAGLCDRCAVTEEHMRKKQQEFENIRQQNLKLITELMNERNTLQEENKKLSEQLQQKIENDQQHQAAELECEEDVIPDSPITAFSFSGVNRLRRKENPHVRYIEQTHTKLEHSVCANEMRKVSKSSTHPQHNPNENEILVADTYDQSQSPMAKAHGTSSYTPDKSSFNLATVVAETLGLGVQEESETQGPMSPLGDELYHCLEGNHKKQPFESGSETPGTSESATPEGSPKRKVSSAEGAAKEEPKRRSARLSAKPPAKVEAKPKKAAAKDKSSDKKVQTKGKRGAKGKQAEVANQETKEDLPAENGETKTEESPASDEAGEKEAKSDSGSETPGTSESATPESYEQLAPQPCVGETLHSSLPRDSELFVPEEGSSEKESEDAPKTSPPTPGKHGLEQTGEEKVMVTVPDKNPPCPCCGTRVNSVLNLIEHLKVSHGKRGVCFRCAKCGKENSNYHSVVCHFKKCRGPETEKAPAGEWICEVCNRDFTTKIGLGQHKRLAHPAVRNQERIVASQPKETSNRGAHKRCWTKEEEELLIRLEAQFEGNKNINKLIAEHITTKTAKQISDKRRLLSRKPAEEPREEPGTCHHTRRAAASLRTEPEMSHHAQAEDRDNGPGRRPLPGRAAAGGRTMDEIRRHPDKGNGQQRPTKQKSEEQLQAYYKKTLEERLSAGALNTFPRAFKQVMEGRDIKLVINQTAQDCFGCLESISQIRTATRDKKDTVTREKHPKKPFQKWMKKRAIKKGNYLRFQRLFYLDRGKLAKIILDDIECLSCDIPLSEIYSVFKTRWETTGSFKSLGDFKTYGKADNTAFRELITAKEIEKNVQEMSKGSAPGPDGITLGDVVKMDPEFSRTMEIFNLWLTTGKIPDMVRGCRTVLIPKSSKPDRLKDINNWRPITIGSILLRLFSRIVTARLSKACPLNPRQRGFIRAAGCSENLKLLQTIIWSAKREHRPLGVVFVDIAKAFDTVSHQHIIHALQQREVDPHIVGLVSNMYENISTYITTKRNTHTDKIQIRVGVKQGDPMSPLLFNLAMDPLLCKLEESGKGYHRGQSSITAMAFADDLVLLSDSWENMNTNISILETFCNLTGLKTQGQKCHGFYIKPTKKSYTINDCAAWTINGTPLNMIDPGESEKYLGLQFDPWIGIARSGLSTKLDFWLQRIDQAPLKPLQKTDILKTYTIPRLIYIADHSEVKSALLETLDQKIRTAVKEWLHLPPCTCDAILYSSTRDGGLGITKLAGLIPSVQARRLHRIAQSSDDTMKCFMEKEKMEQLHKKLWIQAGGDRENIPSIWEAPPSSEPPNNVSTNSEWEAPTQKDKFPKPCNWRKNEFKKWTKLASQGRGIVNFERDKISNHWIQYYRRIPHRKLLTALQLRANVYPTREFLARGRQDQYIKACRHCDADNESCAHIIGNCPVTQDARIKRHNYICELLLEEAKKKDWVVFKEPHIRDSNKELYKPDLIFVKDGRALVVDVTVRYEAAKSSLEEAAAEKVRKYKHLETEVRHLTNAKDVTFVGFPLGARGKWHQDNFKLLTELGLSKSRQVKMAETFSTVALFSSVDIVHMFASRARKSMVM

SEQ ID NO: 698 - protein, 1846 aa, synthetic construct
MASFGEEAEEEEEEVNRVSQSMKGKSKSSHDLLKDDPHLSSVPVVESEKGDAPDLVDDGEDESAEHDEYIDGDEKNLMRERIAKKLKKDTSANVKSAGEGEVEKKSVSRSEELRKEARQLKRELLAAKQKKVENAAKQAEKRSEEEEAPPDGAVAEYRREKQKYEALRKQQSKKGTSREDQTLPKKKRKVNISGSSCGSPNSADTSSDFKDLWTKLKECHDREVQGLQVKVTKLKQERILDAQRLEEFFTKNQQLREQQKVLHETIKVLEDRLRAGLCDRCAVTEEHMRKKQQEFENIRQQNLKLITELMNERNTLQEENKKLSEQLQQKIENDQQHQAAELECEEDVIPDSPITAFSFSGVNRLRRKENPHVRYIEQTHTKLEHSVCANEMRKVSKSSTHPQHNPNENEILVADTYDQSQSPMAKAHGTSSYTPDKSSFNLATVVAETLGLGVQEESETQGPMSPLGDELYHCLEGNHKKQPFESGSETPGTSESATPEGSPKRKVSSAEGAAKEEPKRRSARLSAKPPAKVEAKPKKAAAKDKSSDKKVQTKGKRGAKGKQAEVANQETKEDLPAENGETKTEESPASDEAGEKEAKSDSGSETPGTSESATPESYEQLAPQPCVGETLHSSLPRDSELFVPEEGSSEKESEDAPKTSPPTPGKHGLEQTGEEKVMVTVPDKNPPCPCCGTRVNSVLNLIEHLKVSHGKRGVCFRCAKCGKENSNYHSVVCHFKKCRGPETEKAPAGEWICEVCNRDFTTKIGLGQHKRLAHPAVRNQERIVASQPKETSNRGAHKRCWTKEEEELLIRLEAQFEGNKNINKLIAEHITTKTAKQISDKRRLLSRKPAEEPREEPGTCHHTRRAAASLRTEPEMSHHAQAEDRDNGPGRRPLPGRAAAGGRTMDEIRRHPDKGNGQQRPTKQKSEEQLQAYYKKTLEERLSAGALNTFPRAFKQVMEGRDIKLVINQTAQDCFGCLESISQIRTATRDKKDTVTREKHPKKPFQKWMKKRAIKKGNYLRFQRLFYLDRGKLAKIILDDIECLSCDIPLSEIYSVFKTRWETTGSFKSLGDFKTYGKADNTAFRELITAKEIEKNVQEMSKGSAPGPDGITLGDVVKMDPEFSRTMEIFNLWLTTGKIPDMVRGCRTVLIPKSSKPDRLKDINNWRPITIGSILLRLFSRIVTARLSKACPLNPRQRGFIRAAGCSENLKLLQTIIWSAKREHRPLGVVFVDIAKAFDTVSHQHIIHALQQREVDPHIVGLVSNMYENISTYITTKRNTHTDKIQIRVGVKQGDPMSPLLFNLAMDPLLCKLEESGKGYHRGQSSITAMAFADDLVLLSDSWENMNTNISILETFCNLTGLKTQGQKCHGFYIKPTKKSYTINDCAAWTINGTPLNMIDPGESEKYLGLQFDPWIGIARSGLSTKLDFWLQRIDQAPLKPLQKTDILKTYTIPRLIYIADHSEVKSALLETLDQKIRTAVKEWLHLPPCTCDAILYSSTRDGGLGITKLAGLIPSVQARRLHRIAQSSDDTMKCFMEKEKMEQLHKKLWIQAGGDRENIPSIWEAPPSSEPPNNVSTNSEWEAPTQKDKFPKPCNWRKNEFKKWTKLASQGRGIVNFERDKISNHWIQYYRRIPHRKLLTALQLRANVYPTREFLARGRQDQYIKACRHCDADNESCAHIIGNCPVTQDARIKRHNYICELLLEEAKKKDWVVFKEPHIRDSNKELYKPDLIFVKDGRALVVDVTVRYEAAKSSLEEAAAEKVRKYKHLETEVRHLTNAKDVTFVGFPLGARGKWHQDNFKLLTELGLSKSRQVKMAETFSTVALFSSVDIVHMFASRARKSMVM

SEQ ID NO: 699 - protein, 1708 aa, synthetic construct
MALDSYRRGEEWDPQKAEEKRKLKELAQRQEEEAAQQGPVVVSPAPKKKRKVNISGSSCGSPNSADTSSDFKDLWTKLKECHDREVQGLQVKVTKLKQERILDAQRLEEFFTKNQQLREQQKVLHETIKVLEDRLRAGLCDRCAVTEEHMRKKQQEFENIRQQNLKLITELMNERNTLQEENKKLSEQLQQKIENDQQHQAAELECEEDVIPDSPITAFSFSGVNRLRRKENPHVRYIEQTHTKLEHSVCANEMRKVSKSSTHPQHNPNENEILVADTYDQSQSPMAKAHGTSSYTPDKSSFNLATVVAETLGLGVQEESETQGPMSPLGDELYHCLEGNHKKQPFESGSETPGTSESATPEGSPKRKVSSAEGAAKEEPKRRSARLSAKPPAKVEAKPKKAAAKDKSSDKKVQTKGKRGAKGKQAEVANQETKEDLPAENGETKTEESPASDEAGEKEAKSDSGSETPGTSESATPESYEQLAPQPCVGETLHSSLPRDSELFVPEEGSSEKESEDAPKTSPPTPGKHGLEQTGEEKVMVTVPDKNPPCPCCGTRVNSVLNLIEHLKVSHGKRGVCFRCAKCGKENSNYHSVVCHFKKCRGPETEKAPAGEWICEVCNRDFTTKIGLGQHKRLAHPAVRNQERIVASQPKETSNRGAHKRCWTKEEEELLIRLEAQFEGNKNINKLIAEHITTKTAKQISDKRRLLSRKPAEEPREEPGTCHHTRRAAASLRTEPEMSHHAQAEDRDNGPGRRPLPGRAAAGGRTMDEIRRHPDKGNGQQRPTKQKSEEQLQAYYKKTLEERLSAGALNTFPRAFKQVMEGRDIKLVINQTAQDCFGCLESISQIRTATRDKKDTVTREKHPKKPFQKWMKKRAIKKGNYLRFQRLFYLDRGKLAKIILDDIECLSCDIPLSEIYSVFKTRWETTGSFKSLGDFKTYGKADNTAFRELITAKEIEKNVQEMSKGSAPGPDGITLGDVVKMDPEFSRTMEIFNLWLTTGKIPDMVRGCRTVLIPKSSKPDRLKDINNWRPITIGSILLRLFSRIVTARLSKACPLNPRQRGFIRAAGCSENLKLLQTIIWSAKREHRPLGVVFVDIAKAFDTVSHQHIIHALQQREVDPHIVGLVSNMYENISTYITTKRNTHTDKIQIRVGVKQGDPMSPLLFNLAMDPLLCKLEESGKGYHRGQSSITAMAFADDLVLLSDSWENMNTNISILETFCNLTGLKTQGQKCHGFYIKPTKKSYTINDCAAWTINGTPLNMIDPGESEKYLGLQFDPWIGIARSGLSTKLDFWLQRIDQAPLKPLQKTDILKTYTIPRLIYIADHSEVKSALLETLDQKIRTAVKEWLHLPPCTCDAILYSSTRDGGLGITKLAGLIPSVQARRLHRIAQSSDDTMKCFMEKEKMEQLHKKLWIQAGGDRENIPSIWEAPPSSEPPNNVSTNSEWEAPTQKDKFPKPCNWRKNEFKKWTKLASQGRGIVNFERDKISNHWIQYYRRIPHRKLLTALQLRANVYPTREFLARGRQDQYIKACRHCDADNESCAHIIGNCPVTQDARIKRHNYICELLLEEAKKKDWVVFKEPHIRDSNKELYKPDLIFVKDGRALVVDVTVRYEAAKSSLEEAAAEKVRKYKHLETEVRHLTNAKDVTFVGFPLGARGKWHQDNFKLLTELGLSKSRQVKMAETFSTVALFSSVDIVHMFASRARKSMVM

SEQ ID NO: 700 - protein, 1948 aa, synthetic construct
MADMNGKSLHGKAIKVEQAKKPSFQSGGRRRPPASSRNRSPSGSLRSARGSRGGTRGWLPSQEGHLDDGGYTPDLKMSYSRGLIPVKRGPSSRSGGPPPKKSAPSAVARSNSWMGSQGPMSQRRENYGVPPRRATISSWRNDRMSTRHDGYATNDGNHPSCQETRDYAPPSRGYAYRDNGHSNRDEHSSRGYRNHRSSRETRDYAPPSRGHAYRDYGHSRRDESYSRGYRNRRSSRETREYAPPSRGHGYRDYGHSRRHESYSRGYRNHPSSRETRDYAPPHRDYPKKKRKVNISGSSCGSPNSADTSSDFKDLWTKLKECHDREVQGLQVKVTKLKQERILDAQRLEEFFTKNQQLREQQKVLHETIKVLEDRLRAGLCDRCAVTEEHMRKKQQEFENIRQQNLKLITELMNERNTLQEENKKLSEQLQQKIENDQQHQAAELECEEDVIPDSPITAFSFSGVNRLRRKENPHVRYIEQTHTKLEHSVCANEMRKVSKSSTHPQHNPNENEILVADTYDQSQSPMAKAHGTSSYTPDKSSFNLATVVAETLGLGVQEESETQGPMSPLGDELYHCLEGNHKKQPFESGSETPGTSESATPEGSPKRKVSSAEGAAKEEPKRRSARLSAKPPAKVEAKPKKAAAKDKSSDKKVQTKGKRGAKGKQAEVANQETKEDLPAENGETKTEESPASDEAGEKEAKSDSGSETPGTSESATPESYEQLAPQPCVGETLHSSLPRDSELFVPEEGSSEKESEDAPKTSPPTPGKHGLEQTGEEKVMVTVPDKNPPCPCCGTRVNSVLNLIEHLKVSHGKRGVCFRCAKCGKENSNYHSVVCHFKKCRGPETEKAPAGEWICEVCNRDFTTKIGLGQHKRLAHPAVRNQERIVASQPKETSNRGAHKRCWTKEEEELLIRLEAQFEGNKNINKLIAEHITTKTAKQISDKRRLLSRKPAEEPREEPGTCHHTRRAAASLRTEPEMSHHAQAEDRDNGPGRRPLPGRAAAGGRTMDEIRRHPDKGNGQQRPTKQKSEEQLQAYYKKTLEERLSAGALNTFPRAFKQVMEGRDIKLVINQTAQDCFGCLESISQIRTATRDKKDTVTREKHPKKPFQKWMKKRAIKKGNYLRFQRLFYLDRGKLAKIILDDIECLSCDIPLSEIYSVFKTRWETTGSFKSLGDFKTYGKADNTAFRELITAKEIEKNVQEMSKGSAPGPDGITLGDVVKMDPEFSRTMEIFNLWLTTGKIPDMVRGCRTVLIPKSSKPDRLKDINNWRPITIGSILLRLFSRIVTARLSKACPLNPRQRGFIRAAGCSENLKLLQTIIWSAKREHRPLGVVFVDIAKAFDTVSHQHIIHALQQREVDPHIVGLVSNMYENISTYITTKRNTHTDKIQIRVGVKQGDPMSPLLFNLAMDPLLCKLEESGKGYHRGQSSITAMAFADDLVLLSDSWENMNTNISILETFCNLTGLKTQGQKCHGFYIKPTKKSYTINDCAAWTINGTPLNMIDPGESEKYLGLQFDPWIGIARSGLSTKLDFWLQRIDQAPLKPLQKTDILKTYTIPRLIYIADHSEVKSALLETLDQKIRTAVKEWLHLPPCTCDAILYSSTRDGGLGITKLAGLIPSVQARRLHRIAQSSDDTMKCFMEKEKMEQLHKKLWIQAGGDRENIPSIWEAPPSSEPPNNVSTNSEWEAPTQKDKFPKPCNWRKNEFKKWTKLASQGRGIVNFERDKISNHWIQYYRRIPHRKLLTALQLRANVYPTREFLARGRQDQYIKACRHCDADNESCAHIIGNCPVTQDARIKRHNYICELLLEEAKKKDWVVFKEPHIRDSNKELYKPDLIFVKDGRALVVDVTVRYEAAKSSLEEAAAEKVRKYKHLETEVRHLTNAKDVTFVGFPLGARGKWHQDNFKLLTELGLSKSRQVKMAETFSTVALFSSVDIVHMFASRARKSMVM

SEQ ID NO: 701 - protein, 1710 aa, synthetic construct
MAKDQRNPPSLGRVLPDPREACGSSSYVASIVDGGESRSEKGDSSRYPKKKRKVNISGSSCGSPNSADTSSDFKDLWTKLKECHDREVQGLQVKVTKLKQERILDAQRLEEFFTKNQQLREQQKVLHETIKVLEDRLRAGLCDRCAVTEEHMRKKQQEFENIRQQNLKLITELMNERNTLQEENKKLSEQLQQKIENDQQHQAAELECEEDVIPDSPITAFSFSGVNRLRRKENPHVRYIEQTHTKLEHSVCANEMRKVSKSSTHPQHNPNENEILVADTYDQSQSPMAKAHGTSSYTPDKSSFNLATVVAETLGLGVQEESETQGPMSPLGDELYHCLEGNHKKQPFESGSETPGTSESATPEGSPKRKVSSAEGAAKEEPKRRSARLSAKPPAKVEAKPKKAAAKDKSSDKKVQTKGKRGAKGKQAEVANQETKEDLPAENGETKTEESPASDEAGEKEAKSDSGSETPGTSESATPESYEQLAPQPCVGETLHSSLPRDSELFVPEEGSSEKESEDAPKTSPPTPGKHGLEQTGEEKVMVTVPDKNPPCPCCGTRVNSVLNLIEHLKVSHGKRGVCFRCAKCGKENSNYHSVVCHFKKCRGPETEKAPAGEWICEVCNRDFTTKIGLGQHKRLAHPAVRNQERIVASQPKETSNRGAHKRCWTKEEEELLIRLEAQFEGNKNINKLIAEHITTKTAKQISDKRRLLSRKPAEEPREEPGTCHHTRRAAASLRTEPEMSHHAQAEDRDNGPGRRPLPGRAAAGGRTMDEIRRHPDKGNGQQRPTKQKSEEQLQAYYKKTLEERLSAGALNTFPRAFKQVMEGRDIKLVINQTAQDCFGCLESISQIRTATRDKKDTVTREKHPKKPFQKWMKKRAIKKGNYLRFQRLFYLDRGKLAKIILDDIECLSCDIPLSEIYSVFKTRWETTGSFKSLGDFKTYGKADNTAFRELITAKEIEKNVQEMSKGSAPGPDGITLGDVVKMDPEFSRTMEIFNLWLTTGKIPDMVRGCRTVLIPKSSKPDRLKDINNWRPITIGSILLRLFSRIVTARLSKACPLNPRQRGFIRAAGCSENLKLLQTIIWSAKREHRPLGVVFVDIAKAFDTVSHQHIIHALQQREVDPHIVGLVSNMYENISTYITTKRNTHTDKIQIRVGVKQGDPMSPLLFNLAMDPLLCKLEESGKGYHRGQSSITAMAFADDLVLLSDSWENMNTNISILETFCNLTGLKTQGQKCHGFYIKPTKKSYTINDCAAWTINGTPLNMIDPGESEKYLGLQFDPWIGIARSGLSTKLDFWLQRIDQAPLKPLQKTDILKTYTIPRLIYIADHSEVKSALLETLDQKIRTAVKEWLHLPPCTCDAILYSSTRDGGLGITKLAGLIPSVQARRLHRIAQSSDDTMKCFMEKEKMEQLHKKLWIQAGGDRENIPSIWEAPPSSEPPNNVSTNSEWEAPTQKDKFPKPCNWRKNEFKKWTKLASQGRGIVNFERDKISNHWIQYYRRIPHRKLLTALQLRANVYPTREFLARGRQDQYIKACRHCDADNESCAHIIGNCPVTQDARIKRHNYICELLLEEAKKKDWVVFKEPHIRDSNKELYKPDLIFVKDGRALVVDVTVRYEAAKSSLEEAAAEKVRKYKHLETEVRHLTNAKDVTFVGFPLGARGKWHQDNFKLLTELGLSKSRQVKMAETFSTVALFSSVDIVHMFASRARKSMVM

SEQ ID NO: 702 - protein, 1714 aa, synthetic construct
MSAGSATHPGAGGRRSKWDQPAPAPLLFLPPAAPGGEVTSSGGSPGGTTAAPKKKRKVNISGSSCGSPNSADTSSDFKDLWTKLKECHDREVQGLQVKVTKLKQERILDAQRLEEFFTKNQQLREQQKVLHETIKVLEDRLRAGLCDRCAVTEEHMRKKQQEFENIRQQNLKLITELMNERNTLQEENKKLSEQLQQKIENDQQHQAAELECEEDVIPDSPITAFSFSGVNRLRRKENPHVRYIEQTHTKLEHSVCANEMRKVSKSSTHPQHNPNENEILVADTYDQSQSPMAKAHGTSSYTPDKSSFNLATVVAETLGLGVQEESETQGPMSPLGDELYHCLEGNHKKQPFESGSETPGTSESATPEGSPKRKVSSAEGAAKEEPKRRSARLSAKPPAKVEAKPKKAAAKDKSSDKKVQTKGKRGAKGKQAEVANQETKEDLPAENGETKTEESPASDEAGEKEAKSDSGSETPGTSESATPESYEQLAPQPCVGETLHSSLPRDSELFVPEEGSSEKESEDAPKTSPPTPGKHGLEQTGEEKVMVTVPDKNPPCPCCGTRVNSVLNLIEHLKVSHGKRGVCFRCAKCGKENSNYHSVVCHFKKCRGPETEKAPAGEWICEVCNRDFTTKIGLGQHKRLAHPAVRNQERIVASQPKETSNRGAHKRCWTKEEEELLIRLEAQFEGNKNINKLIAEHITTKTAKQISDKRRLLSRKPAEEPREEPGTCHHTRRAAASLRTEPEMSHHAQAEDRDNGPGRRPLPGRAAAGGRTMDEIRRHPDKGNGQQRPTKQKSEEQLQAYYKKTLEERLSAGALNTFPRAFKQVMEGRDIKLVINQTAQDCFGCLESISQIRTATRDKKDTVTREKHPKKPFQKWMKKRAIKKGNYLRFQRLFYLDRGKLAKIILDDIECLSCDIPLSEIYSVFKTRWETTGSFKSLGDFKTYGKADNTAFRELITAKEIEKNVQEMSKGSAPGPDGITLGDVVKMDPEFSRTMEIFNLWLTTGKIPDMVRGCRTVLIPKSSKPDRLKDINNWRPITIGSILLRLFSRIVTARLSKACPLNPRQRGFIRAAGCSENLKLLQTIIWSAKREHRPLGVVFVDIAKAFDTVSHQHIIHALQQREVDPHIVGLVSNMYENISTYITTKRNTHTDKIQIRVGVKQGDPMSPLLFNLAMDPLLCKLEESGKGYHRGQSSITAMAFADDLVLLSDSWENMNTNISILETFCNLTGLKTQGQKCHGFYIKPTKKSYTINDCAAWTINGTPLNMIDPGESEKYLGLQFDPWIGIARSGLSTKLDFWLQRIDQAPLKPLQKTDILKTYTIPRLIYIADHSEVKSALLETLDQKIRTAVKEWLHLPPCTCDAILYSSTRDGGLGITKLAGLIPSVQARRLHRIAQSSDDTMKCFMEKEKMEQLHKKLWIQAGGDRENIPSIWEAPPSSEPPNNVSTNSEWEAPTQKDKFPKPCNWRKNEFKKWTKLASQGRGIVNFERDKISNHWIQYYRRIPHRKLLTALQLRANVYPTREFLARGRQDQYIKACRHCDADNESCAHIIGNCPVTQDARIKRHNYICELLLEEAKKKDWVVFKEPHIRDSNKELYKPDLIFVKDGRALVVDVTVRYEAAKSSLEEAAAEKVRKYKHLETEVRHLTNAKDVTFVGFPLGARGKWHQDNFKLLTELGLSKSRQVKMAETFSTVALFSSVDIVHMFASRARKSMVM

SEQ ID NO: 703 - protein, 1807 aa, synthetic construct
MAQVQPPASTGQSPMGGPFIPAAPVKTALPAGPQPQPQPQPPLPSQPQAQKRRFTEELPDERESGLLGYQHGPIHMTNLGTGFSSQNEIEGAGSKPASSSGKERERDRQLMPPPAFPVTGIKTESDERNGSGTLTGSHDYPAKKPKKKRKVNISGSSCGSPNSADTSSDFKDLWTKLKECHDREVQGLQVKVTKLKQERILDAQRLEEFFTKNQQLREQQKVLHETIKVLEDRLRAGLCDRCAVTEEHMRKKQQEFENIRQQNLKLITELMNERNTLQEENKKLSEQLQQKIENDQQHQAAELECEEDVIPDSPITAFSFSGVNRLRRKENPHVRYIEQTHTKLEHSVCANEMRKVSKSSTHPQHNPNENEILVADTYDQSQSPMAKAHGTSSYTPDKSSFNLATVVAETLGLGVQEESETQGPMSPLGDELYHCLEGNHKKQPFESGSETPGTSESATPEGSPKRKVSSAEGAAKEEPKRRSARLSAKPPAKVEAKPKKAAAKDKSSDKKVQTKGKRGAKGKQAEVANQETKEDLPAENGETKTEESPASDEAGEKEAKSDSGSETPGTSESATPESYEQLAPQPCVGETLHSSLPRDSELFVPEEGSSEKESEDAPKTSPPTPGKHGLEQTGEEKVMVTVPDKNPPCPCCGTRVNSVLNLIEHLKVSHGKRGVCFRCAKCGKENSNYHSVVCHFKKCRGPETEKAPAGEWICEVCNRDFTTKIGLGQHKRLAHPAVRNQERIVASQPKETSNRGAHKRCWTKEEEELLIRLEAQFEGNKNINKLIAEHITTKTAKQISDKRRLLSRKPAEEPREEPGTCHHTRRAAASLRTEPEMSHHAQAEDRDNGPGRRPLPGRAAAGGRTMDEIRRHPDKGNGQQRPTKQKSEEQLQAYYKKTLEERLSAGALNTFPRAFKQVMEGRDIKLVINQTAQDCFGCLESISQIRTATRDKKDTVTREKHPKKPFQKWMKKRAIKKGNYLRFQRLFYLDRGKLAKIILDDIECLSCDIPLSEIYSVFKTRWETTGSFKSLGDFKTYGKADNTAFRELITAKEIEKNVQEMSKGSAPGPDGITLGDVVKMDPEFSRTMEIFNLWLTTGKIPDMVRGCRTVLIPKSSKPDRLKDINNWRPITIGSILLRLFSRIVTARLSKACPLNPRQRGFIRAAGCSENLKLLQTIIWSAKREHRPLGVVFVDIAKAFDTVSHQHIIHALQQREVDPHIVGLVSNMYENISTYITTKRNTHTDKIQIRVGVKQGDPMSPLLFNLAMDPLLCKLEESGKGYHRGQSSITAMAFADDLVLLSDSWENMNTNISILETFCNLTGLKTQGQKCHGFYIKPTKKSYTINDCAAWTINGTPLNMIDPGESEKYLGLQFDPWIGIARSGLSTKLDFWLQRIDQAPLKPLQKTDILKTYTIPRLIYIADHSEVKSALLETLDQKIRTAVKEWLHLPPCTCDAILYSSTRDGGLGITKLAGLIPSVQARRLHRIAQSSDDTMKCFMEKEKMEQLHKKLWIQAGGDRENIPSIWEAPPSSEPPNNVSTNSEWEAPTQKDKFPKPCNWRKNEFKKWTKLASQGRGIVNFERDKISNHWIQYYRRIPHRKLLTALQLRANVYPTREFLARGRQDQYIKACRHCDADNESCAHIIGNCPVTQDARIKRHNYICELLLEEAKKKDWVVFKEPHIRDSNKELYKPDLIFVKDGRALVVDVTVRYEAAKSSLEEAAAEKVRKYKHLETEVRHLTNAKDVTFVGFPLGARGKWHQDNFKLLTELGLSKSRQVKMAETFSTVALFSSVDIVHMFASRARKSMVM

SEQ ID NO: 704 - protein, 1713 aa, synthetic construct
MAYAADSSDEEEEHGGHKNASSFPQGWSLGYQYPSSQPRAKQQMPFWMAPPKKKRKVNISGSSCGSPNSADTSSDFKDLWTKLKECHDREVQGLQVKVTKLKQERILDAQRLEEFFTKNQQLREQQKVLHETIKVLEDRLRAGLCDRCAVTEEHMRKKQQEFENIRQQNLKLITELMNERNTLQEENKKLSEQLQQKIENDQQHQAAELECEEDVIPDSPITAFSFSGVNRLRRKENPHVRYIEQTHTKLEHSVCANEMRKVSKSSTHPQHNPNENEILVADTYDQSQSPMAKAHGTSSYTPDKSSFNLATVVAETLGLGVQEESETQGPMSPLGDELYHCLEGNHKKQPFESGSETPGTSESATPEGSPKRKVSSAEGAAKEEPKRRSARLSAKPPAKVEAKPKKAAAKDKSSDKKVQTKGKRGAKGKQAEVANQETKEDLPAENGETKTEESPASDEAGEKEAKSDSGSETPGTSESATPESYEQLAPQPCVGETLHSSLPRDSELFVPEEGSSEKESEDAPKTSPPTPGKHGLEQTGEEKVMVTVPDKNPPCPCCGTRVNSVLNLIEHLKVSHGKRGVCFRCAKCGKENSNYHSVVCHFKKCRGPETEKAPAGEWICEVCNRDFTTKIGLGQHKRLAHPAVRNQERIVASQPKETSNRGAHKRCWTKEEEELLIRLEAQFEGNKNINKLIAEHITTKTAKQISDKRRLLSRKPAEEPREEPGTCHHTRRAAASLRTEPEMSHHAQAEDRDNGPGRRPLPGRAAAGGRTMDEIRRHPDKGNGQQRPTKQKSEEQLQAYYKKTLEERLSAGALNTFPRAFKQVMEGRDIKLVINQTAQDCFGCLESISQIRTATRDKKDTVTREKHPKKPFQKWMKKRAIKKGNYLRFQRLFYLDRGKLAKIILDDIECLSCDIPLSEIYSVFKTRWETTGSFKSLGDFKTYGKADNTAFRELITAKEIEKNVQEMSKGSAPGPDGITLGDVVKMDPEFSRTMEIFNLWLTTGKIPDMVRGCRTVLIPKSSKPDRLKDINNWRPITIGSILLRLFSRIVTARLSKACPLNPRQRGFIRAAGCSENLKLLQTIIWSAKREHRPLGVVFVDIAKAFDTVSHQHIIHALQQREVDPHIVGLVSNMYENISTYITTKRNTHTDKIQIRVGVKQGDPMSPLLFNLAMDPLLCKLEESGKGYHRGQSSITAMAFADDLVLLSDSWENMNTNISILETFCNLTGLKTQGQKCHGFYIKPTKKSYTINDCAAWTINGTPLNMIDPGESEKYLGLQFDPWIGIARSGLSTKLDFWLQRIDQAPLKPLQKTDILKTYTIPRLIYIADHSEVKSALLETLDQKIRTAVKEWLHLPPCTCDAILYSSTRDGGLGITKLAGLIPSVQARRLHRIAQSSDDTMKCFMEKEKMEQLHKKLWIQAGGDRENIPSIWEAPPSSEPPNNVSTNSEWEAPTQKDKFPKPCNWRKNEFKKWTKLASQGRGIVNFERDKISNHWIQYYRRIPHRKLLTALQLRANVYPTREFLARGRQDQYIKACRHCDADNESCAHIIGNCPVTQDARIKRHNYICELLLEEAKKKDWVVFKEPHIRDSNKELYKPDLIFVKDGRALVVDVTVRYEAAKSSLEEAAAEKVRKYKHLETEVRHLTNAKDVTFVGFPLGARGKWHQDNFKLLTELGLSKSRQVKMAETFSTVALFSSVDIVHMFASRARKSMVM

SEQ ID NO: 705 - protein, 2002 aa, synthetic construct
MSSRPGREDVGAAGARRPREPPEQELQRRREQKRRRHDAQQLQQLKHLESFYEKPPPGLIKEDETKPEDCIPDVPGMARGPKKHLKRVAAPKHWMLDKLTGVFAPRPSTGPHKLRECLPLIVFLRNRLKYALTGDEVKKICMQHFLKIDGKVRVDITYPAGFIDVISIEKTGEHFRLVYNTKGCFAVHRITVEEAKYKLCKVRKITVGTKGIPHLVTHDARTIRYPDPLIKVNDTVQIDLGTGKITSFIKFDTGNVCMVIAGANLGRVGVITNRERHPGSCDVVHVKDANGNSFATRISNIFVIGNGNKPWISLPRGKGIRLTIAEERDKRLAAKQSSGPKKKRKVNISGSSCGSPNSADTSSDFKDLWTKLKECHDREVQGLQVKVTKLKQERILDAQRLEEFFTKNQQLREQQKVLHETIKVLEDRLRAGLCDRCAVTEEHMRKKQQEFENIRQQNLKLITELMNERNTLQEENKKLSEQLQQKIENDQQHQAAELECEEDVIPDSPITAFSFSGVNRLRRKENPHVRYIEQTHTKLEHSVCANEMRKVSKSSTHPQHNPNENEILVADTYDQSQSPMAKAHGTSSYTPDKSSFNLATVVAETLGLGVQEESETQGPMSPLGDELYHCLEGNHKKQPFESGSETPGTSESATPEGSPKRKVSSAEGAAKEEPKRRSARLSAKPPAKVEAKPKKAAAKDKSSDKKVQTKGKRGAKGKQAEVANQETKEDLPAENGETKTEESPASDEAGEKEAKSDSGSETPGTSESATPESYEQLAPQPCVGETLHSSLPRDSELFVPEEGSSEKESEDAPKTSPPTPGKHGLEQTGEEKVMVTVPDKNPPCPCCGTRVNSVLNLIEHLKVSHGKRGVCFRCAKCGKENSNYHSVVCHFKKCRGPETEKAPAGEWICEVCNRDFTTKIGLGQHKRLAHPAVRNQERIVASQPKETSNRGAHKRCWTKEEEELLIRLEAQFEGNKNINKLIAEHITTKTAKQISDKRRLLSRKPAEEPREEPGTCHHTRRAAASLRTEPEMSHHAQAEDRDNGPGRRPLPGRAAAGGRTMDEIRRHPDKGNGQQRPTKQKSEEQLQAYYKKTLEERLSAGALNTFPRAFKQVMEGRDIKLVINQTAQDCFGCLESISQIRTATRDKKDTVTREKHPKKPFQKWMKKRAIKKGNYLRFQRLFYLDRGKLAKIILDDIECLSCDIPLSEIYSVFKTRWETTGSFKSLGDFKTYGKADNTAFRELITAKEIEKNVQEMSKGSAPGPDGITLGDVVKMDPEFSRTMEIFNLWLTTGKIPDMVRGCRTVLIPKSSKPDRLKDINNWRPITIGSILLRLFSRIVTARLSKACPLNPRQRGFIRAAGCSENLKLLQTIIWSAKREHRPLGVVFVDIAKAFDTVSHQHIIHALQQREVDPHIVGLVSNMYENISTYITTKRNTHTDKIQIRVGVKQGDPMSPLLFNLAMDPLLCKLEESGKGYHRGQSSITAMAFADDLVLLSDSWENMNTNISILETFCNLTGLKTQGQKCHGFYIKPTKKSYTINDCAAWTINGTPLNMIDPGESEKYLGLQFDPWIGIARSGLSTKLDFWLQRIDQAPLKPLQKTDILKTYTIPRLIYIADHSEVKSALLETLDQKIRTAVKEWLHLPPCTCDAILYSSTRDGGLGITKLAGLIPSVQARRLHRIAQSSDDTMKCFMEKEKMEQLHKKLWIQAGGDRENIPSIWEAPPSSEPPNNVSTNSEWEAPTQKDKFPKPCNWRKNEFKKWTKLASQGRGIVNFERDKISNHWIQYYRRIPHRKLLTALQLRANVYPTREFLARGRQDQYIKACRHCDADNESCAHIIGNCPVTQDARIKRHNYICELLLEEAKKKDWVVFKEPHIRDSNKELYKPDLIFVKDGRALVVDVTVRYEAAKSSLEEAAAEKVRKYKHLETEVRHLTNAKDVTFVGFPLGARGKWHQDNFKLLTELGLSKSRQVKMAETFSTVALFSSVDIVHMFASRARKSMVM

SEQ ID NO: 706 - protein, 1740 aa, synthetic construct
MADNKRHEKDVRIQQLKQLLEDSTSDEDRSSSSSSEGKEKHKKKKKKEKHKKRKKEKKKKKKRKHKSSKSNEGSDSEPKKKRKVNISGSSCGSPNSADTSSDFKDLWTKLKECHDREVQGLQVKVTKLKQERILDAQRLEEFFTKNQQLREQQKVLHETIKVLEDRLRAGLCDRCAVTEEHMRKKQQEFENIRQQNLKLITELMNERNTLQEENKKLSEQLQQKIENDQQHQAAELECEEDVIPDSPITAFSFSGVNRLRRKENPHVRYIEQTHTKLEHSVCANEMRKVSKSSTHPQHNPNENEILVADTYDQSQSPMAKAHGTSSYTPDKSSFNLATVVAETLGLGVQEESETQGPMSPLGDELYHCLEGNHKKQPFESGSETPGTSESATPEGSPKRKVSSAEGAAKEEPKRRSARLSAKPPAKVEAKPKKAAAKDKSSDKKVQTKGKRGAKGKQAEVANQETKEDLPAENGETKTEESPASDEAGEKEAKSDSGSETPGTSESATPESYEQLAPQPCVGETLHSSLPRDSELFVPEEGSSEKESEDAPKTSPPTPGKHGLEQTGEEKVMVTVPDKNPPCPCCGTRVNSVLNLIEHLKVSHGKRGVCFRCAKCGKENSNYHSVVCHFKKCRGPETEKAPAGEWICEVCNRDFTTKIGLGQHKRLAHPAVRNQERIVASQPKETSNRGAHKRCWTKEEEELLIRLEAQFEGNKNINKLIAEHITTKTAKQISDKRRLLSRKPAEEPREEPGTCHHTRRAAASLRTEPEMSHHAQAEDRDNGPGRRPLPGRAAAGGRTMDEIRRHPDKGNGQQRPTKQKSEEQLQAYYKKTLEERLSAGALNTFPRAFKQVMEGRDIKLVINQTAQDCFGCLESISQIRTATRDKKDTVTREKHPKKPFQKWMKKRAIKKGNYLRFQRLFYLDRGKLAKIILDDIECLSCDIPLSEIYSVFKTRWETTGSFKSLGDFKTYGKADNTAFRELITAKEIEKNVQEMSKGSAPGPDGITLGDVVKMDPEFSRTMEIFNLWLTTGKIPDMVRGCRTVLIPKSSKPDRLKDINNWRPITIGSILLRLFSRIVTARLSKACPLNPRQRGFIRAAGCSENLKLLQTIIWSAKREHRPLGVVFVDIAKAFDTVSHQHIIHALQQREVDPHIVGLVSNMYENISTYITTKRNTHTDKIQIRVGVKQGDPMSPLLFNLAMDPLLCKLEESGKGYHRGQSSITAMAFADDLVLLSDSWENMNTNISILETFCNLTGLKTQGQKCHGFYIKPTKKSYTINDCAAWTINGTPLNMIDPGESEKYLGLQFDPWIGIARSGLSTKLDFWLQRIDQAPLKPLQKTDILKTYTIPRLIYIADHSEVKSALLETLDQKIRTAVKEWLHLPPCTCDAILYSSTRDGGLGITKLAGLIPSVQARRLHRIAQSSDDTMKCFMEKEKMEQLHKKLWIQAGGDRENIPSIWEAPPSSEPPNNVSTNSEWEAPTQKDKFPKPCNWRKNEFKKWTKLASQGRGIVNFERDKISNHWIQYYRRIPHRKLLTALQLRANVYPTREFLARGRQDQYIKACRHCDADNESCAHIIGNCPVTQDARIKRHNYICELLLEEAKKKDWVVFKEPHIRDSNKELYKPDLIFVKDGRALVVDVTVRYEAAKSSLEEAAAEKVRKYKHLETEVRHLTNAKDVTFVGFPLGARGKWHQDNFKLLTELGLSKSRQVKMAETFSTVALFSSVDIVHMFASRARKSMVM

SEQ ID NO: 707 - protein, 1788 aa, synthetic construct
MAVADLALIPDVDIDSDGVFKYVLIRVHSAPRSGAPAAESKEIVRGYKWAEYHADIYDKVSGDMQKQGCDCECLGGGRISHQSQDKKIHVYGYSMAYGPAQHAISTEKIKAKYPDYEVTWANDGYPKKKRKVNISGSSCGSPNSADTSSDFKDLWTKLKECHDREVQGLQVKVTKLKQERILDAQRLEEFFTKNQQLREQQKVLHETIKVLEDRLRAGLCDRCAVTEEHMRKKQQEFENIRQQNLKLITELMNERNTLQEENKKLSEQLQQKIENDQQHQAAELECEEDVIPDSPITAFSFSGVNRLRRKENPHVRYIEQTHTKLEHSVCANEMRKVSKSSTHPQHNPNENEILVADTYDQSQSPMAKAHGTSSYTPDKSSFNLATVVAETLGLGVQEESETQGPMSPLGDELYHCLEGNHKKQPFESGSETPGTSESATPEGSPKRKVSSAEGAAKEEPKRRSARLSAKPPAKVEAKPKKAAAKDKSSDKKVQTKGKRGAKGKQAEVANQETKEDLPAENGETKTEESPASDEAGEKEAKSDSGSETPGTSESATPESYEQLAPQPCVGETLHSSLPRDSELFVPEEGSSEKESEDAPKTSPPTPGKHGLEQTGEEKVMVTVPDKNPPCPCCGTRVNSVLNLIEHLKVSHGKRGVCFRCAKCGKENSNYHSVVCHFKKCRGPETEKAPAGEWICEVCNRDFTTKIGLGQHKRLAHPAVRNQERIVASQPKETSNRGAHKRCWTKEEEELLIRLEAQFEGNKNINKLIAEHITTKTAKQISDKRRLLSRKPAEEPREEPGTCHHTRRAAASLRTEPEMSHHAQAEDRDNGPGRRPLPGRAAAGGRTMDEIRRHPDKGNGQQRPTKQKSEEQLQAYYKKTLEERLSAGALNTFPRAFKQVMEGRDIKLVINQTAQDCFGCLESISQIRTATRDKKDTVTREKHPKKPFQKWMKKRAIKKGNYLRFQRLFYLDRGKLAKIILDDIECLSCDIPLSEIYSVFKTRWETTGSFKSLGDFKTYGKADNTAFRELITAKEIEKNVQEMSKGSAPGPDGITLGDVVKMDPEFSRTMEIFNLWLTTGKIPDMVRGCRTVLIPKSSKPDRLKDINNWRPITIGSILLRLFSRIVTARLSKACPLNPRQRGFIRAAGCSENLKLLQTIIWSAKREHRPLGVVFVDIAKAFDTVSHQHIIHALQQREVDPHIVGLVSNMYENISTYITTKRNTHTDKIQIRVGVKQGDPMSPLLFNLAMDPLLCKLEESGKGYHRGQSSITAMAFADDLVLLSDSWENMNTNISILETFCNLTGLKTQGQKCHGFYIKPTKKSYTINDCAAWTINGTPLNMIDPGESEKYLGLQFDPWIGIARSGLSTKLDFWLQRIDQAPLKPLQKTDILKTYTIPRLIYIADHSEVKSALLETLDQKIRTAVKEWLHLPPCTCDAILYSSTRDGGLGITKLAGLIPSVQARRLHRIAQSSDDTMKCFMEKEKMEQLHKKLWIQAGGDRENIPSIWEAPPSSEPPNNVSTNSEWEAPTQKDKFPKPCNWRKNEFKKWTKLASQGRGIVNFERDKISNHWIQYYRRIPHRKLLTALQLRANVYPTREFLARGRQDQYIKACRHCDADNESCAHIIGNCPVTQDARIKRHNYICELLLEEAKKKDWVVFKEPHIRDSNKELYKPDLIFVKDGRALVVDVTVRYEAAKSSLEEAAAEKVRKYKHLETEVRHLTNAKDVTFVGFPLGARGKWHQDNFKLLTELGLSKSRQVKMAETFSTVALFSSVDIVHMFASRARKSMVM

SEQ ID NO: 708 - protein, 1863 aa, synthetic construct
MAEEEKKREVLNNPVKMKKIKELLQMSLEKKEKKKKKEKKKKHKKHKHRSSSSDRSSSEDEHSAGRSQKKMANSSPVLSKVPGYGLQVRNSDRNQGLQGPLTAEQKRGHGMKNHSRSRSSSHSPPRHASKKSTREAGSRDRRSRSLGRRSRSPRPSKLHNSKVNRRETGQTRSPSPKKEVYQRRHAPGYTRKLSAEELERPKKKRKVNISGSSCGSPNSADTSSDFKDLWTKLKECHDREVQGLQVKVTKLKQERILDAQRLEEFFTKNQQLREQQKVLHETIKVLEDRLRAGLCDRCAVTEEHMRKKQQEFENIRQQNLKLITELMNERNTLQEENKKLSEQLQQKIENDQQHQAAELECEEDVIPDSPITAFSFSGVNRLRRKENPHVRYIEQTHTKLEHSVCANEMRKVSKSSTHPQHNPNENEILVADTYDQSQSPMAKAHGTSSYTPDKSSFNLATVVAETLGLGVQEESETQGPMSPLGDELYHCLEGNHKKQPFESGSETPGTSESATPEGSPKRKVSSAEGAAKEEPKRRSARLSAKPPAKVEAKPKKAAAKDKSSDKKVQTKGKRGAKGKQAEVANQETKEDLPAENGETKTEESPASDEAGEKEAKSDSGSETPGTSESATPESYEQLAPQPCVGETLHSSLPRDSELFVPEEGSSEKESEDAPKTSPPTPGKHGLEQTGEEKVMVTVPDKNPPCPCCGTRVNSVLNLIEHLKVSHGKRGVCFRCAKCGKENSNYHSVVCHFKKCRGPETEKAPAGEWICEVCNRDFTTKIGLGQHKRLAHPAVRNQERIVASQPKETSNRGAHKRCWTKEEEELLIRLEAQFEGNKNINKLIAEHITTKTAKQISDKRRLLSRKPAEEPREEPGTCHHTRRAAASLRTEPEMSHHAQAEDRDNGPGRRPLPGRAAAGGRTMDEIRRHPDKGNGQQRPTKQKSEEQLQAYYKKTLEERLSAGALNTFPRAFKQVMEGRDIKLVINQTAQDCFGCLESISQIRTATRDKKDTVTREKHPKKPFQKWMKKRAIKKGNYLRFQRLFYLDRGKLAKIILDDIECLSCDIPLSEIYSVFKTRWETTGSFKSLGDFKTYGKADNTAFRELITAKEIEKNVQEMSKGSAPGPDGITLGDVVKMDPEFSRTMEIFNLWLTTGKIPDMVRGCRTVLIPKSSKPDRLKDINNWRPITIGSILLRLFSRIVTARLSKACPLNPRQRGFIRAAGCSENLKLLQTIIWSAKREHRPLGVVFVDIAKAFDTVSHQHIIHALQQREVDPHIVGLVSNMYENISTYITTKRNTHTDKIQIRVGVKQGDPMSPLLFNLAMDPLLCKLEESGKGYHRGQSSITAMAFADDLVLLSDSWENMNTNISILETFCNLTGLKTQGQKCHGFYIKPTKKSYTINDCAAWTINGTPLNMIDPGESEKYLGLQFDPWIGIARSGLSTKLDFWLQRIDQAPLKPLQKTDILKTYTIPRLIYIADHSEVKSALLETLDQKIRTAVKEWLHLPPCTCDAILYSSTRDGGLGITKLAGLIPSVQARRLHRIAQSSDDTMKCFMEKEKMEQLHKKLWIQAGGDRENIPSIWEAPPSSEPPNNVSTNSEWEAPTQKDKFPKPCNWRKNEFKKWTKLASQGRGIVNFERDKISNHWIQYYRRIPHRKLLTALQLRANVYPTREFLARGRQDQYIKACRHCDADNESCAHIIGNCPVTQDARIKRHNYICELLLEEAKKKDWVVFKEPHIRDSNKELYKPDLIFVKDGRALVVDVTVRYEAAKSSLEEAAAEKVRKYKHLETEVRHLTNAKDVTFVGFPLGARGKWHQDNFKLLTELGLSKSRQVKMAETFSTVALFSSVDIVHMFASRARKSMVM

SEQ ID NO: 709 - protein, 1741 aa, synthetic construct
MARPVRHKKPVNYSQFDHSDSDDDFVSATVPLNKKSRTAPKELKQDKPKPNLNNLRKEEIPVQEKTPKKRLPEGTFSIPKKKRKVNISGSSCGSPNSADTSSDFKDLWTKLKECHDREVQGLQVKVTKLKQERILDAQRLEEFFTKNQQLREQQKVLHETIKVLEDRLRAGLCDRCAVTEEHMRKKQQEFENIRQQNLKLITELMNERNTLQEENKKLSEQLQQKIENDQQHQAAELECEEDVIPDSPITAFSFSGVNRLRRKENPHVRYIEQTHTKLEHSVCANEMRKVSKSSTHPQHNPNENEILVADTYDQSQSPMAKAHGTSSYTPDKSSFNLATVVAETLGLGVQEESETQGPMSPLGDELYHCLEGNHKKQPFESGSETPGTSESATPEGSPKRKVSSAEGAAKEEPKRRSARLSAKPPAKVEAKPKKAAAKDKSSDKKVQTKGKRGAKGKQAEVANQETKEDLPAENGETKTEESPASDEAGEKEAKSDSGSETPGTSESATPESYEQLAPQPCVGETLHSSLPRDSELFVPEEGSSEKESEDAPKTSPPTPGKHGLEQTGEEKVMVTVPDKNPPCPCCGTRVNSVLNLIEHLKVSHGKRGVCFRCAKCGKENSNYHSVVCHFKKCRGPETEKAPAGEWICEVCNRDFTTKIGLGQHKRLAHPAVRNQERIVASQPKETSNRGAHKRCWTKEEEELLIRLEAQFEGNKNINKLIAEHITTKTAKQISDKRRLLSRKPAEEPREEPGTCHHTRRAAASLRTEPEMSHHAQAEDRDNGPGRRPLPGRAAAGGRTMDEIRRHPDKGNGQQRPTKQKSEEQLQAYYKKTLEERLSAGALNTFPRAFKQVMEGRDIKLVINQTAQDCFGCLESISQIRTATRDKKDTVTREKHPKKPFQKWMKKRAIKKGNYLRFQRLFYLDRGKLAKIILDDIECLSCDIPLSEIYSVFKTRWETTGSFKSLGDFKTYGKADNTAFRELITAKEIEKNVQEMSKGSAPGPDGITLGDVVKMDPEFSRTMEIFNLWLTTGKIPDMVRGCRTVLIPKSSKPDRLKDINNWRPITIGSILLRLFSRIVTARLSKACPLNPRQRGFIRAAGCSENLKLLQTIIWSAKREHRPLGVVFVDIAKAFDTVSHQHIIHALQQREVDPHIVGLVSNMYENISTYITTKRNTHTDKIQIRVGVKQGDPMSPLLFNLAMDPLLCKLEESGKGYHRGQSSITAMAFADDLVLLSDSWENMNTNISILETFCNLTGLKTQGQKCHGFYIKPTKKSYTINDCAAWTINGTPLNMIDPGESEKYLGLQFDPWIGIARSGLSTKLDFWLQRIDQAPLKPLQKTDILKTYTIPRLIYIADHSEVKSALLETLDQKIRTAVKEWLHLPPCTCDAILYSSTRDGGLGITKLAGLIPSVQARRLHRIAQSSDDTMKCFMEKEKMEQLHKKLWIQAGGDRENIPSIWEAPPSSEPPNNVSTNSEWEAPTQKDKFPKPCNWRKNEFKKWTKLASQGRGIVNFERDKISNHWIQYYRRIPHRKLLTALQLRANVYPTREFLARGRQDQYIKACRHCDADNESCAHIIGNCPVTQDARIKRHNYICELLLEEAKKKDWVVFKEPHIRDSNKELYKPDLIFVKDGRALVVDVTVRYEAAKSSLEEAAAEKVRKYKHLETEVRHLTNAKDVTFVGFPLGARGKWHQDNFKLLTELGLSKSRQVKMAETFSTVALFSSVDIVHMFASRARKSMVM

SEQ ID NO: 710 - protein, 1868 aa, synthetic construct
MATPLGWSKAGSGSVCLALDQLRDVIESQEELIHQLRNVMVLQDENFVSKEEFQAVEKKLVEEKAAHAKTKVLLAKEEEKLQFALGEVEVLSKQLEKEKLAFEKALSSVKSKVLQESSKKDQLITKCNEIESHIIKQEDILNGKENEIKELQQVISQQKQIFRNHMSDFRIQKQQESYMAQVLDQKHKKASGTRQARSHQHPREKPKKKRKVNISGSSCGSPNSADTSSDFKDLWTKLKECHDREVQGLQVKVTKLKQERILDAQRLEEFFTKNQQLREQQKVLHETIKVLEDRLRAGLCDRCAVTEEHMRKKQQEFENIRQQNLKLITELMNERNTLQEENKKLSEQLQQKIENDQQHQAAELECEEDVIPDSPITAFSFSGVNRLRRKENPHVRYIEQTHTKLEHSVCANEMRKVSKSSTHPQHNPNENEILVADTYDQSQSPMAKAHGTSSYTPDKSSFNLATVVAETLGLGVQEESETQGPMSPLGDELYHCLEGNHKKQPFESGSETPGTSESATPEGSPKRKVSSAEGAAKEEPKRRSARLSAKPPAKVEAKPKKAAAKDKSSDKKVQTKGKRGAKGKQAEVANQETKEDLPAENGETKTEESPASDEAGEKEAKSDSGSETPGTSESATPESYEQLAPQPCVGETLHSSLPRDSELFVPEEGSSEKESEDAPKTSPPTPGKHGLEQTGEEKVMVTVPDKNPPCPCCGTRVNSVLNLIEHLKVSHGKRGVCFRCAKCGKENSNYHSVVCHFKKCRGPETEKAPAGEWICEVCNRDFTTKIGLGQHKRLAHPAVRNQERIVASQPKETSNRGAHKRCWTKEEEELLIRLEAQFEGNKNINKLIAEHITTKTAKQISDKRRLLSRKPAEEPREEPGTCHHTRRAAASLRTEPEMSHHAQAEDRDNGPGRRPLPGRAAAGGRTMDEIRRHPDKGNGQQRPTKQKSEEQLQAYYKKTLEERLSAGALNTFPRAFKQVMEGRDIKLVINQTAQDCFGCLESISQIRTATRDKKDTVTREKHPKKPFQKWMKKRAIKKGNYLRFQRLFYLDRGKLAKIILDDIECLSCDIPLSEIYSVFKTRWETTGSFKSLGDFKTYGKADNTAFRELITAKEIEKNVQEMSKGSAPGPDGITLGDVVKMDPEFSRTMEIFNLWLTTGKIPDMVRGCRTVLIPKSSKPDRLKDINNWRPITIGSILLRLFSRIVTARLSKACPLNPRQRGFIRAAGCSENLKLLQTIIWSAKREHRPLGVVFVDIAKAFDTVSHQHIIHALQQREVDPHIVGLVSNMYENISTYITTKRNTHTDKIQIRVGVKQGDPMSPLLFNLAMDPLLCKLEESGKGYHRGQSSITAMAFADDLVLLSDSWENMNTNISILETFCNLTGLKTQGQKCHGFYIKPTKKSYTINDCAAWTINGTPLNMIDPGESEKYLGLQFDPWIGIARSGLSTKLDFWLQRIDQAPLKPLQKTDILKTYTIPRLIYIADHSEVKSALLETLDQKIRTAVKEWLHLPPCTCDAILYSSTRDGGLGITKLAGLIPSVQARRLHRIAQSSDDTMKCFMEKEKMEQLHKKLWIQAGGDRENIPSIWEAPPSSEPPNNVSTNSEWEAPTQKDKFPKPCNWRKNEFKKWTKLASQGRGIVNFERDKISNHWIQYYRRIPHRKLLTALQLRANVYPTREFLARGRQDQYIKACRHCDADNESCAHIIGNCPVTQDARIKRHNYICELLLEEAKKKDWVVFKEPHIRDSNKELYKPDLIFVKDGRALVVDVTVRYEAAKSSLEEAAAEKVRKYKHLETEVRHLTNAKDVTFVGFPLGARGKWHQDNFKLLTELGLSKSRQVKMAETFSTVALFSSVDIVHMFASRARKSMVM

SEQ ID NO: 711 - protein, 1757 aa, synthetic construct
MAIPKSTRSKAKKSVSAKTKKLVLSRDSKSPKTAKTNKRAKKPRATTPKTVRSGRKAKGAKGKQQQKSPVKARASKSKLTQHHEVNVRKATSKKPKKKRKVNISGSSCGSPNSADTSSDFKDLWTKLKECHDREVQGLQVKVTKLKQERILDAQRLEEFFTKNQQLREQQKVLHETIKVLEDRLRAGLCDRCAVTEEHMRKKQQEFENIRQQNLKLITELMNERNTLQEENKKLSEQLQQKIENDQQHQAAELECEEDVIPDSPITAFSFSGVNRLRRKENPHVRYIEQTHTKLEHSVCANEMRKVSKSSTHPQHNPNENEILVADTYDQSQSPMAKAHGTSSYTPDKSSFNLATVVAETLGLGVQEESETQGPMSPLGDELYHCLEGNHKKQPFESGSETPGTSESATPEGSPKRKVSSAEGAAKEEPKRRSARLSAKPPAKVEAKPKKAAAKDKSSDKKVQTKGKRGAKGKQAEVANQETKEDLPAENGETKTEESPASDEAGEKEAKSDSGSETPGTSESATPESYEQLAPQPCVGETLHSSLPRDSELFVPEEGSSEKESEDAPKTSPPTPGKHGLEQTGEEKVMVTVPDKNPPCPCCGTRVNSVLNLIEHLKVSHGKRGVCFRCAKCGKENSNYHSVVCHFKKCRGPETEKAPAGEWICEVCNRDFTTKIGLGQHKRLAHPAVRNQERIVASQPKETSNRGAHKRCWTKEEEELLIRLEAQFEGNKNINKLIAEHITTKTAKQISDKRRLLSRKPAEEPREEPGTCHHTRRAAASLRTEPEMSHHAQAEDRDNGPGRRPLPGRAAAGGRTMDEIRRHPDKGNGQQRPTKQKSEEQLQAYYKKTLEERLSAGALNTFPRAFKQVMEGRDIKLVINQTAQDCFGCLESISQIRTATRDKKDTVTREKHPKKPFQKWMKKRAIKKGNYLRFQRLFYLDRGKLAKIILDDIECLSCDIPLSEIYSVFKTRWETTGSFKSLGDFKTYGKADNTAFRELITAKEIEKNVQEMSKGSAPGPDGITLGDVVKMDPEFSRTMEIFNLWLTTGKIPDMVRGCRTVLIPKSSKPDRLKDINNWRPITIGSILLRLFSRIVTARLSKACPLNPRQRGFIRAAGCSENLKLLQTIIWSAKREHRPLGVVFVDIAKAFDTVSHQHIIHALQQREVDPHIVGLVSNMYENISTYITTKRNTHTDKIQIRVGVKQGDPMSPLLFNLAMDPLLCKLEESGKGYHRGQSSITAMAFADDLVLLSDSWENMNTNISILETFCNLTGLKTQGQKCHGFYIKPTKKSYTINDCAAWTINGTPLNMIDPGESEKYLGLQFDPWIGIARSGLSTKLDFWLQRIDQAPLKPLQKTDILKTYTIPRLIYIADHSEVKSALLETLDQKIRTAVKEWLHLPPCTCDAILYSSTRDGGLGITKLAGLIPSVQARRLHRIAQSSDDTMKCFMEKEKMEQLHKKLWIQAGGDRENIPSIWEAPPSSEPPNNVSTNSEWEAPTQKDKFPKPCNWRKNEFKKWTKLASQGRGIVNFERDKISNHWIQYYRRIPHRKLLTALQLRANVYPTREFLARGRQDQYIKACRHCDADNESCAHIIGNCPVTQDARIKRHNYICELLLEEAKKKDWVVFKEPHIRDSNKELYKPDLIFVKDGRALVVDVTVRYEAAKSSLEEAAAEKVRKYKHLETEVRHLTNAKDVTFVGFPLGARGKWHQDNFKLLTELGLSKSRQVKMAETFSTVALFSSVDIVHMFASRARKSMVM

SEQ ID NO: 712 - protein, 1706 aa, synthetic construct
MASGTKEQIKGGTGDEKKAKEKIEKKGEKKEKKQQSIAGSADSPKKKRKVNISGSSCGSPNSADTSSDFKDLWTKLKECHDREVQGLQVKVTKLKQERILDAQRLEEFFTKNQQLREQQKVLHETIKVLEDRLRAGLCDRCAVTEEHMRKKQQEFENIRQQNLKLITELMNERNTLQEENKKLSEQLQQKIENDQQHQAAELECEEDVIPDSPITAFSFSGVNRLRRKENPHVRYIEQTHTKLEHSVCANEMRKVSKSSTHPQHNPNENEILVADTYDQSQSPMAKAHGTSSYTPDKSSFNLATVVAETLGLGVQEESETQGPMSPLGDELYHCLEGNHKKQPFESGSETPGTSESATPEGSPKRKVSSAEGAAKEEPKRRSARLSAKPPAKVEAKPKKAAAKDKSSDKKVQTKGKRGAKGKQAEVANQETKEDLPAENGETKTEESPASDEAGEKEAKSDSGSETPGTSESATPESYEQLAPQPCVGETLHSSLPRDSELFVPEEGSSEKESEDAPKTSPPTPGKHGLEQTGEEKVMVTVPDKNPPCPCCGTRVNSVLNLIEHLKVSHGKRGVCFRCAKCGKENSNYHSVVCHFKKCRGPETEKAPAGEWICEVCNRDFTTKIGLGQHKRLAHPAVRNQERIVASQPKETSNRGAHKRCWTKEEEELLIRLEAQFEGNKNINKLIAEHITTKTAKQISDKRRLLSRKPAEEPREEPGTCHHTRRAAASLRTEPEMSHHAQAEDRDNGPGRRPLPGRAAAGGRTMDEIRRHPDKGNGQQRPTKQKSEEQLQAYYKKTLEERLSAGALNTFPRAFKQVMEGRDIKLVINQTAQDCFGCLESISQIRTATRDKKDTVTREKHPKKPFQKWMKKRAIKKGNYLRFQRLFYLDRGKLAKIILDDIECLSCDIPLSEIYSVFKTRWETTGSFKSLGDFKTYGKADNTAFRELITAKEIEKNVQEMSKGSAPGPDGITLGDVVKMDPEFSRTMEIFNLWLTTGKIPDMVRGCRTVLIPKSSKPDRLKDINNWRPITIGSILLRLFSRIVTARLSKACPLNPRQRGFIRAAGCSENLKLLQTIIWSAKREHRPLGVVFVDIAKAFDTVSHQHIIHALQQREVDPHIVGLVSNMYENISTYITTKRNTHTDKIQIRVGVKQGDPMSPLLFNLAMDPLLCKLEESGKGYHRGQSSITAMAFADDLVLLSDSWENMNTNISILETFCNLTGLKTQGQKCHGFYIKPTKKSYTINDCAAWTINGTPLNMIDPGESEKYLGLQFDPWIGIARSGLSTKLDFWLQRIDQAPLKPLQKTDILKTYTIPRLIYIADHSEVKSALLETLDQKIRTAVKEWLHLPPCTCDAILYSSTRDGGLGITKLAGLIPSVQARRLHRIAQSSDDTMKCFMEKEKMEQLHKKLWIQAGGDRENIPSIWEAPPSSEPPNNVSTNSEWEAPTQKDKFPKPCNWRKNEFKKWTKLASQGRGIVNFERDKISNHWIQYYRRIPHRKLLTALQLRANVYPTREFLARGRQDQYIKACRHCDADNESCAHIIGNCPVTQDARIKRHNYICELLLEEAKKKDWVVFKEPHIRDSNKELYKPDLIFVKDGRALVVDVTVRYEAAKSSLEEAAAEKVRKYKHLETEVRHLTNAKDVTFVGFPLGARGKWHQDNFKLLTELGLSKSRQVKMAETFSTVALFSSVDIVHMFASRARKSMVM

SEQ ID NO: 713 - protein, 1732 aa, synthetic construct
MAQRGHSYHGPQIKVDHSREKENAPEGPTQKGLREAREQNKCKTKMKGNTKDSEFPIDMQPNPNLNVSKPKKKRKVNISGSSCGSPNSADTSSDFKDLWTKLKECHDREVQGLQVKVTKLKQERILDAQRLEEFFTKNQQLREQQKVLHETIKVLEDRLRAGLCDRCAVTEEHMRKKQQEFENIRQQNLKLITELMNERNTLQEENKKLSEQLQQKIENDQQHQAAELECEEDVIPDSPITAFSFSGVNRLRRKENPHVRYIEQTHTKLEHSVCANEMRKVSKSSTHPQHNPNENEILVADTYDQSQSPMAKAHGTSSYTPDKSSFNLATVVAETLGLGVQEESETQGPMSPLGDELYHCLEGNHKKQPFESGSETPGTSESATPEGSPKRKVSSAEGAAKEEPKRRSARLSAKPPAKVEAKPKKAAAKDKSSDKKVQTKGKRGAKGKQAEVANQETKEDLPAENGETKTEESPASDEAGEKEAKSDSGSETPGTSESATPESYEQLAPQPCVGETLHSSLPRDSELFVPEEGSSEKESEDAPKTSPPTPGKHGLEQTGEEKVMVTVPDKNPPCPCCGTRVNSVLNLIEHLKVSHGKRGVCFRCAKCGKENSNYHSVVCHFKKCRGPETEKAPAGEWICEVCNRDFTTKIGLGQHKRLAHPAVRNQERIVASQPKETSNRGAHKRCWTKEEEELLIRLEAQFEGNKNINKLIAEHITTKTAKQISDKRRLLSRKPAEEPREEPGTCHHTRRAAASLRTEPEMSHHAQAEDRDNGPGRRPLPGRAAAGGRTMDEIRRHPDKGNGQQRPTKQKSEEQLQAYYKKTLEERLSAGALNTFPRAFKQVMEGRDIKLVINQTAQDCFGCLESISQIRTATRDKKDTVTREKHPKKPFQKWMKKRAIKKGNYLRFQRLFYLDRGKLAKIILDDIECLSCDIPLSEIYSVFKTRWETTGSFKSLGDFKTYGKADNTAFRELITAKEIEKNVQEMSKGSAPGPDGITLGDVVKMDPEFSRTMEIFNLWLTTGKIPDMVRGCRTVLIPKSSKPDRLKDINNWRPITIGSILLRLFSRIVTARLSKACPLNPRQRGFIRAAGCSENLKLLQTIIWSAKREHRPLGVVFVDIAKAFDTVSHQHIIHALQQREVDPHIVGLVSNMYENISTYITTKRNTHTDKIQIRVGVKQGDPMSPLLFNLAMDPLLCKLEESGKGYHRGQSSITAMAFADDLVLLSDSWENMNTNISILETFCNLTGLKTQGQKCHGFYIKPTKKSYTINDCAAWTINGTPLNMIDPGESEKYLGLQFDPWIGIARSGLSTKLDFWLQRIDQAPLKPLQKTDILKTYTIPRLIYIADHSEVKSALLETLDQKIRTAVKEWLHLPPCTCDAILYSSTRDGGLGITKLAGLIPSVQARRLHRIAQSSDDTMKCFMEKEKMEQLHKKLWIQAGGDRENIPSIWEAPPSSEPPNNVSTNSEWEAPTQKDKFPKPCNWRKNEFKKWTKLASQGRGIVNFERDKISNHWIQYYRRIPHRKLLTALQLRANVYPTREFLARGRQDQYIKACRHCDADNESCAHIIGNCPVTQDARIKRHNYICELLLEEAKKKDWVVFKEPHIRDSNKELYKPDLIFVKDGRALVVDVTVRYEAAKSSLEEAAAEKVRKYKHLETEVRHLTNAKDVTFVGFPLGARGKWHQDNFKLLTELGLSKSRQVKMAETFSTVALFSSVDIVHMFASRARKSMVM

SEQ ID NO: 714 - protein, 1825 aa, synthetic construct
MASCPKPGPPVSAGAMSLESGLTTHSVLAIERGPNSLANSGSDFGGGGLGLPLRLLRVSVGTQTSRSDWVDLVSWSHPGPTSKSQQVDLVSLFPKHRVDLLSKNDQVDLVAQFLPSKFPPNLAENDLALLVNLEFYRSDLHVYECVHFAAHWEGLSGLPEVAPKKKRKVNISGSSCGSPNSADTSSDFKDLWTKLKECHDREVQGLQVKVTKLKQERILDAQRLEEFFTKNQQLREQQKVLHETIKVLEDRLRAGLCDRCAVTEEHMRKKQQEFENIRQQNLKLITELMNERNTLQEENKKLSEQLQQKIENDQQHQAAELECEEDVIPDSPITAFSFSGVNRLRRKENPHVRYIEQTHTKLEHSVCANEMRKVSKSSTHPQHNPNENEILVADTYDQSQSPMAKAHGTSSYTPDKSSFNLATVVAETLGLGVQEESETQGPMSPLGDELYHCLEGNHKKQPFESGSETPGTSESATPEGSPKRKVSSAEGAAKEEPKRRSARLSAKPPAKVEAKPKKAAAKDKSSDKKVQTKGKRGAKGKQAEVANQETKEDLPAENGETKTEESPASDEAGEKEAKSDSGSETPGTSESATPESYEQLAPQPCVGETLHSSLPRDSELFVPEEGSSEKESEDAPKTSPPTPGKHGLEQTGEEKVMVTVPDKNPPCPCCGTRVNSVLNLIEHLKVSHGKRGVCFRCAKCGKENSNYHSVVCHFKKCRGPETEKAPAGEWICEVCNRDFTTKIGLGQHKRLAHPAVRNQERIVASQPKETSNRGAHKRCWTKEEEELLIRLEAQFEGNKNINKLIAEHITTKTAKQISDKRRLLSRKPAEEPREEPGTCHHTRRAAASLRTEPEMSHHAQAEDRDNGPGRRPLPGRAAAGGRTMDEIRRHPDKGNGQQRPTKQKSEEQLQAYYKKTLEERLSAGALNTFPRAFKQVMEGRDIKLVINQTAQDCFGCLESISQIRTATRDKKDTVTREKHPKKPFQKWMKKRAIKKGNYLRFQRLFYLDRGKLAKIILDDIECLSCDIPLSEIYSVFKTRWETTGSFKSLGDFKTYGKADNTAFRELITAKEIEKNVQEMSKGSAPGPDGITLGDVVKMDPEFSRTMEIFNLWLTTGKIPDMVRGCRTVLIPKSSKPDRLKDINNWRPITIGSILLRLFSRIVTARLSKACPLNPRQRGFIRAAGCSENLKLLQTIIWSAKREHRPLGVVFVDIAKAFDTVSHQHIIHALQQREVDPHIVGLVSNMYENISTYITTKRNTHTDKIQIRVGVKQGDPMSPLLFNLAMDPLLCKLEESGKGYHRGQSSITAMAFADDLVLLSDSWENMNTNISILETFCNLTGLKTQGQKCHGFYIKPTKKSYTINDCAAWTINGTPLNMIDPGESEKYLGLQFDPWIGIARSGLSTKLDFWLQRIDQAPLKPLQKTDILKTYTIPRLIYIADHSEVKSALLETLDQKIRTAVKEWLHLPPCTCDAILYSSTRDGGLGITKLAGLIPSVQARRLHRIAQSSDDTMKCFMEKEKMEQLHKKLWIQAGGDRENIPSIWEAPPSSEPPNNVSTNSEWEAPTQKDKFPKPCNWRKNEFKKWTKLASQGRGIVNFERDKISNHWIQYYRRIPHRKLLTALQLRANVYPTREFLARGRQDQYIKACRHCDADNESCAHIIGNCPVTQDARIKRHNYICELLLEEAKKKDWVVFKEPHIRDSNKELYKPDLIFVKDGRALVVDVTVRYEAAKSSLEEAAAEKVRKYKHLETEVRHLTNAKDVTFVGFPLGARGKWHQDNFKLLTELGLSKSRQVKMAETFSTVALFSSVDIVHMFASRARKSMVM

SEQ ID NO: 715 - protein, 1665 aa, synthetic construct
MAPKKKRKVNISGSSCGSPNSADTSSDFKDLWTKLKECHDREVQGLQVKVTKLKQERILDAQRLEEFFTKNQQLREQQKVLHETIKVLEDRLRAGLCDRCAVTEEHMRKKQQEFENIRQQNLKLITELMNERNTLQEENKKLSEQLQQKIENDQQHQAAELECEEDVIPDSPITAFSFSGVNRLRRKENPHVRYIEQTHTKLEHSVCANEMRKVSKSSTHPQHNPNENEILVADTYDQSQSPMAKAHGTSSYTPDKSSFNLATVVAETLGLGVQEESETQGPMSPLGDELYHCLEGNHKKQPFESGSETPGTSESATPEGSPKRKVSSAEGAAKEEPKRRSARLSAKPPAKVEAKPKKAAAKDKSSDKKVQTKGKRGAKGKQAEVANQETKEDLPAENGETKTEESPASDEAGEKEAKSDSGSETPGTSESATPESYEQLAPQPCVGETLHSSLPRDSELFVPEEGSSEKESEDAPKTSPPTPGKHGLEQTGEEKVMVTVPDKNPPCPCCGTRVNSVLNLIEHLKVSHGKRGVCFRCAKCGKENSNYHSVVCHFKKCRGPETEKAPAGEWICEVCNRDFTTKIGLGQHKRLAHPAVRNQERIVASQPKETSNRGAHKRCWTKEEEELLIRLEAQFEGNKNINKLIAEHITTKTAKQISDKRRLLSRKPAEEPREEPGTCHHTRRAAASLRTEPEMSHHAQAEDRDNGPGRRPLPGRAAAGGRTMDEIRRHPDKGNGQQRPTKQKSEEQLQAYYKKTLEERLSAGALNTFPRAFKQVMEGRDIKLVINQTAQDCFGCLESISQIRTATRDKKDTVTREKHPKKPFQKWMKKRAIKKGNYLRFQRLFYLDRGKLAKIILDDIECLSCDIPLSEIYSVFKTRWETTGSFKSLGDFKTYGKADNTAFRELITAKEIEKNVQEMSKGSAPGPDGITLGDVVKMDPEFSRTMEIFNLWLTTGKIPDMVRGCRTVLIPKSSKPDRLKDINNWRPITIGSILLRLFSRIVTARLSKACPLNPRQRGFIRAAGCSENLKLLQTIIWSAKREHRPLGVVFVDIAKAFDTVSHQHIIHALQQREVDPHIVGLVSNMYENISTYITTKRNTHTDKIQIRVGVKQGDPMSPLLFNLAMDPLLCKLEESGKGYHRGQSSITAMAFADDLVLLSDSWENMNTNISILETFCNLTGLKTQGQKCHGFYIKPTKKSYTINDCAAWTINGTPLNMIDPGESEKYLGLQFDPWIGIARSGLSTKLDFWLQRIDQAPLKPLQKTDILKTYTIPRLIYIADHSEVKSALLETLDQKIRTAVKEWLHLPPCTCDAILYSSTRDGGLGITKLAGLIPSVQARRLHRIAQSSDDTMKCFMEKEKMEQLHKKLWIQAGGDRENIPSIWEAPPSSEPPNNVSTNSEWEAPTQKDKFPKPCNWRKNEFKKWTKLASQGRGIVNFERDKISNHWIQYYRRIPHRKLLTALQLRANVYPTREFLARGRQDQYIKACRHCDADNESCAHIIGNCPVTQDARIKRHNYICELLLEEAKKKDWVVFKEPHIRDSNKELYKPDLIFVKDGRALVVDVTVRYEAAKSSLEEAAAEKVRKYKHLETEVRHLTNAKDVTFVGFPLGARGKWHQDNFKLLTELGLSKSRQVKMAETFSTVALFSSVDIVHMFASRARKSMVM

SEQ ID NO: 716 - protein, 1680 aa, synthetic construct
MAKRTADGSEFESPKKKRKVSGGSNISGSSCGSPNSADTSSDFKDLWTKLKECHDREVQGLQVKVTKLKQERILDAQRLEEFFTKNQQLREQQKVLHETIKVLEDRLRAGLCDRCAVTEEHMRKKQQEFENIRQQNLKLITELMNERNTLQEENKKLSEQLQQKIENDQQHQAAELECEEDVIPDSPITAFSFSGVNRLRRKENPHVRYIEQTHTKLEHSVCANEMRKVSKSSTHPQHNPNENEILVADTYDQSQSPMAKAHGTSSYTPDKSSFNLATVVAETLGLGVQEESETQGPMSPLGDELYHCLEGNHKKQPFESGSETPGTSESATPEGSPKRKVSSAEGAAKEEPKRRSARLSAKPPAKVEAKPKKAAAKDKSSDKKVQTKGKRGAKGKQAEVANQETKEDLPAENGETKTEESPASDEAGEKEAKSDSGSETPGTSESATPESYEQLAPQPCVGETLHSSLPRDSELFVPEEGSSEKESEDAPKTSPPTPGKHGLEQTGEEKVMVTVPDKNPPCPCCGTRVNSVLNLIEHLKVSHGKRGVCFRCAKCGKENSNYHSVVCHFKKCRGPETEKAPAGEWICEVCNRDFTTKIGLGQHKRLAHPAVRNQERIVASQPKETSNRGAHKRCWTKEEEELLIRLEAQFEGNKNINKLIAEHITTKTAKQISDKRRLLSRKPAEEPREEPGTCHHTRRAAASLRTEPEMSHHAQAEDRDNGPGRRPLPGRAAAGGRTMDEIRRHPDKGNGQQRPTKQKSEEQLQAYYKKTLEERLSAGALNTFPRAFKQVMEGRDIKLVINQTAQDCFGCLESISQIRTATRDKKDTVTREKHPKKPFQKWMKKRAIKKGNYLRFQRLFYLDRGKLAKIILDDIECLSCDIPLSEIYSVFKTRWETTGSFKSLGDFKTYGKADNTAFRELITAKEIEKNVQEMSKGSAPGPDGITLGDVVKMDPEFSRTMEIFNLWLTTGKIPDMVRGCRTVLIPKSSKPDRLKDINNWRPITIGSILLRLFSRIVTARLSKACPLNPRQRGFIRAAGCSENLKLLQTIIWSAKREHRPLGVVFVDIAKAFDTVSHQHIIHALQQREVDPHIVGLVSNMYENISTYITTKRNTHTDKIQIRVGVKQGDPMSPLLFNLAMDPLLCKLEESGKGYHRGQSSITAMAFADDLVLLSDSWENMNTNISILETFCNLTGLKTQGQKCHGFYIKPTKKSYTINDCAAWTINGTPLNMIDPGESEKYLGLQFDPWIGIARSGLSTKLDFWLQRIDQAPLKPLQKTDILKTYTIPRLIYIADHSEVKSALLETLDQKIRTAVKEWLHLPPCTCDAILYSSTRDGGLGITKLAGLIPSVQARRLHRIAQSSDDTMKCFMEKEKMEQLHKKLWIQAGGDRENIPSIWEAPPSSEPPNNVSTNSEWEAPTQKDKFPKPCNWRKNEFKKWTKLASQGRGIVNFERDKISNHWIQYYRRIPHRKLLTALQLRANVYPTREFLARGRQDQYIKACRHCDADNESCAHIIGNCPVTQDARIKRHNYICELLLEEAKKKDWVVFKEPHIRDSNKELYKPDLIFVKDGRALVVDVTVRYEAAKSSLEEAAAEKVRKYKHLETEVRHLTNAKDVTFVGFPLGARGKWHQDNFKLLTELGLSKSRQVKMAETFSTVALFSSVDIVHMFASRARKSMVM

SEQ ID NO: 717 - protein, 1693 aa, synthetic construct
MPKKKTGARKKAENRREREKQLRASRSTIDLAKSGGSNISGSSCGSPNSADTSSDFKDLWTKLKECHDREVQGLQVKVTKLKQERILDAQRLEEFFTKNQQLREQQKVLHETIKVLEDRLRAGLCDRCAVTEEHMRKKQQEFENIRQQNLKLITELMNERNTLQEENKKLSEQLQQKIENDQQHQAAELECEEDVIPDSPITAFSFSGVNRLRRKENPHVRYIEQTHTKLEHSVCANEMRKVSKSSTHPQHNPNENEILVADTYDQSQSPMAKAHGTSSYTPDKSSFNLATVVAETLGLGVQEESETQGPMSPLGDELYHCLEGNHKKQPFESGSETPGTSESATPEGSPKRKVSSAEGAAKEEPKRRSARLSAKPPAKVEAKPKKAAAKDKSSDKKVQTKGKRGAKGKQAEVANQETKEDLPAENGETKTEESPASDEAGEKEAKSDSGSETPGTSESATPESYEQLAPQPCVGETLHSSLPRDSELFVPEEGSSEKESEDAPKTSPPTPGKHGLEQTGEEKVMVTVPDKNPPCPCCGTRVNSVLNLIEHLKVSHGKRGVCFRCAKCGKENSNYHSVVCHFKKCRGPETEKAPAGEWICEVCNRDFTTKIGLGQHKRLAHPAVRNQERIVASQPKETSNRGAHKRCWTKEEEELLIRLEAQFEGNKNINKLIAEHITTKTAKQISDKRRLLSRKPAEEPREEPGTCHHTRRAAASLRTEPEMSHHAQAEDRDNGPGRRPLPGRAAAGGRTMDEIRRHPDKGNGQQRPTKQKSEEQLQAYYKKTLEERLSAGALNTFPRAFKQVMEGRDIKLVINQTAQDCFGCLESISQIRTATRDKKDTVTREKHPKKPFQKWMKKRAIKKGNYLRFQRLFYLDRGKLAKIILDDIECLSCDIPLSEIYSVFKTRWETTGSFKSLGDFKTYGKADNTAFRELITAKEIEKNVQEMSKGSAPGPDGITLGDVVKMDPEFSRTMEIFNLWLTTGKIPDMVRGCRTVLIPKSSKPDRLKDINNWRPITIGSILLRLFSRIVTARLSKACPLNPRQRGFIRAAGCSENLKLLQTIIWSAKREHRPLGVVFVDIAKAFDTVSHQHIIHALQQREVDPHIVGLVSNMYENISTYITTKRNTHTDKIQIRVGVKQGDPMSPLLFNLAMDPLLCKLEESGKGYHRGQSSITAMAFADDLVLLSDSWENMNTNISILETFCNLTGLKTQGQKCHGFYIKPTKKSYTINDCAAWTINGTPLNMIDPGESEKYLGLQFDPWIGIARSGLSTKLDFWLQRIDQAPLKPLQKTDILKTYTIPRLIYIADHSEVKSALLETLDQKIRTAVKEWLHLPPCTCDAILYSSTRDGGLGITKLAGLIPSVQARRLHRIAQSSDDTMKCFMEKEKMEQLHKKLWIQAGGDRENIPSIWEAPPSSEPPNNVSTNSEWEAPTQKDKFPKPCNWRKNEFKKWTKLASQGRGIVNFERDKISNHWIQYYRRIPHRKLLTALQLRANVYPTREFLARGRQDQYIKACRHCDADNESCAHIIGNCPVTQDARIKRHNYICELLLEEAKKKDWVVFKEPHIRDSNKELYKPDLIFVKDGRALVVDVTVRYEAAKSSLEEAAAEKVRKYKHLETEVRHLTNAKDVTFVGFPLGARGKWHQDNFKLLTELGLSKSRQVKMAETFSTVALFSSVDIVHMFASRARKSMVM

SEQ ID NO: 718 - protein, 1671 aa, synthetic construct
MAPKKKRKVRRRRRRNISGSSCGSPNSADTSSDFKDLWTKLKECHDREVQGLQVKVTKLKQERILDAQRLEEFFTKNQQLREQQKVLHETIKVLEDRLRAGLCDRCAVTEEHMRKKQQEFENIRQQNLKLITELMNERNTLQEENKKLSEQLQQKIENDQQHQAAELECEEDVIPDSPITAFSFSGVNRLRRKENPHVRYIEQTHTKLEHSVCANEMRKVSKSSTHPQHNPNENEILVADTYDQSQSPMAKAHGTSSYTPDKSSFNLATVVAETLGLGVQEESETQGPMSPLGDELYHCLEGNHKKQPFESGSETPGTSESATPEGSPKRKVSSAEGAAKEEPKRRSARLSAKPPAKVEAKPKKAAAKDKSSDKKVQTKGKRGAKGKQAEVANQETKEDLPAENGETKTEESPASDEAGEKEAKSDSGSETPGTSESATPESYEQLAPQPCVGETLHSSLPRDSELFVPEEGSSEKESEDAPKTSPPTPGKHGLEQTGEEKVMVTVPDKNPPCPCCGTRVNSVLNLIEHLKVSHGKRGVCFRCAKCGKENSNYHSVVCHFKKCRGPETEKAPAGEWICEVCNRDFTTKIGLGQHKRLAHPAVRNQERIVASQPKETSNRGAHKRCWTKEEEELLIRLEAQFEGNKNINKLIAEHITTKTAKQISDKRRLLSRKPAEEPREEPGTCHHTRRAAASLRTEPEMSHHAQAEDRDNGPGRRPLPGRAAAGGRTMDEIRRHPDKGNGQQRPTKQKSEEQLQAYYKKTLEERLSAGALNTFPRAFKQVMEGRDIKLVINQTAQDCFGCLESISQIRTATRDKKDTVTREKHPKKPFQKWMKKRAIKKGNYLRFQRLFYLDRGKLAKIILDDIECLSCDIPLSEIYSVFKTRWETTGSFKSLGDFKTYGKADNTAFRELITAKEIEKNVQEMSKGSAPGPDGITLGDVVKMDPEFSRTMEIFNLWLTTGKIPDMVRGCRTVLIPKSSKPDRLKDINNWRPITIGSILLRLFSRIVTARLSKACPLNPRQRGFIRAAGCSENLKLLQTIIWSAKREHRPLGVVFVDIAKAFDTVSHQHIIHALQQREVDPHIVGLVSNMYENISTYITTKRNTHTDKIQIRVGVKQGDPMSPLLFNLAMDPLLCKLEESGKGYHRGQSSITAMAFADDLVLLSDSWENMNTNISILETFCNLTGLKTQGQKCHGFYIKPTKKSYTINDCAAWTINGTPLNMIDPGESEKYLGLQFDPWIGIARSGLSTKLDFWLQRIDQAPLKPLQKTDILKTYTIPRLIYIADHSEVKSALLETLDQKIRTAVKEWLHLPPCTCDAILYSSTRDGGLGITKLAGLIPSVQARRLHRIAQSSDDTMKCFMEKEKMEQLHKKLWIQAGGDRENIPSIWEAPPSSEPPNNVSTNSEWEAPTQKDKFPKPCNWRKNEFKKWTKLASQGRGIVNFERDKISNHWIQYYRRIPHRKLLTALQLRANVYPTREFLARGRQDQYIKACRHCDADNESCAHIIGNCPVTQDARIKRHNYICELLLEEAKKKDWVVFKEPHIRDSNKELYKPDLIFVKDGRALVVDVTVRYEAAKSSLEEAAAEKVRKYKHLETEVRHLTNAKDVTFVGFPLGARGKWHQDNFKLLTELGLSKSRQVKMAETFSTVALFSSVDIVHMFASRARKSMVM

SEQ ID NO: 719 - protein, 1390 aa, synthetic construct
MASCPKPGPPVSAGAMSLESGLTTHSVLAIERGPNSLANSGSDFGGGGLGLPLRLLRVSVGTQTSRSDWVDLVSWSHPGPTSKSQQVDLVSLFPKHRVDLLSKNDQVDLVAQFLPSKFPPNLAENDLALLVNLEFYRSDLHVYECVHFAAHWEGLSGLPEVYEQLAPQPCVGETLHSSLPRDSELFVPEEGSSEKESEDAPKTSPPTPGKHGLEQTGEEKVMVTVPDKNPPCPCCGTRVNSVLNLIEHLKVSHGKRGVCFRCAKCGKENSNYHSVVCHFKKCRGPETEKAPAGEWICEVCNRDFTTKIGLGQHKRLAHPAVRNQERIVASQPKETSNRGAHKRCWTKEEEELLIRLEAQFEGNKNINKLIAEHITTKTAKQISDKRRLLSRKPAEEPREEPGTCHHTRRAAASLRTEPEMSHHAQAEDRDNGPGRRPLPGRAAAGGRTMDEIRRHPDKGNGQQRPTKQKSEEQLQAYYKKTLEERLSAGALNTFPRAFKQVMEGRDIKLVINQTAQDCFGCLESISQIRTATRDKKDTVTREKHPKKPFQKWMKKRAIKKGNYLRFQRLFYLDRGKLAKIILDDIECLSCDIPLSEIYSVFKTRWETTGSFKSLGDFKTYGKADNTAFRELITAKEIEKNVQEMSKGSAPGPDGITLGDVVKMDPEFSRTMEIFNLWLTTGKIPDMVRGCRTVLIPKSSKPDRLKDINNWRPITIGSILLRLFSRIVTARLSKACPLNPRQRGFIRAAGCSENLKLLQTIIWSAKREHRPLGVVFVDIAKAFDTVSHQHIIHALQQREVDPHIVGLVSNMYENISTYITTKRNTHTDKIQIRVGVKQGDPMSPLLFNLAMDPLLCKLEESGKGYHRGQSSITAMAFADDLVLLSDSWENMNTNISILETFCNLTGLKTQGQKCHGFYIKPTKKSYTINDCAAWTINGTPLNMIDPGESEKYLGLQFDPWIGIARSGLSTKLDFWLQRIDQAPLKPLQKTDILKTYTIPRLIYIADHSEVKSALLETLDQKIRTAVKEWLHLPPCTCDAILYSSTRDGGLGITKLAGLIPSVQARRLHRIAQSSDDTMKCFMEKEKMEQLHKKLWIQAGGDRENIPSIWEAPPSSEPPNNVSTNSEWEAPTQKDKFPKPCNWRKNEFKKWTKLASQGRGIVNFERDKISNHWIQYYRRIPHRKLLTALQLRANVYPTREFLARGRQDQYIKACRHCDADNESCAHIIGNCPVTQDARIKRHNYICELLLEEAKKKDWVVFKEPHIRDSNKELYKPDLIFVKDARALVVDVTVRYEAAKSSLEEAAAEKVRKYKHLETEVRHLTNAKDVTFVGFPLGARGKWHQDNFKLLTELGLSKSRQVKMAETFSTVALFSSVDIVHMFASRARKSMVM

SEQ ID NO: 720 - protein, 1390 aa, synthetic construct
MASCPKPGPPVSAGAMSLESGLTTHSVLAIERGPNSLANSGSDFGGGGLGLPLRLLRVSVGTQTSRSDWVDLVSWSHPGPTSKSQQVDLVSLFPKHRVDLLSKNDQVDLVAQFLPSKFPPNLAENDLALLVNLEFYRSDLHVYECVHFAAHWEGLSGLPEVYEQLAPQPCVGETLHSSLPRDSELFVPEEGSSEKESEDAPKTSPPTPGKHGLEQTGEEKVMVTVPDKNPPCPCCGTRVNSVLNLIEHLKVSHGKRGVCFRCAKCGKENSNYHSVVCHFKKCRGPETEKAPAGEWICEVCNRDFTTKIGLGQHKRLAHPAVRNQERIVASQPKETSNRGAHKRCWTKEEEELLIRLEAQFEGNKNINKLIAEHITTKTAKQISDKRRLLSRKPAEEPREEPGTCHHTRRAAASLRTEPEMSHHAQAEDRDNGPGRRPLPGRAAAGGRTMDEIRRHPDKGNGQQRPTKQKSEEQLQAYYKKTLEERLSAGALNTFPRAFKQVMEGRDIKLVINQTAQDCFGCLESISQIRTATRDKKDTVTREKHPKKPFQKWMKKRAIKKGNYLRFQRLFYLDRGKLAKIILDDIECLSCDIPLSEIYSVFKTRWETTGSFKSLGDFKTYGKADNTAFRELITAKEIEKNVQEMSKGSAPGPDGITLGDVVKMDPEFSRTMEIFNLWLTTGKIPDMVRGCRTVLIPKSSKPDRLKDINNWRPITIGSILLRLFSRIVTARLSKACPLNPRQRGFIRAAGCSENLKLLQTIIWSAKREHRPLGVVFVDIAKAFDTVSHQHIIHALQQREVDPHIVGLVSNMYENISTYITTKRNTHTDKIQIRVGVKQGDPMSPLLFNLAMDPLLCKLEESGKGYHRGQSSITAMAFADDLVLLSDSWENMNTNISILETFCNLTGLKTQGQKCHGFYIKPTKKSYTINDCAAWTINGTPLNMIDPGESEKYLGLQFDPWIGIARSGLSTKLDFWLQRIDQAPLKPLQKTDILKTYTIPRLIYIADHSEVKSALLETLDQKIRTAVKEWLHLPPCTCDAILYSSTRDGGLGITKLAGLIPSVQARRLHRIAQSSDDTMKCFMEKEKMEQLHKKLWIQAGGDRENIPSIWEAPPSSEPPNNVSTNSEWEAPTQKDKFPKPCNWRKNEFKKWTKLASQGRGIVNFERDKISNHWIQYYRRIPHRKLLTALQLRANVYPTREFLARGRQDQYIKACRHCDADNESCAHIIGNCPVTQDARIKRHNYICELLLEEAKKKDWVVFKEPHIRDSNKELYKPDLIFVKDGRALVVDVTVRYEAAKSSLEEAAAEKVRKYKHLETEVRHLTNAKDVTFVGFPLGARGKWHQDNFKLLTELGLSKSRQVKMAETFSTVALFSSVDIVHMFASRARKSMVM

SEQ ID NO: 721 - protein, 1665 aa, synthetic construct; identical to SEQ ID NO: 715

SEQ ID NO: 722 - protein, 1665 aa, synthetic construct
MAPKKKRKVNISGSSCGSPNSADTSSDFKDLWTKLKECHDREVQGLQVKVTKLKQERILDAQRLEEFFTKNQQLREQQKVLHETIKVLEDRLRAGLCDRCAVTEEHMRKKQQEFENIRQQNLKLITELMNERNTLQEENKKLSEQLQQKIENDQQHQAAELECEEDVIPDSPITAFSFSGVNRLRRKENPHVRYIEQTHTKLEHSVCANEMRKVSKSSTHPQHNPNENEILVADTYDQSQSPMAKAHGTSSYTPDKSSFNLATVVAETLGLGVQEESETQGPMSPLGDELYHCLEGNHKKQPFESGSETPGTSESATPEGSPKRKVSSAEGAAKEEPKRRSARLSAKPPAKVEAKPKKAAAKDKSSDKKVQTKGKRGAKGKQAEVANQETKEDLPAENGETKTEESPASDEAGEKEAKSDSGSETPGTSESATPESYEQLAPQPCVGETLHSSLPRDSELFVPEEGSSEKESEDAPKTSPPTPGKHGLEQTGEEKVMVTVPDKNPPCPCCGTRVNSVLNLIEHLKVSHGKRGVCFRCAKCGKENSNYHSVVCHFKKCRGPETEKAPAGEWICEVCNRDFTTKIGLGQHKRLAHPAVRNQERIVASQPKETSNRGAHKRCWTKEEEELLIRLEAQFEGNKNINKLIAEHITTKTAKQISDKRRLLSRKPAEEPREEPGTCHHTRRAAASLRTEPEMSHHAQAEDRDNGPGRRPLPGRAAAGGRTMDEIRRHPDKGNGQQRPTKQKSEEQLQAYYKKTLEERLSAGALNTFPRAFKQVMEGRDIKLVINQTAQDCFGCLESISQIRTATRDKKDTVTREKHPKKPFQKWMKKRAIKKGNYLRFQRLFYLDRGKLAKIILDDIECLSCDIPLSEIYSVFKTRWETTGSFKSLGDFKTYGKADNTAFRELITAKEIEKNVQEMSKTSAPGPDGITLGDVVKMDPEFSRTMEIFNLWLTTGKIPDMVRGCRTVLIPKSSKPDRLKDINNWRPITIGSILLRLFSRIVTARLSKACPLNPRQRGFIRAAGCSENLKLLQTIIWSAKREHRPLGVVFVDIAKAFDTVSHQHIIHALQQREVDPHIVGLVSNMYENISTYITTKRNTHTDKIQIRVGVKQGDPMSPLLFNLAMDPLLCKLEESGKGYHRGQSSITAMAFADDLVLLSDSWENMNTNISILETFCNLTGLKTQGQKCHGFYIKPTKKSYTINDCAAWTINGTPLNMIDPGESEKYLGLQFDPWIGIARSGLSTKLDFWLQRIDQAPLKPLQKTDILKTYTIPRLIYIADHSEVKSALLETLDQKIRTAVKEWLHLPPCTCDAILYSSTRDGGLGITKLAGLIPSVQARRLHRIAQSSDDTMKCFMEKEKMEQLHKKLWIQAGGDRENIPSIWEAPPSSEPPNNVSTNSEWEAPTQKDKFPKPCNWRKNEFKKWTKLASQGRGIVNFERDKISNHWIQYYRRIPHRKLLTALQLRANVYPTREFLARGRQDQYIKACRHCDADNESCAHIIGNCPVTQDARIKRHNYICELLLEEAKKKDWVVFKEPHIRDSNKELYKPDLIFVKDGRALVVDVTVRYEAAKSSLEEAAAEKVRKYKHLETEVRHLTNAKDVTFVGFPLGARGKWHQDNFKLLTELGLSKSRQVKMAETFSTVALFSSVDIVHMFASRARKSMVM

SEQ ID NO: 723 - protein, 1665 aa, synthetic construct
MAPKKKRKVNISGSSCGSPNSADTSSDFKDLWTKLKECHDREVQGLQVKVTKLKQERILDAQRLEEFFTKNQQLREQQKVLHETIKVLEDRLRAGLCDRCAVTEEHMRKKQQEFENIRQQNLKLITELMNERNTLQEENKKLSEQLQQKIENDQQHQAAELECEEDVIPDSPITAFSFSGVNRLRRKENPHVRYIEQTHTKLEHSVCANEMRKVSKSSTHPQHNPNENEILVADTYDQSQSPMAKAHGTSSYTPDKSSFNLATVVAETLGLGVQEESETQGPMSPLGDELYHCLEGNHKKQPFESGSETPGTSESATPEGSPKRKVSSAEGAAKEEPKRRSARLSAKPPAKVEAKPKKAAAKDKSSDKKVQTKGKRGAKGKQAEVANQETKEDLPAENGETKTEESPASDEAGEKEAKSDSGSETPGTSESATPESYEQLAPQPCVGETLHSSLPRDSELFVPEEGSSEKESEDAPKTSPPTPGKHGLEQTGEEKVMVTVPDKNPPCPCCGTRVNSVLNLIEHLKVSHGKRGVCFRCAKCGKENSNYHSVVCHFKKCRGPETEKAPAGEWICEVCNRDFTTKIGLGQHKRLAHPAVRNQERIVASQPKETSNRGAHKRCWTKEEEELLIRLEAQFEGNKNINKLIAEHITTKTAKQISDKRRLLSRKPAEEPREEPGTCHHTRRAAASLRTEPEMSHHAQAEDRDNGPGRRPLPGRAAAGGRTMDEIRRHPDKGNGQQRPTKQKSEEQLQAYYKKTLEERLSAGALNTFPRAFKQVMEGRDIKLVINQTAQDCFGCLESISQIRTATRDKKDTVTREKHPKKPFQKWMKKRAIKKGNYLRFQRLFYLDRGKLAKIILDDIECLSCDIPLSEIYSVFKTRWETTGSFKSLGDFKTYGKADNTAFRELITAKEIEKNVQEMSKGSAPGPDGITLGDVVKMDPEFSRTMEIFNLWLTTGKIPDMVRGCRTVLIPKSSKPDRLKDINNWRPITIGSILLRLFSRIVTARLSKACPLNPRQRGFIRAAGCSENLKLLQTIIWSAKREHRPLGVVFVDIAKAFDTVSHQHIIHALQQREVDPHIVGLVSNMYENISTYITTKRNTHTDKIQIRVGVKQGDPMSPLLFNLAMDPLLCKLEESGKGYHRGQSSITAMAFADDLVLLSDSWENMNTNISILETFCNLTGLKTQGQKCHGFYIKPTKKSYTINDCAAWTINGTPLNMIDPGESEKYLGLQFDPWIGIARSGLSTKLDFWLQRIDQAPLKPLQKTVILKTYTIPRLIYIADHSEVKSALLETLDQKIRTAVKEWLHLPPCTCDAILYSSTRDGGLGITKLAGLIPSVQARRLHRIAQSSDDTMKCFMEKEKMEQLHKKLWIQAGGDRENIPSIWEAPPSSEPPNNVSTNSEWEAPTQKDKFPKPCNWRKNEFKKWTKLASQGRGIVNFERDKISNHWIQYYRRIPHRKLLTALQLRANVYPTREFLARGRQDQYIKACRHCDADNESCAHIIGNCPVTQDARIKRHNYICELLLEEAKKKDWVVFKEPHIRDSNKELYKPDLIFVKDGRALVVDVTVRYEAAKSSLEEAAAEKVRKYKHLETEVRHLTNAKDVTFVGFPLGARGKWHQDNFKLLTELGLSKSRQVKMAETFSTVALFSSVDIVHMFASRARKSMVM

SEQ ID NO: 724 - protein, 1665 aa, synthetic construct
MAPKKKRKVNISGSSCGSPNSADTSSDFKDLWTKLKECHDREVQGLQVKVTKLKQERILDAQRLEEFFTKNQQLREQQKVLHETIKVLEDRLRAGLCDRCAVTEEHMRKKQQEFENIRQQNLKLITELMNERNTLQEENKKLSEQLQQKIENDQQHQAAELECEEDVIPDSPITAFSFSGVNRLRRKENPHVRYIEQTHTKLEHSVCANEMRKVSKSSTHPQHNPNENEILVADTYDQSQSPMAKAHGTSSYTPDKSSFNLATVVAETLGLGVQEESETQGPMSPLGDELYHCLEGNHKKQPFESGSETPGTSESATPEGSPKRKVSSAEGAAKEEPKRRSARLSAKPPAKVEAKPKKAAAKDKSSDKKVQTKGKRGAKGKQAEVANQETKEDLPAENGETKTEESPASDEAGEKEAKSDSGSETPGTSESATPESYEQLAPQPCVGETLHSSLPRDSELFVPEEGSSEKESEDAPKTSPPTPGKHGLEQTGEEKVMVTVPDKNPPCPCCGTRVNSVLNLIEHLKVSHGKRGVCFRCAKCGKENSNYHSVVCHFKKCRGPETEKAPAGEWICEVCNRDFTTKIGLGQHKRLAHPAVRNQERIVASQPKETSNRGAHKRCWTKEEEELLIRLEAQFEGNKNINKLIAEHITTKTAKQISDKRRLLSRKPAEEPREEPGTCHHTRRAAASLRTEPEMSHHAQAEDRDNGPGRRPLPGRAAAGGRTMDEIRRHPDKGNGQQRPTKQKSEEQLQAYYKKTLEERLSAGALNTFPRAFKQVMEGRDIKLVINQTAQDCFGCLESISQIRTATRDKKDTVTREKHPKKPFQKWMKKRAIKKGNYLRFQRLFYLDRGKLAKIILDDIECLSCDIPLSEIYSVFKTRWETTGSFKSLGDFKTYGKADNTAFRELITAKEIEKNVQEMSKGSAPGPDGITLGDVVKMDPEFSRTMEIFNLWLTTGKIPDMVRGCRTVLIPKSSKPDRLKDINNWRPITIGSILLRLFSRIVTARLSKACPLNPRQRGFIRAAGCSENLKLLQTIIWSAKREHRPLGVVFVDIAKAFDTVSHQHIIHALQQREVDPHIVGLVSNMYENISTYITTKRNTHTDKIQIRVGVKQGDPMSPLLFNLAMDPLLCKLEESGKGYHRGQSSITAMAFADDLVLLSDSWENMNTNISILETFCNLTGLKTQGQKCHGFYIKPTKKSYTINDCAAWTINGTPLNMIDPGESEKYLGLQFDPWIGIARSGLSTKLDFWLQRIDQAPLKPLQKTRILKTYTIPRLIYIADHSEVKSALLETLDQKIRTAVKEWLHLPPCTCDAILYSSTRDGGLGITKLAGLIPSVQARRLHRIAQSSDDTMKCFMEKEKMEQLHKKLWIQAGGDRENIPSIWEAPPSSEPPNNVSTNSEWEAPTQKDKFPKPCNWRKNEFKKWTKLASQGRGIVNFERDKISNHWIQYYRRIPHRKLLTALQLRANVYPTREFLARGRQDQYIKACRHCDADNESCAHIIGNCPVTQDARIKRHNYICELLLEEAKKKDWVVFKEPHIRDSNKELYKPDLIFVKDGRALVVDVTVRYEAAKSSLEEAAAEKVRKYKHLETEVRHLTNAKDVTFVGFPLGARGKWHQDNFKLLTELGLSKSRQVKMAETFSTVALFSSVDIVHMFASRARKSMVM

SEQ ID NO: 725 - protein, 1665 aa, synthetic construct
MAPKKKRKVNISGSSCGSPNSADTSSDFKDLWTKLKECHDREVQGLQVKVTKLKQERILDAQRLEEFFTKNQQLREQQKVLHETIKVLEDRLRAGLCDRCAVTEEHMRKKQQEFENIRQQNLKLITELMNERNTLQEENKKLSEQLQQKIENDQQHQAAELECEEDVIPDSPITAFSFSGVNRLRRKENPHVRYIEQTHTKLEHSVCANEMRKVSKSSTHPQHNPNENEILVADTYDQSQSPMAKAHGTSSYTPDKSSFNLATVVAETLGLGVQEESETQGPMSPLGDELYHCLEGNHKKQPFESGSETPGTSESATPEGSPKRKVSSAEGAAKEEPKRRSARLSAKPPAKVEAKPKKAAAKDKSSDKKVQTKGKRGAKGKQAEVANQETKEDLPAENGETKTEESPASDEAGEKEAKSDSGSETPGTSESATPESYEQLAPQPCVGETLHSSLPRDSELFVPEEGSSEKESEDAPKTSPPTPGKHGLEQTGEEKVMVTVPDKNPPCPCCGTRVNSVLNLIEHLKVSHGKRGVCFRCAKCGKENSNYHSVVCHFKKCRGPETEKAPAGEWICEVCNRDFTTKIGLGQHKRLAHPAVRNQERIVASQPKETSNRGAHKRCWTKEEEELLIRLEAQFEGNKNINKLIAEHITTKTAKQISDKRRLLSRKPAEEPREEPGTCHHTRRAAASLRTEPEMSHHAQAEDRDNGPGRRPLPGRAAAGGRTMDEIRRHPDKGNGQQRPTKQKSEEQLQAYYKKTLEERLSAGALNTFPRAFKQVMEGRDIKLVINQTAQDCFGCLESISQIRTATRDKKDTVTREKHPKKPFQKWMKKRAIKKGNYLRFQRLFYLDRGKLAKIILDDIECLSCDIPLSEIYSVFKTRWETTGSFKSLGDFKTYGKADNTAFRELITAKEIEKNVQEMSKGSAPGPDGITLGDVVKMDPEFSRTMEIFNLWLTTGKIPDMVRGCRTVLIPKSSKPDRLKDINNWRPITIGSILLRLFSRILTARLSKACPLNPRQRGFIRAAGCSENLKLLQTIIWSAKREHRPLGVVFVDIAKAFDTVSHQHIIHALQQREVDPHIVGLVSNMYENISTYITTKRNTHTDKIQIRVGVKQGDPMSPLLFNLAMDPLLCKLEESGKGYHRGQSSITAMAFADDLVLLSDSWENMNTNISILETFCNLTGLKTQGQKCHGFYIKPTKKSYTINDCAAWTINGTPLNMIDPGESEKYLGLQFDPWIGIARSGLSTKLDFWLQRIDQAPLKPLQKTDILKTYTIPRLIYIADHSEVKSALLETLDQKIRTAVKEWLHLPPCTCDAILYSSTRDGGLGITKLAGLIPSVQARRLHRIAQSSDDTMKCFMEKEKMEQLHKKLWIQAGGDRENIPSIWEAPPSSEPPNNVSTNSEWEAPTQKDKFPKPCNWRKNEFKKWTKLASQGRGIVNFERDKISNHWIQYYRRIPHRKLLTALQLRANVYPTREFLARGRQDQYIKACRHCDADNESCAHIIGNCPVTQDARIKRHNYICELLLEEAKKKDWVVFKEPHIRDSNKELYKPDLIFVKDGRALVVDVTVRYEAAKSSLEEAAAEKVRKYKHLETEVRHLTNAKDVTFVGFPLGARGKWHQDNFKLLTELGLSKSRQVKMAETFSTVALFSSVDIVHMFASRARKSMVM

SEQ ID NO: 726 - protein, 1665 aa, synthetic construct
MAPKKKRKVNISGSSCGSPNSADTSSDFKDLWTKLKECHDREVQGLQVKVTKLKQERILDAQRLEEFFTKNQQLREQQKVLHETIKVLEDRLRAGLCDRCAVTEEHMRKKQQEFENIRQQNLKLITELMNERNTLQEENKKLSEQLQQKIENDQQHQAAELECEEDVIPDSPITAFSFSGVNRLRRKENPHVRYIEQTHTKLEHSVCANEMRKVSKSSTHPQHNPNENEILVADTYDQSQSPMAKAHGTSSYTPDKSSFNLATVVAETLGLGVQEESETQGPMSPLGDELYHCLEGNHKKQPFESGSETPGTSESATPEGSPKRKVSSAEGAAKEEPKRRSARLSAKPPAKVEAKPKKAAAKDKSSDKKVQTKGKRGAKGKQAEVANQETKEDLPAENGETKTEESPASDEAGEKEAKSDSGSETPGTSESATPESYEQLAPQPCVGETLHSSLPRDSELFVPEEGSSEKESEDAPKTSPPTPGKHGLEQTGEEKVMVTVPDKNPPCPCCGTRVNSVLNLIEHLKVSHGKRGVCFRCAKCGKENSNYHSVVCHFKKCRGPETEKAPAGEWICEVCNRDFTTKIGLGQHKRLAHPAVRNQERIVASQPKETSNRGAHKRCWTKEEEELLIRLEAQFEGNKNINKLIAEHITTKTAKQISDKRRLLSRKPAEEPREEPGTCHHTRRAAASLRTEPEMSHHAQAEDRDNGPGRRPLPGRAAAGGRTMDEIRRHPDKGNGQQRPTKQKSEEQLQAYYKKTLEERLSAGALNTFPRAFKQVMEGRDIKLVINQTAQDCFGCLESISQIRTATRDKKDTVTREKHPKKPFQKWMKKRAIKKGNYLRFQRLFHLDRGKLAKIILDDIECLSCDIPLSEIYSVFKTRWETTGSFKSLGDFKTYGKADNTAFRELITAKEIEKNVQEMKKGSAPGPDGITLGDVVKMDPEFSRTMEIFNLWLTTGKIPDMVRGCRTVLIPKSSKPDRLKDINNWRPITIGSILLRLFSRIVTARLSKACPLNPRQRGFIRAAGCSENLKLLQTIIWSAKREHRPLGVVFVDIAKAFDTVSHQHIIHALQQREVDPHIVGLVSNMYENISTYITTKRNTHTDKIQIRVGVKQGDPMSPLLFNLALDPLLCKLEESGKGYHRGQSSITAMAFADDLVLLSDSWENMNTNISILETFCNLTGLKTQGQKCHGFYIKPTKDSYTINDCAAWTINGTPLNMIDPGESEKYLGLQFDPWIGIARSGLSTKLDFWLQRIDQAPLKPLQKTDILKTYTIPRLIYIADHSEVKSALLETLDQKIRTAVKEWLHLPPCTCDAILYSSTRDGGLGITKLAGLIPSVQARRLHRIAQSSDDTMKCFMEKEKMEQLHKKLWIQAGGDRENIPSIWEAPPSSEPPNNVSTNSEWEAPTQKDKFPKPCNWRKNEFKKWTKLASQGRGIVNFERDKISNHWIQYYRRIPHRKLLTALQLRANVYPTREFLARGRQDQYIKACRHCDADNESCAHIIGNCPVTQDARIKRHNYICELLLEEAKKKDWVVFKEPHIRDSNKELYKPDLIFVKDGRALVVDVTVRYEAAKSSLEEAAAEKVRKYKHLETEVRHLTNAKDVTFVGFPLGARGKWHQDNFKLLTELGLSKSRQVKMAETFSTVALFSSVDIVHMFASRARKSMVM

SEQ ID NO: 727 - protein, 1665 aa, synthetic construct
MAPKKKRKVNISGSSCGSPNSADTSSDFKDLWTKLKECHDREVQGLQVKVTKLKQERILDAQRLEEFFTKNQQLREQQKVLHETIKVLEDRLRAGLCDRCAVTEEHMRKKQQEFENIRQQNLKLITELMNERNTLQEENKKLSEQLQQKIENDQQHQAAELECEEDVIPDSPITAFSFSGVNRLRRKENPHVRYIEQTHTKLEHSVCANEMRKVSKSSTHPQHNPNENEILVADTYDQSQSPMAKAHGTSSYTPDKSSFNLATVVAETLGLGVQEESETQGPMSPLGDELYHCLEGNHKKQPFESGSETPGTSESATPEGSPKRKVSSAEGAAKEEPKRRSARLSAKPPAKVEAKPKKAAAKDKSSDKKVQTKGKRGAKGKQAEVANQETKEDLPAENGETKTEESPASDEAGEKEAKSDSGSETPGTSESATPESYEQLAPQPCVGETLHSSLPRDSELFVPEEGSSEKESEDAPKTSPPTPGKHGLEQTGEEKVMVTVPDKNPPCPCCGTRVNSVLNLIEHLKVSHGKRGVCFRCAKCGKENSNYHSVVCHFKKCRGPETEKAPAGEWICEVCNRDFTTKIGLGQHKRLAHPAVRNQERIVASQPKETSNRGAHKRCWTKEEEELLIRLEAQFEGNKNINKLIAEHITTKTAKQISDKRRLLSRKPAEEPREEPGTCHHTRRAAASLRTEPEMSHHAQAEDRDNGPGRRPLPGRAAAGGRTMDEIRRHPDKGNGQQRPTKQKSEEQLQAYYKKTLEERLSAGALNTFPRAFKQVMEGRDIKLVINQTAQDCFGCLESISQIRTATRDKKDTVTREKHPKKPFQKWMKKRAIKKGNYLRFQRLFHLDRGKLAKIILDDIECLSCDIPLSEIYSVFKTRWETTGSFKSLGDFKTYGKADNTAFRELITAKEIEKNVQEMKKGSAPGPDGITLGDVVKMDPEFSRTMEIFNLWLTTGKIPDMVRGCRTVLIPKSSKPDRLKDINNWRPITIGSILLRLFSRIVTARLSKACPLNPRQRGFIRAAGCSENLKLLQTIIWSAKREHRPLAVVFVDIAKAFDTVSHQHIIHALQQREVDPHIVGLVSNMYENISTYITTKRNTHTDKIQIRVGVKQGDPLSPLLFNLALDPLLCKLEESGKGYHRGQSSITAMAFADDLVLLSDSWENMNTNISILETFCNLTGLKTQGQKCHGFYIKPTKDSYTINDCAAWTINGTPLNMIDPGESEKYLGLQFDPWIGIARSGLSTKLDFWLQRIDQAPLKPLQKTDILKTYTIPRLIYIADHSEVKSALLETLDQKIRTAVKEWLHLPPCTCDAILYSSTRDGGLGITKLAGLIPSVQARRLHRIAQSSDDTMKCFMEKEKMEQLHKKLWIQAGGDRENIPSIWEAPPSSEPPNNVSTNSEWEAPTQKDKFPKPCNWRKNEFKKWTKLASQGRGIVNFERDKISNHWIQYYRRIPHRKLLTALQLRANVYPTREFLARGRQDQYIKACRHCDADNESCAHIIGNCPVTQDARIKRHNYICELLLEEAKKKDWVVFKEPHIRDSNKELYKPDLIFVKDGRALVVDVTVRYEAAKSSLEEAAAEKVRKYKHLETEVRHLTNAKDVTFVGFPLGARGKWHQDNFKLLTELGLSKSRQVKMAETFSTVALFSSVDIVHMFASRARKSMVM

SEQ ID NO: 728 - protein, 1665 aa, synthetic construct
MAPKKKRKVNISGSSCGSPNSADTSSDFKDLWTKLKECHDREVQGLQVKVTKLKQERILDAQRLEEFFTKNQQLREQQKVLHETIKVLEDRLRAGLCDRCAVTEEHMRKKQQEFENIRQQNLKLITELMNERNTLQEENKKLSEQLQQKIENDQQHQAAELECEEDVIPDSPITAFSFSGVNRLRRKENPHVRYIEQTHTKLEHSVCANEMRKVSKSSTHPQHNPNENEILVADTYDQSQSPMAKAHGTSSYTPDKSSFNLATVVAETLGLGVQEESETQGPMSPLGDELYHCLEGNHKKQPFESGSETPGTSESATPEGSPKRKVSSAEGAAKEEPKRRSARLSAKPPAKVEAKPKKAAAKDKSSDKKVQTKGKRGAKGKQAEVANQETKEDLPAENGETKTEESPASDEAGEKEAKSDSGSETPGTSESATPESYEQLAPQPCVGETLHSSLPRDSELFVPEEGSSEKESEDAPKTSPPTPGKHGLEQTGEEKVMVTVPDKNPPCPCCGTRVNSVLNLIEHLKVSHGKRGVCFRCAKCGKENSNYHSVVCHFKKCRGPETEKAPAGEWICEVCNRDFTTKIGLGQHKRLAHPAVRNQERIVASQPKETSNRGAHKRCWTKEEEELLIRLEAQFEGNKNINKLIAEHITTKTAKQISDKRRLLSRKPAEEPRMEPGTCHHTRRAAASLRTEPEMSHHAQAEDRDNGPGRRPLPGRAAAGGRTMDEIRRHPDKGNGQQRPTKQKSEEQLQAYYKKTLEERLSAGALNTFPRAFKQVMEGRDIKLVINQTAQDCFGCLESISQIRTATRDKKDTVTREKHPKKPFQKWMKKRAIKKGNYLRFQRLFHLDRGKLAKIILDDIECLSCDIPLSEIYSVFKTRWETTGSFKSLGDFKTYGKADNTAFRELITAKEIEKNVQEMSKGSSPGPDGITLGDVVKMDPEFSRTMEIFNLWLTTGKIPDMVRGCRTVLIPKSSKPDRLKDINNWRPITIGSILLRLFSRIVTARLSKACPLNPRQRGFIRAAGCSENLKLLQTIIWSAKREHRPLGVVFVDIAKAFDTVSHQHIIHALQQREVDPHIVGLVSNMYENISTYITTKRNTHTDKIQIRVGVKQGDPMSPLLFNLALDPLLCKLEESGKGYHRGQSSITAMAFADDLVLLSDSWENMNTNISILETFCNLTGLKTQGQKCHGFYIKPTKKSYTINDCAAWTINGTPLNMIDPGESEKYLGLQFDPWIGIARSGLSTKLDFWLQRIDQAPLKPLQKTDILKTYTIPRLIYIADHSEVKSALLETLDQKIRTAVKEWLHLPPCTCDAILYSSTRDGGLGITKLAGLIPSVQARRLHRIAQSSDDTMKCFMEKEKMEQLHKKLWIQAGGDRENIPSIWEAPPSSEPPNNVSTNSEWEAPTQKDKFPKPCNWRKNEFKKWTKLASQGRGIVNFERDKISNHWIQYYRRIPHRKLLTALQLRANVYPTREFLARGRQDQYIKACRHCDADNESCAHIIGNCPVTQDARIKRHNYICELLLEEAKKKDWVVFKEPHIRDSNKELYKPDLIFVKDGRALVVDVTVRYEAAKSSLEEAAAEKVRKYKHLETEVRHLTNAKDVTFVGFPLGARGKWHQDNFKLLTELGLSKSRQVKMAETFSTVALFSSVDIVHMFASRARKSMVM

SEQ ID NO: 729 - protein, 1665 aa, synthetic construct
MAPKKKRKVNISGSSCGSPNSADTSSDFKDLWTKLKECHDREVQGLQVKVTKLKQERILDAQRLEEFFTKNQQLREQQKVLHETIKVLEDRLRAGLCDRCAVTEEHMRKKQQEFENIRQQNLKLITELMNERNTLQEENKKLSEQLQQKIENDQQHQAAELECEEDVIPDSPITAFSFSGVNRLRRKENPHVRYIEQTHTKLEHSVCANEMRKVSKSSTHPQHNPNENEILVADTYDQSQSPMAKAHGTSSYTPDKSSFNLATVVAETLGLGVQEESETQGPMSPLGDELYHCLEGNHKKQPFESGSETPGTSESATPEGSPKRKVSSAEGAAKEEPKRRSARLSAKPPAKVEAKPKKAAAKDKSSDKKVQTKGKRGAKGKQAEVANQETKEDLPAENGETKTEESPASDEAGEKEAKSDSGSETPGTSESATPESYEQLAPQPCVGETLHSSLPRDSELFVPEEGSSEKESEDAPKTSPPTPGKHGLEQTGEEKVMVTVPFKNPPCPCCGTRVNSVLNLIEHLKVSHGKRGVCFRCAKCGKENSNYHSVVCHFKKCRGPETEKAPAGEWICEVCNRDFTTKIGLGQHKRLAHPAVRNQERIVASQPKETSNRGAHKRCWTKEEEELLIRLEAQFEGNKNINKLIAEHITTKTAKQISDKRRLLSRKPAEEPREEPGTCHHTRRAAASLRTEPEMSHHAQAEDRDNGPGRRPLPGRAAAGGRTMDEIRRHPDKGNGQQRPTKQKSEEQLQAYYKKTLEERLSAGALNTFPRAFKQVMEGRDIKLVINQTAQDCFGCLESISQIRTATRDKKDTVTREKHPKKPFQKWMKKRAIKKGNYLRFQRLFYLDRGKLAKIILDDIECLSCDIPLSEIYSVFKTRWETTGSFKSLGDFKTYGKADNTAFRELITAKEIEKNVQEMSKGSAPGPDGITLGDVVKMDPEFSRTMEIFNLWLTTGKIPDMVRGCRTVLIPKSSKPDRLKDINNWRPITIGSILLRLFSRIVTARLSKACPLNPRQRGFIRAAGCSENLKLLQTIIWSAKREHRPLGVVFVDIAKAFDTVSHQHIIHALQQREVDPHIVGLVSNMYENISTYITTKRNTHTDKIQIRVGVKQGDPMSPLLFNLAMDPLLCKLEESGKGYHRGQSSITAMAFADDLVLLSDSWENMNTNISILETFCNLTGLKTQGQKCHGFYIKPTKDSYTINDCAAWTINGTPLNMIDPGESEKYLGLQFDPWIGIARSGLSTKLDFWLQRIDQAPLKPLQKTDILKTYTIPRLIYIADHSEVKSALLETLDQKIRTAVKEWLHLPPCTCDAILYSSTRDGGLGITKLAGLIPSVQARRLHRIAQSSDDTMKCFMEKEKMEQLHKKLWIQAGGDRENIPSIWEAPPSSEPPNNVSTNSEWEAPTQKDKFPKPCNWRKNEFKKWTKLASQGRGIVNFERDKISNHWIQYYRRIPHRKLLTALQLRANVYPTREFLARGRQDQYIKACRHCDADNESCAHIIGNCPVTQDARIKRHNYICELLLEEAKKKDWVVFKEPHIRDSNKELYKPDLIFVKDGRALVVDVTVRYEAAKSSLEEAAAEKVRKYKHLETEVRHLTNAKDVTFVGFPLGARGKWHQDNFKLLTELGLSKSRQVKMAETFSTVALFSSVDIVHMFASRARKSMVM

SEQ ID NO: 730 - protein, 1665 aa, synthetic construct
MAPKKKRKVNISGSSCGSPNSADTSSDFKDLWTKLKECHDREVQGLQVKVTKLKQERILDAQRLEEFFTKNQQLREQQKVLHETIKVLEDRLRAGLCDRCAVTEEHMRKKQQEFENIRQQNLKLITELMNERNTLQEENKKLSEQLQQKIENDQQHQAAELECEEDVIPDSPITAFSFSGVNRLRRKENPHVRYIEQTHTKLEHSVCANEMRKVSKSSTHPQHNPNENEILVADTYDQSQSPMAKAHGTSSYTPDKSSFNLATVVAETLGLGVQEESETQGPMSPLGDELYHCLEGNHKKQPFESGSETPGTSESATPEGSPKRKVSSAEGAAKEEPKRRSARLSAKPPAKVEAKPKKAAAKDKSSDKKVQTKGKRGAKGKQAEVANQETKEDLPAENGETKTEESPASDEAGEKEAKSDSGSETPGTSESATPESYEQLAPQPCVGETLHSSLPRDSELFVPEEGSSEKESEDAPKTSPPTPGKHGLEQTGEEKVMVTVPDKNPPCPCCGTRVNSVLNLIEHLKVSHGKRGVCFRCAKCGKENSNYHSVVCHFKKCRGPETEKAPAGEWICEVCNRDFTTKIGLGQHKRLAHPAVRNQERIVASQPKETSNRGAHKRCWTKEEEELLIRLEAQFEGNKNINKLIAEHITTKTAKQISDKRRLLSRKPAEEPREEPGTCHHTRRAAASLRTEPEMSHHAQAEDRDNGPGRRPLPGRAAAGGRTMDEIRRHPDKGNGQQRPTKQKSEEQLQAYYKKTLEERLSAGALNTFPRAFKQVMEGRDIKLVINQTAQDCFGCLESISQIRTATRDKKDTVTREKHPKKPFQKWMKKRAIKKGNYLRFQRLFYLDRGKLAKIILDDIECLSCDIPLSEIYSTFKTRWETTGSFKSLGDFKTYGKADNTAFRELITAKEIEKNVQEMSKGSAPGPDGITLGDVVKMDPEFSRTMEIFNLWLTTGKIPDMVRGCRTVLIPKSSKPDRLKDINNWRPITIGSILLRLFSRIVTARLSKACPLNPRQRGFIRAAGCSENLKLLQTIIWSAKREHRPLGVVFVDIAKAFDTVSHQHIIHALQQREVDPHIVGLVSNMYENISTYITTKRNTHTDKIQIRVGVKQGDPMSPLLFNLAMDPLLCKLEESGKGYHRGQSSITAMAFADDLVLLSDSWENMNTNISILETFCNLTGLKTQGQKCHGFYIKPTKDSYTINDCAAWTINGTPLNMIDPGESEKYLGLQFDPWIGIARSGLSTKLDFWLQRIDQAPLKPLQKTDILKTYTIPRLIYIADHSEVKSALLETLDQKIRTAVKEWLHLPPCTCDAILYSSTRDGGLGITKLAGLIPSVQARRLHRIAQSSDDTMKCFMEKEKMEQLHKKLWIQAGGDRENIPSIWEAPPSSEPPNNVSTNSEWEAPTQKDKFPKPCNWRKNEFKKWTKLASQGRGIVNFERDKISNHWIQYYRRIPHRKLLTALQLRANVYPTREFLARGRQDQYIKACRHCDADNESCAHIIGNCPVTQDARIKRHNYICELLLEEAKKKDWVVFKEPHIRDSNKELYKPDLIFVKDGRALVVDVTVRYEAAKSSLEEAAAEKVRKYKHLETEVRHLTNAKDVTFVGFPLGARGKWHQDNFKLLTELGLSKSRQVKMAETFSTVALFSSVDIVHMFASRARKSMVM

SEQ ID NO: 731 - protein, 1665 aa, synthetic construct
MAPKKKRKVNISGSSCGSPNSADTSSDFKDLWTKLKECHDREVQGLQVKVTKLKQERILDAQRLEEFFTKNQQLREQQKVLHETIKVLEDRLRAGLCDRCAVTEEHMRKKQQEFENIRQQNLKLITELMNERNTLQEENKKLSEQLQQKIENDQQHQAAELECEEDVIPDSPITAFSFSGVNRLRRKENPHVRYIEQTHTKLEHSVCANEMRKVSKSSTHPQHNPNENEILVADTYDQSQSPMAKAHGTSSYTPDKSSFNLATVVAETLGLGVQEESETQGPMSPLGDELYHCLEGNHKKQPFESGSETPGTSESATPEGSPKRKVSSAEGAAKEEPKRRSARLSAKPPAKVEAKPKKAAAKDKSSDKKVQTKGKRGAKGKQAEVANQETKEDLPAENGETKTEESPASDEAGEKEAKSDSGSETPGTSESATPESYEQLAPQPCVGETLHSSLPRDSELFVPEEGSSEKESEDAPKTSPPTPGKHGLEQTGEEKVMVTVPDKNPPCPCCGTRVNSVLNLIEHLKVSHGKRGVCFRCAKCGKENSNYHSVVCHFKKCRGPETEKAPAGEWICEVCNRDFTTKIGLGQHKRLAHPAVRNQERIVASQPKETSNRGAHKRCWTKEEEELLIRLEAQFEGNKNINKLIAEHITTKTAKQISDKRRLLSRKPAEEPREEPGTCHHTRRAAASLRTEPEMSHHAQAEDRDNGPGRRPLPGRAAAGGRTEDEIRRHPDKGNGQQRPTKQKSEEQLQAYYKKTLEERLSAGALNTFPRAFKQVMEGRDIKLVINQTAQDCFGCLESISQIRTATRDKKDTVTREKHPKKPFQKWMKKRAIKKGNYLRFQRLFYLDRGKLAKIILDDIECLSCDIPLSEIYSVFKTRWETTGSFKSLGDFKTYGKADNTAFRELITAKEIEKNVQEMSKGSAPGPDGITLGDVVKMDPEFSRTMEIFNLWLTTGKIPDMVRGCRTVLIPKSSKPDRLKDINNWRPITIGSILLRLFSRIVTARLSKACPLNPRQRGFIRAAGCSENLKLLQTIIWSAKREHRPLGVVFVDIAKAFDTVSHQHIIHALQQREVDPHIVGLVSNMYENISTYITTKRNTHTDKIQIRVGVKQGDPMSPLLFNLAMDPLLCKLEESGKGYHRGQSSITAMAFADDLVLLSDSWENMNTNISILETFCNLTGLKTQGQKCHGFYIKPTKDSYTINDCAAWTINGTPLNMIDPGESEKYLGLQFDPWIGIARSGLSTKLDFWLQRIDQAPLKPLQKTDILKTYTIPRLIYIADHSEVKSALLETLDQKIRTAVKEWLHLPPCTCDAILYSSTRDGGLGITKLAGLIPSVQARRLHRIAQSSDDTMKCFMEKEKMEQLHKKLWIQAGGDRENIPSIWEAPPSSEPPNNVSTNSEWEAPTQKDKFPKPCNWRKNEFKKWTKLASQGRGIVNFERDKISNHWIQYYRRIPHRKLLTALQLRANVYPTREFLARGRQDQYIKACRHCDADNESCAHIIGNCPVTQDARIKRHNYICELLLEEAKKKDWVVFKEPHIRDSNKELYKPDLIFVKDGRALVVDVTVRYEAAKSSLEEAAAEKVRKYKHLETEVRHLTNAKDVTFVGFPLGARGKWHQDNFKLLTELGLSKSRQVKMAETFSTVALFSSVDIVHMFASRARKSMVM

SEQ ID NO: 732 - protein, 1665 aa, synthetic construct
MAPKKKRKVNISGSSCGSPNSADTSSDFKDLWTKLKECHDREVQGLQVKVTKLKQERILDAQRLEEFFTKNQQLREQQKVLHETIKVLEDRLRAGLCDRCAVTEEHMRKKQQEFENIRQQNLKLITELMNERNTLQEENKKLSEQLQQKIENDQQHQAAELECEEDVIPDSPITAFSFSGVNRLRRKENPHVRYIEQTHTKLEHSVCANEMRKVSKSSTHPQHNPNENEILVADTYDQSQSPMAKAHGTSSYTPDKSSFNLATVVAETLGLGVQEESETQGPMSPLGDELYHCLEGNHKKQPFESGSETPGTSESATPEGSPKRKVSSAEGAAKEEPKRRSARLSAKPPAKVEAKPKKAAAKDKSSDKKVQTKGKRGAKGKQAEVANQETKEDLPAENGETKTEESPASDEAGEKEAKSDSGSETPGTSESATPESYEQLAPQPCVGETLHSSLPRDSELFVPEEGSSEKESEDAPKTSPPTPGKHGLEQTGEEKVMVTVPDKNPPCPCCGTRVNSVLNLIEHLKVSHGKRGVCFRCAKCGKENSNYHSVVCHFKKCRGPETEKAPAGEWICEVCNRDFTTKIGLGQHKRLAHPAVRNQERIVASQPKETSNRGAHKRCWTKEEEELLIRLEAQFEGNKNINKLIAEHITTKTAKQISDKRRLLSRKPAEEPREEPGTCHHTRRAAASLRTEPEMSHHAQAEDRDNGPGRRPLPGRAAAGGRTMDEIRRHPDKGNGQQRPTKQKSEEQLQAYLKKTLEERLSAGALNTFPRAFKQVMEGRDIKLVINQTAQDCFGCLESISQIRTATRDKKDTVTREKHPKKPFQKWMKKRAIKKGNYLRFQRLFYLDRGKLAKIILDDIECLSCDIPLSEIYSVFKTRWETTGSFKSLGDFKTYGKADNTAFRELITAKEIEKNVQEMSKGSAPGPDGITLGDVVKMDPEFSRTMEIFNLWLTTGKIPDMVRGCRTVLIPKSSKPDRLKDINNWRPITIGSILLRLFSRIVTARLSKACPLNPRQRGFIRAAGCSENLKLLQTIIWSAKREHRPLGVVFVDIAKAFDTVSHQHIIHALQQREVDPHIVGLVSNMYENISTYITTKRNTHTDKIQIRVGVKQGDPMSPLLFNLAMDPLLCKLEESGKGYHRGQSSITAMAFADDLVLLSDSWENMNTNISILETFCNLTGLKTQGQKCHGFYIKPTKDSYTINDCAAWTINGTPLNMIDPGESEKYLGLQFDPWIGIARSGLSTKLDFWLQRIDQAPLKPLQKTDILKTYTIPRLIYIADHSEVKSALLETLDQKIRTAVKEWLHLPPCTCDAILYSSTRDGGLGITKLAGLIPSVQARRLHRIAQSSDDTMKCFMEKEKMEQLHKKLWIQAGGDRENIPSIWEAPPSSEPPNNVSTNSEWEAPTQKDKFPKPCNWRKNEFKKWTKLASQGRGIVNFERDKISNHWIQYYRRIPHRKLLTALQLRANVYPTREFLARGRQDQYIKACRHCDADNESCAHIIGNCPVTQDARIKRHNYICELLLEEAKKKDWVVFKEPHIRDSNKELYKPDLIFVKDGRALVVDVTVRYEAAKSSLEEAAAEKVRKYKHLETEVRHLTNAKDVTFVGFPLGARGKWHQDNFKLLTELGLSKSRQVKMAETFSTVALFSSVDIVHMFASRARKSMVM

SEQ ID NO: 733 - protein, 1665 aa, synthetic construct
MAPKKKRKVNISGSSCGSPNSADTSSDFKDLWTKLKECHDREVQGLQVKVTKLKQERILDAQRLEEFFTKNQQLREQQKVLHETIKVLEDRLRAGLCDRCAVTEEHMRKKQQEFENIRQQNLKLITELMNERNTLQEENKKLSEQLQQKIENDQQHQAAELECEEDVIPDSPITAFSFSGVNRLRRKENPHVRYIEQTHTKLEHSVCANEMRKVSKSSTHPQHNPNENEILVADTYDQSQSPMAKAHGTSSYTPDKSSFNLATVVAETLGLGVQEESETQGPMSPLGDELYHCLEGNHKKQPFESGSETPGTSESATPEGSPKRKVSSAEGAAKEEPKRRSARLSAKPPAKVEAKPKKAAAKDKSSDKKVQTKGKRGAKGKQAEVANQETKEDLPAENGETKTEESPASDEAGEKEAKSDSGSETPGTSESATPESYEQLAPQPCVGETLHSSLPRDSELFVPEEGSSEKESEDAPKTSPPTPGKHGLEQTGEEKVMVTVPDKNPPCPCCGTRVNSVLNLIEHLKVSHGKRGVCFRCAKCGKENSNYHSVVCHFKKCRGPETEKAPAGEWICEVCNRDFTTKIGLGQHKRLAHPAVRNQERIVASQPKETSNRGAHKRCWTKEEEELLIRLEAQFEGNKNINKLIAEHITTKTAKQISDKRRLLSRKPAEEPREEPGTCHHTRRAAASLRTEPEMSHHAQAEDRDNGPGRRPLPGRAAAGGRTMDEIRRHPDKGNGQQRPTKQKSEEQLQAYYKKTLEERLSAGALNTFPRAFKQVMEGRDIKLVINQTAQDCFGCLESISQIRTATRDKKDTVTREKHPKKPFQKWMKKRAIKKGNYLRFQRLFYLDRGKLAKIILDDIECLSCDIPLSEIYSVFKTRWETTGSFKSLGDFKTYGKADNTAFRELITAKEIEKNVQEMSKGSAPGPDGITLGDVVKMDPEFSRTSEIFNLWLTTGKIPDMVRGCRTVLIPKSSKPDRLKDINNWRPITIGSILLRLFSRIVTARLSKACPLNPRQRGFIRAAGCSENLKLLQTIIWSAKREHRPLGVVFVDIAKAFDTVSHQHIIHALQQREVDPHIVGLVSNMYENISTYITTKRNTHTDKIQIRVGVKQGDPMSPLLFNLAMDPLLCKLEESGKGYHRGQSSITAMAFADDLVLLSDSWENMNTNISILETFCNLTGLKTQGQKCHGFYIKPTKDSYTINDCAAWTINGTPLNMIDPGESEKYLGLQFDPWIGIARSGLSTKLDFWLQRIDQAPLKPLQKTDILKTYTIPRLIYIADHSEVKSALLETLDQKIRTAVKEWLHLPPCTCDAILYSSTRDGGLGITKLAGLIPSVQARRLHRIAQSSDDTMKCFMEKEKMEQLHKKLWIQAGGDRENIPSIWEAPPSSEPPNNVSTNSEWEAPTQKDKFPKPCNWRKNEFKKWTKLASQGRGIVNFERDKISNHWIQYYRRIPHRKLLTALQLRANVYPTREFLARGRQDQYIKACRHCDADNESCAHIIGNCPVTQDARIKRHNYICELLLEEAKKKDWVVFKEPHIRDSNKELYKPDLIFVKDGRALVVDVTVRYEAAKSSLEEAAAEKVRKYKHLETEVRHLTNAKDVTFVGFPLGARGKWHQDNFKLLTELGLSKSRQVKMAETFSTVALFSSVDIVHMFASRARKSMVM

SEQ ID NO: 734 - protein, 1665 aa, synthetic construct
MAPKKKRKVNISGSSCGSPNSADTSSDFKDLWTKLKECHDREVQGLQVKVTKLKQERILDAQRLEEFFTKNQQLREQQKVLHETIKVLEDRLRAGLCDRCAVTEEHMRKKQQEFENIRQQNLKLITELMNERNTLQEENKKLSEQLQQKIENDQQHQAAELECEEDVIPDSPITAFSFSGVNRLRRKENPHVRYIEQTHTKLEHSVCANEMRKVSKSSTHPQHNPNENEILVADTYDQSQSPMAKAHGTSSYTPDKSSFNLATVVAETLGLGVQEESETQGPMSPLGDELYHCLEGNHKKQPFESGSETPGTSESATPEGSPKRKVSSAEGAAKEEPKRRSARLSAKPPAKVEAKPKKAAAKDKSSDKKVQTKGKRGAKGKQAEVANQETKEDLPAENGETKTEESPASDEAGEKEAKSDSGSETPGTSESATPESYEQLAPQPCVGETLHSSLPRDSELFVPEEGSSEKESEDAPKTSPPTPGKHGLEQTGEEKVMVTVPDKNPPCPCCGTRVNSVLNLIEHLKVSHGKRGVCFRCAKCGKENSNYHSVVCHFKKCRGPETEKAPAGEWICEVCNRDFTTKIGLGQHKRLAHPAVRNQERIVASQPKETSNRGAHKRCWTKEEEELLIRLEAQFEGNKNINKLIAEHITTKTAKQISDKRRLLSRKPAEEPREEPGTCHHTRRAAASLRTEPEMSHHAQAEDRDNGPGRRPLPGRAAAGGRTMDEIRRHPDKGNGQQRPTKQKSEEQLQAYYKKTLEERLSAGALNTFPRAFKQVMEGRDIKLVINQTAQDCFGCLESISQIRTATRDKKDTVTREKHPKKPFQKWMKKRAIKKGNYLRFQRLFYLDRGKLAKIILDDIECLSCDIPLSEIYSVFKTRWETTGSFKSLGDFKTYGKADNTAFRELITAKEIEKNVQEMSKGSAPGPDGITLGDVVKMDPEFSFTMEIFNLWLTTGKIPDMVRGCRTVLIPKSSKPDRLKDINNWRPITIGSILLRLFSRIVTARLSKACPLNPRQRGFIRAAGCSENLKLLQTIIWSAKREHRPLGVVFVDIAKAFDTVSHQHIIHALQQREVDPHIVGLVSNMYENISTYITTKRNTHTDKIQIRVGVKQGDPMSPLLFNLAMDPLLCKLEESGKGYHRGQSSITAMAFADDLVLLSDSWENMNTNISILETFCNLTGLKTQGQKCHGFYIKPTKDSYTINDCAAWTINGTPLNMIDPGESEKYLGLQFDPWIGIARSGLSTKLDFWLQRIDQAPLKPLQKTDILKTYTIPRLIYIADHSEVKSALLETLDQKIRTAVKEWLHLPPCTCDAILYSSTRDGGLGITKLAGLIPSVQARRLHRIAQSSDDTMKCFMEKEKMEQLHKKLWIQAGGDRENIPSIWEAPPSSEPPNNVSTNSEWEAPTQKDKFPKPCNWRKNEFKKWTKLASQGRGIVNFERDKISNHWIQYYRRIPHRKLLTALQLRANVYPTREFLARGRQDQYIKACRHCDADNESCAHIIGNCPVTQDARIKRHNYICELLLEEAKKKDWVVFKEPHIRDSNKELYKPDLIFVKDGRALVVDVTVRYEAAKSSLEEAAAEKVRKYKHLETEVRHLTNAKDVTFVGFPLGARGKWHQDNFKLLTELGLSKSRQVKMAETFSTVALFSSVDIVHMFASRARKSMVM

SEQ ID NO: 735 - protein, 1665 aa, synthetic construct
MAPKKKRKVNISGSSCGSPNSADTSSDFKDLWTKLKECHDREVQGLQVKVTKLKQERILDAQRLEEFFTKNQQLREQQKVLHETIKVLEDRLRAGLCDRCAVTEEHMRKKQQEFENIRQQNLKLITELMNERNTLQEENKKLSEQLQQKIENDQQHQAAELECEEDVIPDSPITAFSFSGVNRLRRKENPHVRYIEQTHTKLEHSVCANEMRKVSKSSTHPQHNPNENEILVADTYDQSQSPMAKAHGTSSYTPDKSSFNLATVVAETLGLGVQEESETQGPMSPLGDELYHCLEGNHKKQPFESGSETPGTSESATPEGSPKRKVSSAEGAAKEEPKRRSARLSAKPPAKVEAKPKKAAAKDKSSDKKVQTKGKRGAKGKQAEVANQETKEDLPAENGETKTEESPASDEAGEKEAKSDSGSETPGTSESATPESYEQLAPQPCVGETLHSSLPRDSELFVPEEGSSEKESEDAPKTSPPTPGKHGLEQTGEEKVMVTVPDKNPPCPCCGTRVNSVLNLIEHLKVSHGKRGVCFRCAKCGKENSNYHSVVCHFKKCRGPETEKAPAGEWICEVCNRDFTTKIGLGQHKRLAHPAVRNQERIVASQPKETSNRGAHKRCWTKEEEELLIRLEAQFEGNKNINKLIAEHITTKTAKQISDKRRLLSRKPAEEPREEPGTCHHTRRAAASLRTEPETSHHAQAEDRDNGPGRRPLPGRAAAGGRTMDEIRRHPDKGNGQQRPTKQKSEEQLQAYYKKTLEERLSAGALNTFPRAFKQVMEGRDIKLVINQTAQDCFGCLESISQIRTATRDKKDTVTREKHPKKPFQKWMKKRAIKKGNYLRFQRLFYLDRGKLAKIILDDIECLSCDIPLSEIYSVFKTRWETTGSFKSLGDFKTYGKADNTAFRELITAKEIEKNVQEMSKGSAPGPDGITLGDVVKMDPEFSRTMEIFNLWLTTGKIPDMVRGCRTVLIPKSSKPDRLKDINNWRPITIGSILLRLFSRIVTARLSKACPLNPRQRGFIRAAGCSENLKLLQTIIWSAKREHRPLGVVFVDIAKAFDTVSHQHIIHALQQREVDPHIVGLVSNMYENISTYITTKRNTHTDKIQIRVGVKQGDPMSPLLFNLAMDPLLCKLEESGKGYHRGQSSITAMAFADDLVLLSDSWENMNTNISILETFCNLTGLKTQGQKCHGFYIKPTKDSYTINDCAAWTINGTPLNMIDPGESEKYLGLQFDPWIGIARSGLSTKLDFWLQRIDQAPLKPLQKTDILKTYTIPRLIYIADHSEVKSALLETLDQKIRTAVKEWLHLPPCTCDAILYSSTRDGGLGITKLAGLIPSVQARRLHRIAQSSDDTMKCFMEKEKMEQLHKKLWIQAGGDRENIPSIWEAPPSSEPPNNVSTNSEWEAPTQKDKFPKPCNWRKNEFKKWTKLASQGRGIVNFERDKISNHWIQYYRRIPHRKLLTALQLRANVYPTREFLARGRQDQYIKACRHCDADNESCAHIIGNCPVTQDARIKRHNYICELLLEEAKKKDWVVFKEPHIRDSNKELYKPDLIFVKDGRALVVDVTVRYEAAKSSLEEAAAEKVRKYKHLETEVRHLTNAKDVTFVGFPLGARGKWHQDNFKLLTELGLSKSRQVKMAETFSTVALFSSVDIVHMFASRARKSMVM

SEQ ID NO: 736 - protein, 1665 aa, synthetic construct
MAPKKKRKVNISGSSCGSPNSADTSSDFKDLWTKLKECHDREVQGLQVKVTKLKQERILDAQRLEEFFTKNQQLREQQKVLHETIKVLEDRLRAGLCDRCAVTEEHMRKKQQEFENIRQQNLKLITELMNERNTLQEENKKLSEQLQQKIENDQQHQAAELECEEDVIPDSPITAFSFSGVNRLRRKENPHVRYIEQTHTKLEHSVCANEMRKVSKSSTHPQHNPNENEILVADTYDQSQSPMAKAHGTSSYTPDKSSFNLATVVAETLGLGVQEESETQGPMSPLGDELYHCLEGNHKKQPFESGSETPGTSESATPEGSPKRKVSSAEGAAKEEPKRRSARLSAKPPAKVEAKPKKAAAKDKSSDKKVQTKGKRGAKGKQAEVANQETKEDLPAENGETKTEESPASDEAGEKEAKSDSGSETPGTSESATPESYEQLAPQPCVGETLHSSLPRDSELFVPEEGSSEKESEDAPKTSPPTPGKHGLEQTGEEKVMVTVPDKNPPCPCCGTRVNSVLNLIEHLKVSHGKRGVCFRCAKCGKENSNYHSVVCHFKKCRGPETEKAPAGEWICEVCNRDFTTKIGLGQHKRLAHPAVRNQERIVASQPKETSNRGAHKRCWTKEEEELLIRLEAQFEGNKNINKLIAEHITTKTAKQISDKRRLLSRKPAEEPREEPGTCHHTRRAAASLRTEPEMSHHAQAEDRDNGPGRRPLPGRAAAGGRTMDEIRRHPDKGNGQQRPTKQKSEEQLQAYYKKTLEERLSAGALNTFPRAFKQVMEGRDIKLVINQTAQDCFGCLESISQIRTATRDKKDTVTREKHPKKPFQKWMKKRAIKKGNYLRFQRLFYLDRGKLAKIILDDIECLSCDIPLSEIYSVFKTRWETTGSFKSLGDFKTYGKADNTAFRELITAKEIEKNVQEMSKGSAPGPDGITLGDVVKMDPEFSRTMEIFNLWLTTGKIPDMVRGCRTVLIPKSSKPDRLKDINNWRPITIGSILLRLFSRIVTARLSKACPLNPRQRGFIRAAGCSENLKLLQTIIWSAKREHRPLGVVFVDIAKAFDTVSHQHIIHALQQREVDPHIVGLVSNMYENISTYITTKRNTHTDKIQIRVGVKQGDPMSPLLFNLAMDPLLCKLEESGKGYHRGQSSITAMAFADDLVLLSDSWENMNTNISILETFCNLTGLKTQGQKCHGFYIKPTKDSYTINDCAAWTINGTPLNMIDPGESEKYLGLQFDPWIGIARSGLSTKLDFWLQRIDQAPLKPLQKTDILKTYTIPRLIYIADHSEVKSALLETLDQKIRTAVKEWLHLPPCTCDAILYSSTRDGGLGITKLAGLIPSVQARRLHRIAQSSDDTMKCFMEKEKMEQLHKKLWIQAGGDRENIPSIWEAPPSSEPPNNVSTNSEWEAPTQKDKFPKPCNWRKNEFKKWTKLASQGRGIVNFERDKISNHWIQYYRRIPHRKLLTALQLRANVYPTREFLARGRQDQYIKACRHCDADNESCAHIIGNCPVTQDARIKRHNYICELLLEEAKKKDWVVFKEPHIRDSNKELYKPDLIFVKDGRALVVDVTVRYEAAKSSLEEAAAEKVRKYKHLETEVRHLTNAKDVTFVGFPLGARGKWHQDNFKLLTELGLSKSRQVKMAETFSRVALFSSVDIVHMFASRARKSMVM

SEQ ID NO: 737 - protein, 1665 aa, synthetic construct
MAPKKKRKVNISGSSCGSPNSADTSDDFKDLWTKLKECHDREVQGLQVKVTKLKQERILDAQRLEEFFTKNQQLREQQKVLHETIKVLEDRLRAGLCDRCAVTEEHMRKKQQEFENIRQQNLKLITELMNERNTLQEENKKLSEQLQQKIENDQQHQAAELECEEDVIPDSPITAFSFSGVNRLRRKENPHVRYIEQTHTKLEHSVCANEMRKVSKSSTHPQHNPNENEILVADTYDQSQSPMAKAHGTSSYTPDKSSFNLATVVAETLGLGVQEESETQGPMSPLGDELYHCLEGNHKKQPFESGSETPGTSESATPEGSPKRKVSSAEGAAKEEPKRRSARLSAKPPAKVEAKPKKAAAKDKSSDKKVQTKGKRGAKGKQAEVANQETKEDLPAENGETKTEESPASDEAGEKEAKSDSGSETPGTSESATPESYEQLAPQPCVGETLHSSLPRDSELFVPEEGSSEKESEDAPKTSPPTPGKHGLEQTGEEKVMVTVPDKNPPCPCCGTRVNSVLNLIEHLKVSHGKRGVCFRCAKCGKENSNYHSVVCHFKKCRGPETEKAPAGEWICEVCNRDFTTKIGLGQHKRLAHPAVRNQERIVASQPKETSNRGAHKRCWTKEEEELLIRLEAQFEGNKNINKLIAEHITTKTAKQISDKRRLLSRKPAEEPREEPGTCHHTRRAAASLRTEPEMSHHAQAEDRDNGPGRRPLPGRAAAGGRTMDEIRRHPDKGNGQQRPTKQKSEEQLQAYYKKTLEERLSAGALNTFPRAFKQVMEGRDIKLVINQTAQDCFGCLESISQIRTATRDKKDTVTREKHPKKPFQKWMKKRAIKKGNYLRFQRLFYLDRGKLAKIILDDIECLSCDIPLSEIYSVFKTRWETTGSFKSLGDFKTYGKADNTAFRELITAKEIEKNVQEMSKGSAPGPDGITLGDVVKMDPEFSRTMEIFNLWLTTGKIPDMVRGCRTVLIPKSSKPDRLKDINNWRPITIGSILLRLFSRIVTARLSKACPLNPRQRGFIRAAGCSENLKLLQTIIWSAKREHRPLGVVFVDIAKAFDTVSHQHIIHALQQREVDPHIVGLVSNMYENISTYITTKRNTHTDKIQIRVGVKQGDPMSPLLFNLAMDPLLCKLEESGKGYHRGQSSITAMAFADDLVLLSDSWENMNTNISILETFCNLTGLKTQGQKCHGFYIKPTKDSYTINDCAAWTINGTPLNMIDPGESEKYLGLQFDPWIGIARSGLSTKLDFWLQRIDQAPLKPLQKTDILKTYTIPRLIYIADHSEVKSALLETLDQKIRTAVKEWLHLPPCTCDAILYSSTRDGGLGITKLAGLIPSVQARRLHRIAQSSDDTMKCFMEKEKMEQLHKKLWIQAGGDRENIPSIWEAPPSSEPPNNVSTNSEWEAPTQKDKFPKPCNWRKNEFKKWTKLASQGRGIVNFERDKISNHWIQYYRRIPHRKLLTALQLRANVYPTREFLARGRQDQYIKACRHCDADNESCAHIIGNCPVTQDARIKRHNYICELLLEEAKKKDWVVFKEPHIRDSNKELYKPDLIFVKDGRALVVDVTVRYEAAKSSLEEAAAEKVRKYKHLETEVRHLTNAKDVTFVGFPLGARGKWHQDNFKLLTELGLSKSRQVKMAETFSTVALFSSVDIVHMFASRARKSMVM

SEQ ID NO: 738 - protein, 1665 aa, synthetic construct
MAPKKKRKVNISGSSCGSPNSADTSSCFKDLWTKLKECHDREVQGLQVKVTKLKQERILDAQRLEEFFTKNQQLREQQKVLHETIKVLEDRLRAGLCDRCAVTEEHMRKKQQEFENIRQQNLKLITELMNERNTLQEENKKLSEQLQQKIENDQQHQAAELECEEDVIPDSPITAFSFSGVNRLRRKENPHVRYIEQTHTKLEHSVCANEMRKVSKSSTHPQHNPNENEILVADTYDQSQSPMAKAHGTSSYTPDKSSFNLATVVAETLGLGVQEESETQGPMSPLGDELYHCLEGNHKKQPFESGSETPGTSESATPEGSPKRKVSSAEGAAKEEPKRRSARLSAKPPAKVEAKPKKAAAKDKSSDKKVQTKGKRGAKGKQAEVANQETKEDLPAENGETKTEESPASDEAGEKEAKSDSGSETPGTSESATPESYEQLAPQPCVGETLHSSLPRDSELFVPEEGSSEKESEDAPKTSPPTPGKHGLEQTGEEKVMVTVPDKNPPCPCCGTRVNSVLNLIEHLKVSHGKRGVCFRCAKCGKENSNYHSVVCHFKKCRGPETEKAPAGEWICEVCNRDFTTKIGLGQHKRLAHPAVRNQERIVASQPKETSNRGAHKRCWTKEEEELLIRLEAQFEGNKNINKLIAEHITTKTAKQISDKRRLLSRKPAEEPREEPGTCHHTRRAAASLRTEPEMSHHAQAEDRDNGPGRRPLPGRAAAGGRTMDEIRRHPDKGNGQQRPTKQKSEEQLQAYYKKTLEERLSAGALNTFPRAFKQVMEGRDIKLVINQTAQDCFGCLESISQIRTATRDKKDTVTREKHPKKPFQKWMKKRAIKKGNYLRFQRLFYLDRGKLAKIILDDIECLSCDIPLSEIYSVFKTRWETTGSFKSLGDFKTYGKADNTAFRELITAKEIEKNVQEMSKGSAPGPDGITLGDVVKMDPEFSRTMEIFNLWLTTGKIPDMVRGCRTVLIPKSSKPDRLKDINNWRPITIGSILLRLFSRIVTARLSKACPLNPRQRGFIRAAGCSENLKLLQTIIWSAKREHRPLGVVFVDIAKAFDTVSHQHIIHALQQREVDPHIVGLVSNMYENISTYITTKRNTHTDKIQIRVGVKQGDPMSPLLFNLAMDPLLCKLEESGKGYHRGQSSITAMAFADDLVLLSDSWENMNTNISILETFCNLTGLKTQGQKCHGFYIKPTKDSYTINDCAAWTINGTPLNMIDPGESEKYLGLQFDPWIGIARSGLSTKLDFWLQRIDQAPLKPLQKTDILKTYTIPRLIYIADHSEVKSALLETLDQKIRTAVKEWLHLPPCTCDAILYSSTRDGGLGITKLAGLIPSVQARRLHRIAQSSDDTMKCFMEKEKMEQLHKKLWIQAGGDRENIPSIWEAPPSSEPPNNVSTNSEWEAPTQKDKFPKPCNWRKNEFKKWTKLASQGRGIVNFERDKISNHWIQYYRRIPHRKLLTALQLRANVYPTREFLARGRQDQYIKACRHCDADNESCAHIIGNCPVTQDARIKRHNYICELLLEEAKKKDWVVFKEPHIRDSNKELYKPDLIFVKDGRALVVDVTVRYEAAKSSLEEAAAEKVRKYKHLETEVRHLTNAKDVTFVGFPLGARGKWHQDNFKLLTELGLSKSRQVKMAETFSTVALFSSVDIVHMFASRARKSMVM

SEQ ID NO: 739 - protein, 1665 aa, synthetic construct
MAPKKKRKVNISGSSCGSPNSADTSSDFKDLWTKLKECHDREVQGLQVKVTKLKTERILDAQRLEEFFTKNQQLREQQKVLHETIKVLEDRLRAGLCDRCAVTEEHMRKKQQEFENIRQQNLKLITELMNERNTLQEENKKLSEQLQQKIENDQQHQAAELECEEDVIPDSPITAFSFSGVNRLRRKENPHVRYIEQTHTKLEHSVCANEMRKVSKSSTHPQHNPNENEILVADTYDQSQSPMAKAHGTSSYTPDKSSFNLATVVAETLGLGVQEESETQGPMSPLGDELYHCLEGNHKKQPFESGSETPGTSESATPEGSPKRKVSSAEGAAKEEPKRRSARLSAKPPAKVEAKPKKAAAKDKSSDKKVQTKGKRGAKGKQAEVANQETKEDLPAENGETKTEESPASDEAGEKEAKSDSGSETPGTSESATPESYEQLAPQPCVGETLHSSLPRDSELFVPEEGSSEKESEDAPKTSPPTPGKHGLEQTGEEKVMVTVPDKNPPCPCCGTRVNSVLNLIEHLKVSHGKRGVCFRCAKCGKENSNYHSVVCHFKKCRGPETEKAPAGEWICEVCNRDFTTKIGLGQHKRLAHPAVRNQERIVASQPKETSNRGAHKRCWTKEEEELLIRLEAQFEGNKNINKLIAEHITTKTAKQISDKRRLLSRKPAEEPREEPGTCHHTRRAAASLRTEPEMSHHAQAEDRDNGPGRRPLPGRAAAGGRTMDEIRRHPDKGNGQQRPTKQKSEEQLQAYYKKTLEERLSAGALNTFPRAFKQVMEGRDIKLVINQTAQDCFGCLESISQIRTATRDKKDTVTREKHPKKPFQKWMKKRAIKKGNYLRFQRLFYLDRGKLAKIILDDIECLSCDIPLSEIYSVFKTRWETTGSFKSLGDFKTYGKADNTAFRELITAKEIEKNVQEMSKGSAPGPDGITLGDVVKMDPEFSRTMEIFNLWLTTGKIPDMVRGCRTVLIPKSSKPDRLKDINNWRPITIGSILLRLFSRIVTARLSKACPLNPRQRGFIRAAGCSENLKLLQTIIWSAKREHRPLGVVFVDIAKAFDTVSHQHIIHALQQREVDPHIVGLVSNMYENISTYITTKRNTHTDKIQIRVGVKQGDPMSPLLFNLAMDPLLCKLEESGKGYHRGQSSITAMAFADDLVLLSDSWENMNTNISILETFCNLTGLKTQGQKCHGFYIKPTKDSYTINDCAAWTINGTPLNMIDPGESEKYLGLQFDPWIGIARSGLSTKLDFWLQRIDQAPLKPLQKTDILKTYTIPRLIYIADHSEVKSALLETLDQKIRTAVKEWLHLPPCTCDAILYSSTRDGGLGITKLAGLIPSVQARRLHRIAQSSDDTMKCFMEKEKMEQLHKKLWIQAGGDRENIPSIWEAPPSSEPPNNVSTNSEWEAPTQKDKFPKPCNWRKNEFKKWTKLASQGRGIVNFERDKISNHWIQYYRRIPHRKLLTALQLRANVYPTREFLARGRQDQYIKACRHCDADNESCAHIIGNCPVTQDARIKRHNYICELLLEEAKKKDWVVFKEPHIRDSNKELYKPDLIFVKDGRALVVDVTVRYEAAKSSLEEAAAEKVRKYKHLETEVRHLTNAKDVTFVGFPLGARGKWHQDNFKLLTELGLSKSRQVKMAETFSTVALFSSVDIVHMFASRARKSMVM

SEQ ID NO: 740 - protein, 1665 aa, synthetic construct
MAPKKKRKVNISGSSCGSPNSADTSSDFKDLWTKLKECHDREVQGLQVKVTKLKQERILDAQRLEEFFTKNQQLREQQKVLHETIKVLEDRLRAGLCDRCAVTEEHMRKKQQEFENIRQQNLKLITELMNERNTLQEENKKLSEQLQQKIENDQQHQAAELECEEDVIPDSPITAFSFSGVNRLRRKENPHVRYIEQTHTKLEHSVSANEMRKVSKSSTHPQHNPNENEILVADTYDQSQSPMAKAHGTSSYTPDKSSFNLATVVAETLGLGVQEESETQGPMSPLGDELYHCLEGNHKKQPFESGSETPGTSESATPEGSPKRKVSSAEGAAKEEPKRRSARLSAKPPAKVEAKPKKAAAKDKSSDKKVQTKGKRGAKGKQAEVANQETKEDLPAENGETKTEESPASDEAGEKEAKSDSGSETPGTSESATPESYEQLAPQPCVGETLHSSLPRDSELFVPEEGSSEKESEDAPKTSPPTPGKHGLEQTGEEKVMVTVPDKNPPCPCCGTRVNSVLNLIEHLKVSHGKRGVCFRCAKCGKENSNYHSVVCHFKKCRGPETEKAPAGEWICEVCNRDFTTKIGLGQHKRLAHPAVRNQERIVASQPKETSNRGAHKRCWTKEEEELLIRLEAQFEGNKNINKLIAEHITTKTAKQISDKRRLLSRKPAEEPREEPGTCHHTRRAAASLRTEPEMSHHAQAEDRDNGPGRRPLPGRAAAGGRTMDEIRRHPDKGNGQQRPTKQKSEEQLQAYYKKTLEERLSAGALNTFPRAFKQVMEGRDIKLVINQTAQDCFGCLESISQIRTATRDKKDTVTREKHPKKPFQKWMKKRAIKKGNYLRFQRLFYLDRGKLAKIILDDIECLSCDIPLSEIYSVFKTRWETTGSFKSLGDFKTYGKADNTAFRELITAKEIEKNVQEMSKGSAPGPDGITLGDVVKMDPEFSRTMEIFNLWLTTGKIPDMVRGCRTVLIPKSSKPDRLKDINNWRPITIGSILLRLFSRIVTARLSKACPLNPRQRGFIRAAGCSENLKLLQTIIWSAKREHRPLGVVFVDIAKAFDTVSHQHIIHALQQREVDPHIVGLVSNMYENISTYITTKRNTHTDKIQIRVGVKQGDPMSPLLFNLAMDPLLCKLEESGKGYHRGQSSITAMAFADDLVLLSDSWENMNTNISILETFCNLTGLKTQGQKCHGFYIKPTKDSYTINDCAAWTINGTPLNMIDPGESEKYLGLQFDPWIGIARSGLSTKLDFWLQRIDQAPLKPLQKTDILKTYTIPRLIYIADHSEVKSALLETLDQKIRTAVKEWLHLPPCTCDAILYSSTRDGGLGITKLAGLIPSVQARRLHRIAQSSDDTMKCFMEKEKMEQLHKKLWIQAGGDRENIPSIWEAPPSSEPPNNVSTNSEWEAPTQKDKFPKPCNWRKNEFKKWTKLASQGRGIVNFERDKISNHWIQYYRRIPHRKLLTALQLRANVYPTREFLARGRQDQYIKACRHCDADNESCAHIIGNCPVTQDARIKRHNYICELLLEEAKKKDWVVFKEPHIRDSNKELYKPDLIFVKDGRALVVDVTVRYEAAKSSLEEAAAEKVRKYKHLETEVRHLTNAKDVTFVGFPLGARGKWHQDNFKLLTELGLSKSRQVKMAETFSTVALFSSVDIVHMFASRARKSMVM

SEQ ID NO: 741 - protein, 1665 aa, synthetic construct
MAPKKKRKVNISGSSCGSPNSADTSSDFKDLWTKLKECHDREVQGLQVKVTKLKQERILDAQRLEEFFTKNQQLREQQKVLHETIKVLEDRLRAGLCDRCAVTEEHMRKKQQEFENIRQQNLKLITELMNERNTLQEENKKLSEQLQQKIENDQQHQAAELECSEDVIPDSPITAFSFSGVNRLRRKENPHVRYIEQTHTKLEHSVCANEMRKVSKSSTHPQHNPNENEILVADTYDQSQSPMAKAHGTSSYTPDKSSFNLATVVAETLGLGVQEESETQGPMSPLGDELYHCLEGNHKKQPFESGSETPGTSESATPEGSPKRKVSSAEGAAKEEPKRRSARLSAKPPAKVEAKPKKAAAKDKSSDKKVQTKGKRGAKGKQAEVANQETKEDLPAENGETKTEESPASDEAGEKEAKSDSGSETPGTSESATPESYEQLAPQPCVGETLHSSLPRDSELFVPEEGSSEKESEDAPKTSPPTPGKHGLEQTGEEKVMVTVPDKNPPCPCCGTRVNSVLNLIEHLKVSHGKRGVCFRCAKCGKENSNYHSVVCHFKKCRGPETEKAPAGEWICEVCNRDFTTKIGLGQHKRLAHPAVRNQERIVASQPKETSNRGAHKRCWTKEEEELLIRLEAQFEGNKNINKLIAEHITTKTAKQISDKRRLLSRKPAEEPREEPGTCHHTRRAAASLRTEPEMSHHAQAEDRDNGPGRRPLPGRAAAGGRTMDEIRRHPDKGNGQQRPTKQKSEEQLQAYYKKTLEERLSAGALNTFPRAFKQVMEGRDIKLVINQTAQDCFGCLESISQIRTATRDKKDTVTREKHPKKPFQKWMKKRAIKKGNYLRFQRLFYLDRGKLAKIILDDIECLSCDIPLSEIYSVFKTRWETTGSFKSLGDFKTYGKADNTAFRELITAKEIEKNVQEMSKGSAPGPDGITLGDVVKMDPEFSRTMEIFNLWLTTGKIPDMVRGCRTVLIPKSSKPDRLKDINNWRPITIGSILLRLFSRIVTARLSKACPLNPRQRGFIRAAGCSENLKLLQTIIWSAKREHRPLGVVFVDIAKAFDTVSHQHIIHALQQREVDPHIVGLVSNMYENISTYITTKRNTHTDKIQIRVGVKQGDPMSPLLFNLAMDPLLCKLEESGKGYHRGQSSITAMAFADDLVLLSDSWENMNTNISILETFCNLTGLKTQGQKCHGFYIKPTKDSYTINDCAAWTINGTPLNMIDPGESEKYLGLQFDPWIGIARSGLSTKLDFWLQRIDQAPLKPLQKTDILKTYTIPRLIYIADHSEVKSALLETLDQKIRTAVKEWLHLPPCTCDAILYSSTRDGGLGITKLAGLIPSVQARRLHRIAQSSDDTMKCFMEKEKMEQLHKKLWIQAGGDRENIPSIWEAPPSSEPPNNVSTNSEWEAPTQKDKFPKPCNWRKNEFKKWTKLASQGRGIVNFERDKISNHWIQYYRRIPHRKLLTALQLRANVYPTREFLARGRQDQYIKACRHCDADNESCAHIIGNCPVTQDARIKRHNYICELLLEEAKKKDWVVFKEPHIRDSNKELYKPDLIFVKDGRALVVDVTVRYEAAKSSLEEAAAEKVRKYKHLETEVRHLTNAKDVTFVGFPLGARGKWHQDNFKLLTELGLSKSRQVKMAETFSTVALFSSVDIVHMFASRARKSMVM

SEQ ID NO: 742 - protein, 1665 aa, synthetic construct
MAPKKKRKVNISGSSCGSPNSADTSSDFKDLWTKLKECHDREVQGLQVKVTKLKQERILDAQRLEEFFTKNQQLREQQKVLHETIKVLEDRLRAGLCDRCAVTEEHMRKKQQEFENIRQQNLKLITELMNERNTLQEENKKLSEQLQQKIENDQQHQAAELECEEDVIPDSPITAFSFSGVNRLRRKENPHVRYIEQTHTKLEHSVCANEMRKVSKSSTHPQHNPNENEILVADTYDQSQSPMAKAHGTSSYTPDKSSFNLATVVAETLGLGVQEESETQGPMSPLGDEGYHCLEGNHKKQPFESGSETPGTSESATPEGSPKRKVSSAEGAAKEEPKRRSARLSAKPPAKVEAKPKKAAAKDKSSDKKVQTKGKRGAKGKQAEVANQETKEDLPAENGETKTEESPASDEAGEKEAKSDSGSETPGTSESATPESYEQLAPQPCVGETLHSSLPRDSELFVPEEGSSEKESEDAPKTSPPTPGKHGLEQTGEEKVMVTVPDKNPPCPCCGTRVNSVLNLIEHLKVSHGKRGVCFRCAKCGKENSNYHSVVCHFKKCRGPETEKAPAGEWICEVCNRDFTTKIGLGQHKRLAHPAVRNQERIVASQPKETSNRGAHKRCWTKEEEELLIRLEAQFEGNKNINKLIAEHITTKTAKQISDKRRLLSRKPAEEPREEPGTCHHTRRAAASLRTEPEMSHHAQAEDRDNGPGRRPLPGRAAAGGRTMDEIRRHPDKGNGQQRPTKQKSEEQLQAYYKKTLEERLSAGALNTFPRAFKQVMEGRDIKLVINQTAQDCFGCLESISQIRTATRDKKDTVTREKHPKKPFQKWMKKRAIKKGNYLRFQRLFYLDRGKLAKIILDDIECLSCDIPLSEIYSVFKTRWETTGSFKSLGDFKTYGKADNTAFRELITAKEIEKNVQEMSKGSAPGPDGITLGDVVKMDPEFSRTMEIFNLWLTTGKIPDMVRGCRTVLIPKSSKPDRLKDINNWRPITIGSILLRLFSRIVTARLSKACPLNPRQRGFIRAAGCSENLKLLQTIIWSAKREHRPLGVVFVDIAKAFDTVSHQHIIHALQQREVDPHIVGLVSNMYENISTYITTKRNTHTDKIQIRVGVKQGDPMSPLLFNLAMDPLLCKLEESGKGYHRGQSSITAMAFADDLVLLSDSWENMNTNISILETFCNLTGLKTQGQKCHGFYIKPTKDSYTINDCAAWTINGTPLNMIDPGESEKYLGLQFDPWIGIARSGLSTKLDFWLQRIDQAPLKPLQKTDILKTYTIPRLIYIADHSEVKSALLETLDQKIRTAVKEWLHLPPCTCDAILYSSTRDGGLGITKLAGLIPSVQARRLHRIAQSSDDTMKCFMEKEKMEQLHKKLWIQAGGDRENIPSIWEAPPSSEPPNNVSTNSEWEAPTQKDKFPKPCNWRKNEFKKWTKLASQGRGIVNFERDKISNHWIQYYRRIPHRKLLTALQLRANVYPTREFLARGRQDQYIKACRHCDADNESCAHIIGNCPVTQDARIKRHNYICELLLEEAKKKDWVVFKEPHIRDSNKELYKPDLIFVKDGRALVVDVTVRYEAAKSSLEEAAAEKVRKYKHLETEVRHLTNAKDVTFVGFPLGARGKWHQDNFKLLTELGLSKSRQVKMAETFSTVALFSSVDIVHMFASRARKSMVM

SEQ ID NO: 743 - protein, 1665 aa, synthetic construct
MAPKKKRKVNISGSSCGSPNSADTSSDFKDLWTKLKECHDREVQGLQVKVTKLKQERILDAQRLEEFFTKNQQLREQQKVLHETIKVLEDRLRAGLCDRCAVTEEHMRKKQQEFENIRQQNLKLITELMNERNTLQEENKKLSEQLQQKIENDQQHQAAELECEEDVIPDSPITAFSFSGVNRLRRKENPHVRYSEQTHTKLEHSVCANEMRKVSKSSTHPQHNPNENEILVADTYDQSQSPMAKAHGTSSYTPDKSSFNLATVVAETLGLGVQEESETQGPMSPLGDELYHCLEGNHKKQPFESGSETPGTSESATPEGSPKRKVSSAEGAAKEEPKRRSARLSAKPPAKVEAKPKKAAAKDKSSDKKVQTKGKRGAKGKQAEVANQETKEDLPAENGETKTEESPASDEAGEKEAKSDSGSETPGTSESATPESYEQLAPQPCVGETLHSSLPRDSELFVPEEGSSEKESEDAPKTSPPTPGKHGLEQTGEEKVMVTVPDKNPPCPCCGTRVNSVLNLIEHLKVSHGKRGVCFRCAKCGKENSNYHSVVCHFKKCRGPETEKAPAGEWICEVCNRDFTTKIGLGQHKRLAHPAVRNQERIVASQPKETSNRGAHKRCWTKEEEELLIRLEAQFEGNKNINKLIAEHITTKTAKQISDKRRLLSRKPAEEPREEPGTCHHTRRAAASLRTEPEMSHHAQAEDRDNGPGRRPLPGRAAAGGRTMDEIRRHPDKGNGQQRPTKQKSEEQLQAYYKKTLEERLSAGALNTFPRAFKQVMEGRDIKLVINQTAQDCFGCLESISQIRTATRDKKDTVTREKHPKKPFQKWMKKRAIKKGNYLRFQRLFYLDRGKLAKIILDDIECLSCDIPLSEIYSVFKTRWETTGSFKSLGDFKTYGKADNTAFRELITAKEIEKNVQEMSKGSAPGPDGITLGDVVKMDPEFSRTMEIFNLWLTTGKIPDMVRGCRTVLIPKSSKPDRLKDINNWRPITIGSILLRLFSRIVTARLSKACPLNPRQRGFIRAAGCSENLKLLQTIIWSAKREHRPLGVVFVDIAKAFDTVSHQHIIHALQQREVDPHIVGLVSNMYENISTYITTKRNTHTDKIQIRVGVKQGDPMSPLLFNLAMDPLLCKLEESGKGYHRGQSSITAMAFADDLVLLSDSWENMNTNISILETFCNLTGLKTQGQKCHGFYIKPTKDSYTINDCAAWTINGTPLNMIDPGESEKYLGLQFDPWIGIARSGLSTKLDFWLQRIDQAPLKPLQKTDILKTYTIPRLIYIADHSEVKSALLETLDQKIRTAVKEWLHLPPCTCDAILYSSTRDGGLGITKLAGLIPSVQARRLHRIAQSSDDTMKCFMEKEKMEQLHKKLWIQAGGDRENIPSIWEAPPSSEPPNNVSTNSEWEAPTQKDKFPKPCNWRKNEFKKWTKLASQGRGIVNFERDKISNHWIQYYRRIPHRKLLTALQLRANVYPTREFLARGRQDQYIKACRHCDADNESCAHIIGNCPVTQDARIKRHNYICELLLEEAKKKDWVVFKEPHIRDSNKELYKPDLIFVKDGRALVVDVTVRYEAAKSSLEEAAAEKVRKYKHLETEVRHLTNAKDVTFVGFPLGARGKWHQDNFKLLTELGLSKSRQVKMAETFSTVALFSSVDIVHMFASRARKSMVM

SEQ ID NO: 744 - protein, 1665 aa, synthetic construct
MAPKKKRKVNISGSSCGSPNSADTSSDFKDLWTKLKECHDREVQGLQVKVTKLKKERILDAQRLEEFFTKNQQLREQQKVLHETIKVLEDRLRAGLCDRCAVTEEHMRKKQQEFENIRQQNLKLITELMNERNTLQEENKKLSEQLQQKIENDQQHQAAELECEEDVIPDSPITAFSFSGVNRLRRKENPHVRYIEQTHTKLEHSVCANEMRKVSKSSTHPQHNPNENEILVADTYDQSQSPMAKAHGTSSYTPDKSSFNLATVVAETLGLGVQEESETQGPMSPLGDELYHCLEGNHKKQPFESGSETPGTSESATPEGSPKRKVSSAEGAAKEEPKRRSARLSAKPPAKVEAKPKKAAAKDKSSDKKVQTKGKRGAKGKQAEVANQETKEDLPAENGETKTEESPASDEAGEKEAKSDSGSETPGTSESATPESYEQLAPQPCVGETLHSSLPRDSELFVPEEGSSEKESEDAPKTSPPTPGKHGLEQTGEEKVMVTVPDKNPPCPCCGTRVNSVLNLIEHLKVSHGKRGVCFRCAKCGKENSNYHSVVCHFKKCRGPETEKAPAGEWICEVCNRDFTTKIGLGQHKRLAHPAVRNQERIVASQPKETSNRGAHKRCWTKEEEELLIRLEAQFEGNKNINKLIAEHITTKTAKQISDKRRLLSRKPAEEPREEPGTCHHTRRAAASLRTEPEMSHHAQAEDRDNGPGRRPLPGRAAAGGRTMDEIRRHPDKGNGQQRPTKQKSEEQLQAYYKKTLEERLSAGALNTFPRAFKQVMEGRDIKLVINQTAQDCFGCLESISQIRTATRDKKDTVTREKHPKKPFQKWMKKRAIKKGNYLRFQRLFYLDRGKLAKIILDDIECLSCDIPLSEIYSVFKTRWETTGSFKSLGDFKTYGKADNTAFRELITAKEIEKNVQEMSKGSAPGPDGITLGDVVKMDPEFSRTMEIFNLWLTTGKIPDMVRGCRTVLIPKSSKPDRLKDINNWRPITIGSILLRLFSRIVTARLSKACPLNPRQRGFIRAAGCSENLKLLQTIIWSAKREHRPLGVVFVDIAKAFDTVSHQHIIHALQQREVDPHIVGLVSNMYENISTYITTKRNTHTDKIQIRVGVKQGDPMSPLLFNLAMDPLLCKLEESGKGYHRGQSSITAMAFADDLVLLSDSWENMNTNISILETFCNLTGLKTQGQKCHGFYIKPTKDSYTINDCAAWTINGTPLNMIDPGESEKYLGLQFDPWIGIARSGLSTKLDFWLQRIDQAPLKPLQKTDILKTYTIPRLIYIADHSEVKSALLETLDQKIRTAVKEWLHLPPCTCDAILYSSTRDGGLGITKLAGLIPSVQARRLHRIAQSSDDTMKCFMEKEKMEQLHKKLWIQAGGDRENIPSIWEAPPSSEPPNNVSTNSEWEAPTQKDKFPKPCNWRKNEFKKWTKLASQGRGIVNFERDKISNHWIQYYRRIPHRKLLTALQLRANVYPTREFLARGRQDQYIKACRHCDADNESCAHIIGNCPVTQDARIKRHNYICELLLEEAKKKDWVVFKEPHIRDSNKELYKPDLIFVKDGRALVVDVTVRYEAAKSSLEEAAAEKVRKYKHLETEVRHLTNAKDVTFVGFPLGARGKWHQDNFKLLTELGLSKSRQVKMAETFSTVALFSSVDIVHMFASRARKSMVM

SEQ ID NO: 745 - protein, 1665 aa, synthetic construct
MAPKKKRKVNISGSSCGSPNSADTSSFFKDLWTKLKECHDREVQGLQVKVTKLKQERILDAQRLEEFFTKNQQLREQQKVLHETIKVLEDRLRAGLCDRCAVTEEHMRKKQQEFENIRQQNLKLITELMNERNTLQEENKKLSEQLQQKIENDQQHQAAELECEEDVIPDSPITAFSFSGVNRLRRKENPHVRYIEQTHTKLEHSVCANEMRKVSKSSTHPQHNPNENEILVADTYDQSQSPMAKAHGTSSYTPDKSSFNLATVVAETLGLGVQEESETQGPMSPLGDELYHCLEGNHKKQPFESGSETPGTSESATPEGSPKRKVSSAEGAAKEEPKRRSARLSAKPPAKVEAKPKKAAAKDKSSDKKVQTKGKRGAKGKQAEVANQETKEDLPAENGETKTEESPASDEAGEKEAKSDSGSETPGTSESATPESYEQLAPQPCVGETLHSSLPRDSELFVPEEGSSEKESEDAPKTSPPTPGKHGLEQTGEEKVMVTVPDKNPPCPCCGTRVNSVLNLIEHLKVSHGKRGVCFRCAKCGKENSNYHSVVCHFKKCRGPETEKAPAGEWICEVCNRDFTTKIGLGQHKRLAHPAVRNQERIVASQPKETSNRGAHKRCWTKEEEELLIRLEAQFEGNKNINKLIAEHITTKTAKQISDKRRLLSRKPAEEPREEPGTCHHTRRAAASLRTEPEMSHHAQAEDRDNGPGRRPLPGRAAAGGRTMDEIRRHPDKGNGQQRPTKQKSEEQLQAYYKKTLEERLSAGALNTFPRAFKQVMEGRDIKLVINQTAQDCFGCLESISQIRTATRDKKDTVTREKHPKKPFQKWMKKRAIKKGNYLRFQRLFYLDRGKLAKIILDDIECLSCDIPLSEIYSVFKTRWETTGSFKSLGDFKTYGKADNTAFRELITAKEIEKNVQEMSKGSAPGPDGITLGDVVKMDPEFSRTMEIFNLWLTTGKIPDMVRGCRTVLIPKSSKPDRLKDINNWRPITIGSILLRLFSRIVTARLSKACPLNPRQRGFIRAAGCSENLKLLQTIIWSAKREHRPLGVVFVDIAKAFDTVSHQHIIHALQQREVDPHIVGLVSNMYENISTYITTKRNTHTDKIQIRVGVKQGDPMSPLLFNLAMDPLLCKLEESGKGYHRGQSSITAMAFADDLVLLSDSWENMNTNISILETFCNLTGLKTQGQKCHGFYIKPTKDSYTINDCAAWTINGTPLNMIDPGESEKYLGLQFDPWIGIARSGLSTKLDFWLQRIDQAPLKPLQKTDILKTYTIPRLIYIADHSEVKSALLETLDQKIRTAVKEWLHLPPCTCDAILYSSTRDGGLGITKLAGLIPSVQARRLHRIAQSSDDTMKCFMEKEKMEQLHKKLWIQAGGDRENIPSIWEAPPSSEPPNNVSTNSEWEAPTQKDKFPKPCNWRKNEFKKWTKLASQGRGIVNFERDKISNHWIQYYRRIPHRKLLTALQLRANVYPTREFLARGRQDQYIKACRHCDADNESCAHIIGNCPVTQDARIKRHNYICELLLEEAKKKDWVVFKEPHIRDSNKELYKPDLIFVKDGRALVVDVTVRYEAAKSSLEEAAAEKVRKYKHLETEVRHLTNAKDVTFVGFPLGARGKWHQDNFKLLTELGLSKSRQVKMAETFSTVALFSSVDIVHMFASRARKSMVM

SEQ ID NO: 746 - protein, 1665 aa, synthetic construct
MAPKKKRKVNISGSSCGSPNSADTSSDFKDLWTKLKECHDREVQGLQVKVTKLKQERILDAQRLEEFFTKNQQLREQQKVLHETIKVLEDRLRAGLCDRCAVTEEHMRKKQQEFENIRQQNLKLITELMNERNTLQEENKKLSEQLQQKIENDQQHQAAELECEEDVIPDSPITAFSFSGVNRLRRKENPHVRYIEQTHTKLEHSVCANEMRKVSKSSTHPQHNPNENEILVADTYDQSQSPMAKAHGTSSYTPDKSSFNLATVVAETLGLGVQEESETQGPMSPLGDELYHCLEGNHKKQPFESGSETPGTSESATPEGSPKRKVSSAEGAAKEEPKRRSARLSAKPPAKVEAKPKKAAAKDKSSDKKVQTKGKRGAKGKQAEVANQETKEDLPAENGETKTEESPASDEAGEKEAKSDSGSETPGTSESATPESYEQLAPQPCVGETLHSSLPRDSELFVPEEGSSEKESEDAPKTSPPTPGKHGLEQTGEEKVMVTVPDKNPPCPCCGTRVNSVLNLIEHLKVSHGKRGVCFRCAKCGKENSNYHSVVCHFKKCRGPETEKAPAGEWICEVCNRDFTTKIGLGQHKRLAHPAVRNQERIVASQPKETSNRGAHKRCWTKEEEELLIRLEAQFEGNKNINKLIAEHITTKTAKQISDKRRLLSRKPAEEPREEPGTCHHTRRAAASLRTEPEMSHHAQAEDRDNGPGRRPLPGRAAAGGRTMDEIRRHPDKGNGQQRPTKQKSEEQLQAYYKKTLEERLSAGALNTFPRAFKQVMEGRDIKLVINQTAQDCFGCLESISQIRTATRDKKDTVTREKHPKKPFQKWMKKRAIKKGNYLRFQRLFYLDRGKLAKIILDDIECLSCDIPLSEIYSVFKTRWETTGSFKSLGDFKTYGKADNTAFRELITAKEIEKNVQEMSKGSAPGPDGITLGDVVKMDPEFSRTMEIFNLWLTTGKIPDMVRGCRTVLIPKSSKPDRLKDINNWRPITIGSILLRLFSRIVTARLSKACPLNPRQRGFIRAAGCSENLKLLQTIIWSAKREHRPLGVVFVDIAKAFDTVSHQHIIHALQQREVDPHIVGLVSNMYENISTYITTKRNTHTDKIQIRVGVKQGDPMSPLLFNLAMDPLLCKLEESGKGYHRGQSSITAMAFADDLVLLSDSWENMNTNISILETFCNLTGLKTQGQKCHGFYIKPTKKSYTINDCAAWTINGTPLNMIDPGESEKYLGLQFDPWIGIARSGLSTKLDFWLQRIDQAPLKPLQKTDILKTYTIPRLIYIADHSEVKSALLETLDQKIRTAVKEWLHLPPCTCDAILYSSTRDGGLGITKLAGLIPSVQARRLHRIAQSSDDTMKCFMEKEKMEQLHKKLWIQAGGDRENIPSIWEAPPSSEPPNNVSTNSEWEAPTQKDKFPKPCNWRKNEFKKWTKLASQGRGIVNFERDKISNHWIQYYRRIPHRKLLTALQLRANVYPTREFLARGRQDQYIKACRHCDADNESCAHIIGNCPVTQDARIKRHNYICELLLEEAKKKDWVVFKEPHIRDSNKELYKPDLIFVKDGRALVVDVTVRYEAAKSSLEEAAAEKVRKYKHLETEVRHLTNAKDVTFVGFPLGARGKWHQDNFKLLTELGLSKSRQVKMAKTFSTVALFSSVDIVHMFASRARKSMVM

SEQ ID NO: 747 - protein, 1665 aa, synthetic construct; identical to SEQ ID NO: 649

SEQ ID NO: 748 - protein, 1665 aa, synthetic construct
MAPKKKRKVNISGSSCGSPNSADTSSDFKDLWTKLKECHDREVQGLQVKVTKLKQERILDAQRLEEFFTKNQQLREQQKVLHETIKVLEDRLRAGLCDRCAVTEEHMRKKQQEFENIRQQNLKLITELMNERNTLQEENKKLSEQLQQKIENDQQHQAAELECEEDVIPDSPITAFSFSGVNRLRRKENPHVRYIEQTHTKLEHSVCANEMRKVSKSSTHPQHNPNENEILVADTYDQSQSPMAKAHGTSSYTPDKSSFNLATVVAETLGLGVQEESETQGPMSPLGDELYHCLEGNHKKQPFESGSETPGTSESATPEGSPKRKVSSAEGAAKEEPKRRSARLSAKPPAKVEAKPKKAAAKDKSSDKKVQTKGKRGAKGKQAEVANQETKEDLPAENGETKTEESPASDEAGEKEAKSDSGSETPGTSESATPESYEQLAPQPCVGETLHSSLPRDSELFVPEEGSSEKESEDAPKTSPPTPGKHGLEQTGEEKVMVTVPDKNPPCPCCGTRVNSVLNLIEHLKVSHGKRGVCFRCAKCGKENSNYHSVVCHFKKCRGPETEKAPAGEWICEVCNRDFTTKIGLGQHKRLAHPAVRNQERIVASQPKETSNRGAHKRCWTKEEEELLIRLEAQFEGNKNINKLIAEHITTKTAKQISDKRRLLSRKPAEEPREEPGTCHHTRRAAASLRTEPEMSHHAQAEDRDNGPGRRPLPGRAAAGGRTMDEIRRHPDKGNGQQRPTKQKSEEQLQAYYKKTLEERLSAGALNTFPRAFKQVMEGRDIKLVINQTAQDCFGCLESISQIRTATRDKKDTVTREKHPKKPFQKWMKKRAIKKGNYLRFQRLFYLDRGKLAKIILDDIECLSCDIPLSEIYSVFKTRWETTGSFKSLGDFKTYGKADNTAFRELITAKEIEKNVQEMSKGSAPGPDGITLGDVVKMDPEFSRTMEIFNLWLTTGKIPDMVRGCRTVLIPKSSKPDRLKDINNWRPITIGSILLRLFSRIVTARLSKACPLNPRQRGFIRAAGCSENLKLLQTIIWSAKREHRPLGVVFVDIAKAFDTVSHQHIIHALQQREVDPHIVGLVSNMYENISTYITTKRNTHTDKIQIRVGVKQGDPMSPLLFNLAMDPLLCKLEESGKGYHRGQSSITAMAFADDLVLLSDSWENMNTNISILETFCNLTGLKTQGQKCHGFYIKPTKKSYTINDCAAWTINGTPLNMIDPGESEKYLGLQFDPWIGIARSGLSTKLDFWLQRIDQAPLKPLQKTDILKTYTIPRLIYIADHSEVKSALLETLDQKIRTAVKEWLHLPPCTCDAILYSSTRDGGLGITKLAGLIPSVQARRLHRIAQSSDDTMKCFMEKEKMEQLHKKLWIQAGGDRENIPSIWEAPPSSEPPNNVSTNSEWEAPTQKDKFPKPCNWRKNEFKKWTKLASQGRGIVNFERDKISNHWIQYYRRIPHRKLLTALQLRANVYPTREFLARGRQDQYIKACRHCDADNESCAHIIGNCPVTQDARIKRHNYICELLLEEAKKKDWVVFKEPHIRDSNKELYKPDLIFVKDGRALVVDVTVRYEAAKSSLEEAAAEKVRKYKHLETEVRHLTNAKDVTFVGFPLGARGKWHQDNFKLLTELGLSKSRQVKMAETFSTRALFSSVDIVHMFASRARKSMVM

SEQ ID NO: 749 - protein, 1665 aa, synthetic construct
MAPKKKRKVNISGSSCGSPNSADTSSDFKDLWTKLKECHDREVQGLQVKVTKLKQERILDAQRLEEFFTKNQQLREQQKVLHETIKVLEDRLRAGLCDRCAVTEEHMRKKQQEFENIRQQNLKLITELMNERNTLQEENKKLSEQLQQKIENDQQHQAAELECEEDVIPDSPITAFSFSGVNRLRRKENPHVRYIEQTHTKLEHSVCANEMRKVSKSSTHPQHNPNENEILVADTYDQSQSPMAKAHGTSSYTPDKSSFNLATVVAETLGLGVQEESETQGPMSPLGDELYHCLEGNHKKQPFESGSETPGTSESATPEGSPKRKVSSAEGAAKEEPKRRSARLSAKPPAKVEAKPKKAAAKDKSSDKKVQTKGKRGAKGKQAEVANQETKEDLPAENGETKTEESPASDEAGEKEAKSDSGSETPGTSESATPESYEQLAPQPCVGETLHSSLPRDSELFVPEEGSSEKESEDAPKTSPPTPGKHGLEQTGEEKVMVTVPDKNPPCPCCGTRVNSVLNLIEHLKVSHGKRGVCFRCAKCGKENSNYHSVVCHFKKCRGPETEKAPAGEWICEVCNRDFTTKIGLGQHKRLAHPAVRNQERIVASQPKETSNRGAHKRCWTKEEEELLIRLEAQFEGNKNINKLIAEHITTKTAKQISDKRRLLSRKPAEEPREEPGTCHHTRRAAASLRTEPEMSHHAQAEDRDNGPGRRPLPGRAAAGGRTMDEIRRHPDKGNGQQRPTKQKSEEQLQAYYKKTLEERLSAGALNTFPRAFKQVMEGRDIKLVINQTAQDCFGCLESISQIRTATRDKKDTVTREKHPKKPFQKWMKKRAIKKGNYLRFQRLFYLDRGKLAKIILDDIECLSCDIPLSEIYSVFKTRWETTGSFKSLGDFKTYGKADNTAFRELITAKEIEKNVQEMSKGSAPGPDGITLGDVVKMDPEFSRTMEIFNLWLTTGKIPDMVRGCRTVLIPKSSKPDRLKDINNWRPITIGSILLRLFSRIVTARLSKACPLNPRQRGFIRAAGCSENLKLLQTIIWSAKREHRPLGVVFVDIAKAFDTVSHQHIIHALQQREVDPHIVGLVSNMYENISTYITTKRNTHTDKIQIRVGVKQGDPMSPLLFNLAMDPLLCKLEESGKGYHRGQSSITAMAFADDLVLLSDSWENMNTNISILETFCNLTGLKTQGQKCHGFYIKPTKKSYTINDCAAWTINGTPLNMIDPGESEKYLGLQFDPWIGIARSGLSTKLDFWLQRIDQAPLKPLQKTDILKTYTIPRLIYIADHSEVKSALLETLDQKIRTAVKEWLHLPPCTCDAILYSSTRDGGLGITKLAGLIPSVQARRLHRIAQSSDDTMKCFMEKEKMEQLHKKLWIQAGGDRENIPSIWEAPPSSEPPNNVSTNSEWEAPTQKDKFPKPCNWRKNEFKKWTKLASQGMGIVNFERDKISNHWIQYYRRIPHRKLLTALQLRANVYPTREFLARGRQDQYIKACRHCDADNESCAHIIGNCPVTQDARIKRHNYICELLLEEAKKKDWVVFKEPHIRDSNKELYKPDLIFVKDGRALVVDVTVRYEAAKSSLEEAAAEKVRKYKHLETEVRHLTNAKDVTFVGFPLGARGKWHQDNFKLLTELGLSKSRQVKMAETFSTVALFSSVDIVHMFASRARKSMVM

SEQ ID NO: 750 - protein, 1665 aa, synthetic construct
MAPKKKRKVNISGSSCGSPNSADTSSDFKDLWTKLKECHDREVQGLQVKVTKLKQERILDAQRLEEFFTKNQQLREQQKVLHETIKVLEDRLRAGLCDRCAVTEEHMRKKQQEFENIRQQNLKLITELMNERNTLQEENKKLSEQLQQKIENDQQHQAAELECEEDVIPDSPITAFSFSGVNRLRRKENPHVRYIEQTHTKLEHSVCANEMRKVSKSSTHPQHNPNENEILVADTYDQSQSPMAKAHGTSSYTPDKSSFNLATVVAETLGLGVQEESETQGPMSPLGDELYHCLEGNHKKQPFESGSETPGTSESATPEGSPKRKVSSAEGAAKEEPKRRSARLSAKPPAKVEAKPKKAAAKDKSSDKKVQTKGKRGAKGKQAEVANQETKEDLPAENGETKTEESPASDEAGEKEAKSDSGSETPGTSESATPESYEQLAPQPCVGETLHSSLPRDSELFVPEEGSSEKESEDAPKTSPPTPGKHGLEQTGEEKVMVTVPDKNPPCPCCGTRVNSVLNLIEHLKVSHGKRGVCFRCAKCGKENSNYHSVVCHFKKCRGPETEKAPAGEWICEVCNRDFTTKIGLGQHKRLAHPAVRNQERIVASQPKETSNRGAHKRCWTKEEEELLIRLEAQFEGNKNINKLIAEHITTKTAKQISDKRRLLSRKPAEEPREEPGTCHHTRRAAASLRTEPEMSHHAQAEDRDNGPGRRPLPGRAAAGGRTMDEIRRHPDKGNGQQRPTKQKSEEQLQAYYKKTLEERLSAGALNTFPRAFKQVMEGRDIKLVINQTAQDCFGCLESISQIRTATRDKKDTVTREKHPKKPFQKWMKKRAIKKGNYLRFQRLFYLDRGKLAKIILDDIECLSCDIPLSEIYSVFKTRWETTGSFKSLGDFKTYGKADNTAFRELITAKEIEKNVQEMSKGSAPGPDGITLGDVVKMDPEFSRTMEIFNLWLTTGKIPDMVRGCRTVLIPKSSKPDRLKDINNWRPITIGSILLRLFSRIVTARLSKACPLNPRQRGFIRAAGCSENLKLLQTIIWSAKREHRPLGVVFVDIAKAFDTVSHQHIIHALQQREVDPHIVGLVSNMYENISTYITTKRNTHTDKIQIRVGVKQGDPMSPLLFNLAMDPLLCKLEESGKGYHRGQSSITAMAFADDLVLLSDSWENMNTNISILETFCNLTGLKTQGQKCHGFYIKPTKKSYTINDCAAWTINGTPLNMIDPGESEKYLGLQFDPWIGIARSGLSTKLDFWLQRIDQAPLKPLQKTDILKTYTIPRLIYIADHSEVKSALLETLDQKIRTAVKEWLHLPPCTCDAILYSSTRDGGLGITKLAGLIPSVQARRLHRIAQSSDDTMKCFMEKEKMEQLHKKLWIQAGGDRENIPSIWEAPPSSEPPNNVSTKSEWEAPTQKDKFPKPCNWRKNEFKKWTKLASQGRGIVNFERDKISNHWIQYYRRIPHRKLLTALQLRANVYPTREFLARGRQDQYIKACRHCDADNESCAHIIGNCPVTQDARIKRHNYICELLLEEAKKKDWVVFKEPHIRDSNKELYKPDLIFVKDGRALVVDVTVRYEAAKSSLEEAAAEKVRKYKHLETEVRHLTNAKDVTFVGFPLGARGKWHQDNFKLLTELGLSKSRQVKMAETFSTVALFSSVDIVHMFASRARKSMVM

SEQ ID NO: 751 - protein, 1665 aa, synthetic construct
MAPKKKRKVNISGSSCGSPNSADTSSDFKDLWTKLKECHDREVQGLQVKVTKLKQERILDAQRLEEFFTKNQQLREQQKVLHETIKVLEDRLRAGLCDRCAVTEEHMRKKQQEFENIRQQNLKLITELMNERNTLQEENKKLSEQLQQKIENDQQHQAAELECEEDVIPDSPITAFSFSGVNRLRRKENPHVRYIEQTHTKLEHSVCANEMRKVSKSSTHPQHNPNENEILVADTYDQSQSPMAKAHGTSSYTPDKSSFNLATVVAETLGLGVQEESETQGPMSPLGDELYHCLEGNHKKQPFESGSETPGTSESATPEGSPKRKVSSAEGAAKEEPKRRSARLSAKPPAKVEAKPKKAAAKDKSSDKKVQTKGKRGAKGKQAEVANQETKEDLPAENGETKTEESPASDEAGEKEAKSDSGSETPGTSESATPESYEQLAPQPCVGETLHSSLPRDSELFVPEEGSSEKESEDAPKTSPPTPGKHGLEQTGEEKVMVTVPDKNPPCPCCGTRVNSVLNLIEHLKVSHGKRGVCFRCAKCGKENSNYHSVVCHFKKCRGPETEKAPAGEWICEVCNRDFTTKIGLGQHKRLAHPAVRNQERIVASQPKETSNRGAHKRCWTKEEEELLIRLEAQFEGNKNINKLIAEHITTKTAKQISDKRRLLSRKPAEEPREEPGTCHHTRRAAASLRTEPEMSHHAQAEDRDNGPGRRPLPGRAAAGGRTMDEIRRHPDKGNGQQRPTKQKSEEQLQAYYKKTLEERLSAGALNTFPRAFKQVMEGRDIKLVINQTAQDCFGCLESISQIRTATRDKKDTVTREKHPKKPFQKWMKKRAIKKGNYLRFQRLFYLDRGKLAKIILDDIECLSCDIPLSEIYSVFKTRWETTGSFKSLGDFKTYGKADNTAFRELITAKEIEKNVQEMSKGSAPGPDGITLGDVVKMDPEFSRTMEIFNLWLTTGKIPDMVRGCRTVLIPKSSKPDRLKDINNWRPITIGSILLRLFSRIVTARLSKACPLNPRQRGFIRAAGCSENLKLLQTIIWSAKREHRPLGVVFVDIAKAFDTVSHQHIIHALQQREVDPHIVGLVSNMYENISTYITTKRNTHTDKIQIRVGVKQGDPMSPLLFNLAMDPLLCKLEESGKGYHRGQSSITAMAFADDLVLLSDSWENMNTNISILETFCNLTGLKTQGQKCHGFYIKPTKKSYTINDCAAWTINGTPLNMIDPGESEKYLGLQFDPWIGIARSGLSTKLDFWLQRIDQAPLKPLQKTDILKTYTIPRLIYIADHSEVKSALLETLDQKIRTAVKEWLHLPPCTCDAILYSSTRDGGLGITKLAGLIPSVQARRLHRIAQSSDDTMKCFMEKEKMEQLHKKLWIQAGGDRENIPSIWEAPPSSEDPNNVSTNSEWEAPTQKDKFPKPCNWRKNEFKKWTKLASQGRGIVNFERDKISNHWIQYYRRIPHRKLLTALQLRANVYPTREFLARGRQDQYIKACRHCDADNESCAHIIGNCPVTQDARIKRHNYICELLLEEAKKKDWVVFKEPHIRDSNKELYKPDLIFVKDGRALVVDVTVRYEAAKSSLEEAAAEKVRKYKHLETEVRHLTNAKDVTFVGFPLGARGKWHQDNFKLLTELGLSKSRQVKMAETFSTVALFSSVDIVHMFASRARKSMVM

SEQ ID NO: 752 - protein, 1665 aa, synthetic construct
MAPKKKRKVNISGSSCGSPNSADTSSDFKDLWTKLKECHDREVQGLQVKVTKLKQERILDAQRLEEFFTKNQQLREQQKVLHETIKVLEDRLRAGLCDRCAVTEEHMRKKQQEFENIRQQNLKLITELMNERNTLQEENKKLSEQLQQKIENDQQHQAAELECEEDVIPDSPITAFSFSGVNRLRRKENPHVRYIEQTHTKLEHSVCANEMRKVSKSSTHPQHNPNENEILVADTYDQSQSPMAKAHGTSSYTPDKSSFNLATVVAETLGLGVQEESETQGPMSPLGDELYHCLEGNHKKQPFESGSETPGTSESATPEGSPKRKVSSAEGAAKEEPKRRSARLSAKPPAKVEAKPKKAAAKDKSSDKKVQTKGKRGAKGKQAEVANQETKEDLPAENGETKTEESPASDEAGEKEAKSDSGSETPGTSESATPESYEQLAPQPCVGETLHSSLPRDSELFVPEEGSSEKESEDAPKTSPPTPGKHGLEQTGEEKVMVTVPDKNPPCPCCGTRVNSVLNLIEHLKVSHGKRGVCFRCAKCGKENSNYHSVVCHFKKCRGPETEKAPAGEWICEVCNRDFTTKIGLGQHKRLAHPAVRNQERIVASQPKETSNRGAHKRCWTKEEEELLIRLEAQFEGNKNINKLIAEHITTKTAKQISDKRRLLSRKPAEEPREEPGTCHHTRRAAASLRTEPEMSHHAQAEDRDNGPGRRPLPGRAAAGGRTMDEIRRHPDKGNGQQRPTKQKSEEQLQAYYKKTLEERLSAGALNTFPRAFKQVMEGRDIKLVINQTAQDCFGCLESISQIRTATRDKKDTVTREKHPKKPFQKWMKKRAIKKGNYLRFQRLFYLDRGKLAKIILDDIECLSCDIPLSEIYSVFKTRWETTGSFKSLGDFKTYGKADNTAFRELITAKEIEKNVQEMSKGSAPGPDGITLGDVVKMDPEFSRTMEIFNLWLTTGKIPDMVRGCRTVLIPKSSKPDRLKDINNWRPITIGSILLRLFSRIVTARLSKACPLNPRQRGFIRAAGCSENLKLLQTIIWSAKREHRPLGVVFVDIAKAFDTVSHQHIIHALQQREVDPHIVGLVSNMYENISTYITTKRNTHTDKIQIRVGVKQGDPMSPLLFNLAMDPLLCKLEESGKGYHRGQSSITAMAFADALVLLSDSWENMNTNISILETFCNLTGLKTQGQKCHGFYIKPTKKSYTINDCAAWTINGTPLNMIDPGESEKYLGLQFDPWIGIARSGLSTKLDFWLQRIDQAPLKPLQKTDILKTYTIPRLIYIADHSEVKSALLETLDQKIRTAVKEWLHLPPCTCDAILYSSTRDGGLGITKLAGLIPSVQARRLHRIAQSSDDTMKCFMEKEKMEQLHKKLWIQAGGDRENIPSIWEAPPSSEPPNNVSTNSEWEAPTQKDKFPKPCNWRKNEFKKWTKLASQGRGIVNFERDKISNHWIQYYRRIPHRKLLTALQLRANVYPTREFLARGRQDQYIKACRHCDADNESCAHIIGNCPVTQDARIKRHNYICELLLEEAKKKDWVVFKEPHIRDSNKELYKPDLIFVKDGRALVVDVTVRYEAAKSSLEEAAAEKVRKYKHLETEVRHLTNAKDVTFVGFPLGARGKWHQDNFKLLTELGLSKSRQVKMAETFSTVALFSSVDIVHMFASRARKSMVM

SEQ ID NO: 753 - protein, 1665 aa, synthetic construct
MAPKKKRKVNISGSSCGSPNSADTSSDFKDLWTKLKECHDREVQGLQVKVTKLKQERILDAQRLEEFFTKNQQLREQQKVLHETIKVLEDRLRAGLCDRCAVTEEHMRKKQQEFENIRQQNLKLITELMNERNTLQEENKKLSEQLQQKIENDQQHQAAELECEEDVIPDSPITAFSFSGVNRLRRKENPHVRYIEQTHTKLEHSVCANEMRKVSKSSTHPQHNPNENEILVADTYDQSQSPMAKAHGTSSYTPDKSSFNLATVVAETLGLGVQEESETQGPMSPLGDELYHCLEGNHKKQPFESGSETPGTSESATPEGSPKRKVSSAEGAAKEEPKRRSARLSAKPPAKVEAKPKKAAAKDKSSDKKVQTKGKRGAKGKQAEVANQETKEDLPAENGETKTEESPASDEAGEKEAKSDSGSETPGTSESATPESYEQLAPQPCVGETLHSSLPRDSELFVPEEGSSEKESEDAPKTSPPTPGKHGLEQTGEEKVMVTVPDKNPPCPCCGTRVNSVLNLIEHLKVSHGKRGVCFRCAKCGKENSNYHSVVCHFKKCRGPETEKAPAGEWICEVCNRDFTTKIGLGQHKRLAHPAVRNQERIVASQPKETSNRGAHKRCWTKEEEELLIRLEAQFEGNKNINKLIAEHITTKTAKQISDKRRLLSRKPAEEPREEPGTCHHTRRAAASLRTEPEMSHHAQAEDRDNGPGRRPLPGRAAAGGRTMDEIRRHPDKGNGQQRPTKQKSEEQLQAYYKKTLEERLSAGALNTFPRAFKQVMEGRDIKLVINQTAQDCFGCLESISQIRTATRDKKDTVTREKHPKKPFQKWMKKRAIKKGNYLRFQRLFYLDRGKLAKIILDDIECLSCDIPLSEIYSVFKTRWETTGSFKSLGDFKTYGKADNTAFRELITAKEIEKNVQEMSKGSAPGPDGITLGDVVKMDPEFSRTMEIFNLWLTTGKIPDMVRGCRTVLIPKSSKPDRLKDINNWRPITIGSILLRLFSRIVTARLSKACPLNPRQRGFIRAAGCSENLKLLQTIIWSAKREHRPLGVVFVDIAKAFDTVSHQHIIHALQQREVDPHIVGLVSNMYENISTYITTKRNTHTDKIQIRVGVKQGDPMSPLLFNLAMDPLLCKLEESGKGYHRGQSSITAMAFADDLVLLSDSWENMNTNISILETFCNLTGLKTQGQKCHGFYIKPTKKSYTINDCAAWTINGTPLNMIDPGESEKYLGLQFDPWIGIARSGLSTKLDFWLQRIDQAPLKPLQKTDILKTYTIHRLIYIADHSEVKSALLETLDQKIRTAVKEWLHLPPCTCDAILYSSTRDGGLGITKLAGLIPSVQARRLHRIAQSSDDTMKCFMEKEKMEQLHKKLWIQAGGDRENIPSIWEAPPSSEPPNNVSTNSEWEAPTQKDKFPKPCNWRKNEFKKWTKLASQGRGIVNFERDKISNHWIQYYRRIPHRKLLTALQLRANVYPTREFLARGRQDQYIKACRHCDADNESCAHIIGNCPVTQDARIKRHNYICELLLEEAKKKDWVVFKEPHIRDSNKELYKPDLIFVKDGRALVVDVTVRYEAAKSSLEEAAAEKVRKYKHLETEVRHLTNAKDVTFVGFPLGARGKWHQDNFKLLTELGLSKSRQVKMAETFSTVALFSSVDIVHMFASRARKSMVM

SEQ ID NO: 754 - protein, 1665 aa, synthetic construct
MAPKKKRKVNISGSSCGSPNSADTSSDFKDLWTKLKECHDREVQGLQVKVTKLKQERILDAQRLEEFFTKNQQLREQQKVLHETIKVLEDRLRAGLCDRCAVTEEHMRKKQQEFENIRQQNLKLITELMNERNTLQEENKKLSEQLQQKIENDQQHQAAELECEEDVIPDSPITAFSFSGVNRLRRKENPHVRYIEQTHTKLEHSVCANEMRKVSKSSTHPQHNPNENEILVADTYDQSQSPMAKAHGTSSYTPDKSSFNLATVVAETLGLGVQEESETQGPMSPLGDELYHCLEGNHKKQPFESGSETPGTSESATPEGSPKRKVSSAEGAAKEEPKRRSARLSAKPPAKVEAKPKKAAAKDKSSDKKVQTKGKRGAKGKQAEVANQETKEDLPAENGETKTEESPASDEAGEKEAKSDSGSETPGTSESATPESYEQLAPQPCVGETLHSSLPRDSELFVPEEGSSEKESEDAPKTSPPTPGKHGLEQTGEEKVMVTVPDKNPPCPCCGTRVNSVLNLIEHLKVSHGKRGVCFRCAKCGKENSNYHSVVCHFKKCRGPETEKAPAGEWICEVCNRDFTTKIGLGQHKRLAHPAVRNQERIVASQPKETSNRGAHKRCWTKEEEELLIRLEAQFEGNKNINKLIAEHITTKTAKQISDKRRLLSRKPAEEPREEPGTCHHTRRAAASLRTEPEMSHHAQAEDRDNGPGRRPLPGRAAAGGRTMDEIRRHPDKGNGQQRPTKQKSEEQLQAYYKKTLEERLSAGALNTFPRAFKQVMEGRDIKLVINQTAQDCFGCLESISQIRTATRDKKDTVTREKHPKKPFQKWMKKRAIKKGNYLRFQRLFYLDRGKLAKIILDDIECLSCDIPLSEIYSVFKTRWETTGSFKSLGDFKTYGKADNTAFRELITAKEIEKNVQEMSKGSAPGPDGITLGDVVKMDPEFSRTMEIFNLWLTTGKIPDMVRGCRTVLIPKSSKPDRLKDINNWRPITIGSILLRLFSRIVTARLSKACPLNPRQRGFIRAAGCSENLKLLQTIIWSAKREHRPLGVVFVDIAKAFDTVSHQHIIHALQQREVDPHIVGLVSNMYENISTYITTKRNTHTDKIQIRVGVKQGDPMSPLLFNLAMDPLLCKLEESGKGYHRGQSSITAMAFADMLVLLSDSWENMNTNISILETFCNLTGLKTQGQKCHGFYIKPTKKSYTINDCAAWTINGTPLNMIDPGESEKYLGLQFDPWIGIARSGLSTKLDFWLQRIDQAPLKPLQKTDILKTYTIPRLIYIADHSEVKSALLETLDQKIRTAVKEWLHLPPCTCDAILYSSTRDGGLGITKLAGLIPSVQARRLHRIAQSSDDTMKCFMEKEKMEQLHKKLWIQAGGDRENIPSIWEAPPSSEPPNNVSTNSEWEAPTQKDKFPKPCNWRKNEFKKWTKLASQGRGIVNFERDKISNHWIQYYRRIPHRKLLTALQLRANVYPTREFLARGRQDQYIKACRHCDADNESCAHIIGNCPVTQDARIKRHNYICELLLEEAKKKDWVVFKEPHIRDSNKELYKPDLIFVKDGRALVVDVTVRYEAAKSSLEEAAAEKVRKYKHLETEVRHLTNAKDVTFVGFPLGARGKWHQDNFKLLTELGLSKSRQVKMAETFSTVALFSSVDIVHMFASRARKSMVM

SEQ ID NO: 755 - protein, 1665 aa, synthetic construct
MAPKKKRKVNISGSSCGSPNSADTSSDFKDLWTKLKECHDREVQGLQVKVTKLKQERILDAQRLEEFFTKNQQLREQQKVLHETIKVLEDRLRAGLCDRCAVTEEHMRKKQQEFENIRQQNLKLITELMNERNTLQEENKKLSEQLQQKIENDQQHQAAELECEEDVIPDSPITAFSFSGVNRLRRKENPHVRYIEQTHTKLEHSVCANEMRKVSKSSTHPQHNPNENEILVADTYDQSQSPMAKAHGTSSYTPDKSSFNLATVVAETLGLGVQEESETQGPMSPLGDELYHCLEGNHKKQPFESGSETPGTSESATPEGSPKRKVSSAEGAAKEEPKRRSARLSAKPPAKVEAKPKKAAAKDKSSDKKVQTKGKRGAKGKQAEVANQETKEDLPAENGETKTEESPASDEAGEKEAKSDSGSETPGTSESATPESYEQLAPQPCVGETLHSSLPRDSELFVPEEGSSEKESEDAPKTSPPTPGKHGLEQTGEEKVMVTVPDKNPPCPCCGTRVNSVLNLIEHLKVSHGKRGVCFRCAKCGKENSNYHSVVCHFKKCRGPETEKAPAGEWICEVCNRDFTTKIGLGQHKRLAHPAVRNQERIVASQPKETSNRGAHKRCWTKEEEELLIRLEAQFEGNKNINKLIAEHITTKTAKQISDKRRLLSRKPAEEPREEPGTCHHTRRAAASLRTEPEMSHHAQAEDRDNGPGRRPLPGRAAAGGRTMDEIRRHPDKGNGQQRPTKQKSEEQLQAYYKKTLEERLSAGALNTFPRAFKQVMEGRDIKLVINQTAQDCFGCLESISQIRTATRDKKDTVTREKHPKKPFQKWMKKRAIKKGNYLRFQRLFYLDRGKLAKIILDDIECLSCDIPLSEIYSVFKTRWETTGSFKSLGDFKTYGKADNTAFRELITAKEIEKNVQEMQKGSAPGPDGITLGDVVKMDPEFSRTMEIFNLWLTTGKIPDMVRGCRTVLIPKSSKPDRLKDINNWRPITIGSILLRLFSRIVTARLSKACPLNPRQRGFIRAAGCSENLKLLQTIIWSAKREHRPLGVVFVDIAKAFDTVSHQHIIHALQQREVDPHIVGLVSNMYENISTYITTKRNTHTDKIQIRVGVKQGDPMSPLLFNLAMDPLLCKLEESGKGYHRGQSSITAMAFADDLVLLSDSWENMNTNISILETFCNLTGLKTQGQKCHGFYIKPTKKSYTINDCAAWTINGTPLNMIDPGESEKYLGLQFDPWIGIARSGLSTKLDFWLQRIDQAPLKPLQKTDILKTYTIPRLIYIADHSEVKSALLETLDQKIRTAVKEWLHLPPCTCDAILYSSTRDGGLGITKLAGLIPSVQARRLHRIAQSSDDTMKCFMEKEKMEQLHKKLWIQAGGDRENIPSIWEAPPSSEPPNNVSTNSEWEAPTQKDKFPKPCNWRKNEFKKWTKLASQGRGIVNFERDKISNHWIQYYRRIPHRKLLTALQLRANVYPTREFLARGRQDQYIKACRHCDADNESCAHIIGNCPVTQDARIKRHNYICELLLEEAKKKDWVVFKEPHIRDSNKELYKPDLIFVKDGRALVVDVTVRYEAAKSSLEEAAAEKVRKYKHLETEVRHLTNAKDVTFVGFPLGARGKWHQDNFKLLTELGLSKSRQVKMAETFSTVALFSSVDIVHMFASRARKSMVM

SEQ ID NO: 756 - protein, 1665 aa, synthetic construct
MAPKKKRKVNISGSSCGSPNSADTSSDFKDLWTKLKECHDREVQGLQVKVTKLKQERILDAQRLEEFFTKNQQLREQQKVLHETIKVLEDRLRAGLCDRCAVTEEHMRKKQQEFENIRQQNLKLITELMNERNTLQEENKKLSEQLQQKIENDQQHQAAELECEEDVIPDSPITAFSFSGVNRLRRKENPHVRYIEQTHTKLEHSVCANEMRKVSKSSTHPQHNPNENEILVADTYDQSQSPMAKAHGTSSYTPDKSSFNLATVVAETLGLGVQEESETQGPMSPLGDELYHCLEGNHKKQPFESGSETPGTSESATPEGSPKRKVSSAEGAAKEEPKRRSARLSAKPPAKVEAKPKKAAAKDKSSDKKVQTKGKRGAKGKQAEVANQETKEDLPAENGETKTEESPASDEAGEKEAKSDSGSETPGTSESATPESYEQLAPQPCVGETLHSSLPRDSELFVPEEGSSEKESEDAPKTSPPTPGKHGLEQTGEEKVMVTVPDKNPPCPCCGTRVNSVLNLIEHLKVSHGKRGVCFRCAKCGKENSNYHSVVCHFKKCRGPETEKAPAGEWICEVCNRDFTTKIGLGQHKRLAHPAVRNQERIVASQPKETSNRGAHKRCWTKEEEELLIRLEAQFEGNKNINKLIAEHITTKTAKQISDKRRLLSRKPAEEPREEPGTCHHTRRAAASLRTEPEMSHHAQAEDRDNGPGRRPLPGRAAAGGRTMDEIRRHPDKGNGQQRPTKQKSEEQLQAYYKKTLEERLSAGALNTFPRAFKQVMEGRDIKLVINQTAQDCFGCLESISQIRTATRDKKDTVTREKHPKKPFQKWMKKRAIKKGNYLRFQRLFYLDRGKLAKIILDDIECLSCDIPLSEIYSVFKTRWETTGSFKSLGDFKTYGKADNTAFRELITAKEIEKNVQEMSKGSAPGPDGITLGDVVKMDPEFSRTMEIFNLWLTTGKIPDMVRGCRTVLIPKSSKPDRLKDINNWRPITIGSILLRLFSRIVTARLSKACPLNPRQRGFIRAAGCSENLKLLQTIIWSAKREHRPLGVVFVDIAKAFDTVSHQHIIHALQQREVDPHIVGLVSNMYENISTYITTKRNTHTDKIQIRVGVKQGDPMSPLLFNLAMDPLLCKLEESGKGYHRGQSSITAMAFADDLVLLSDSWENMNTNISILETFCNLTGLKTQGQKCHGFYIKPTKKSYTINDCAAWTINGTPLNMIDPGESEKYLGLQFDPWIGIARSGLSTKLDFWLQRIDQAPLKPLQKTDILKTYTIQRLIYIADHSEVKSALLETLDQKIRTAVKEWLHLPPCTCDAILYSSTRDGGLGITKLAGLIPSVQARRLHRIAQSSDDTMKCFMEKEKMEQLHKKLWIQAGGDRENIPSIWEAPPSSEPPNNVSTNSEWEAPTQKDKFPKPCNWRKNEFKKWTKLASQGRGIVNFERDKISNHWIQYYRRIPHRKLLTALQLRANVYPTREFLARGRQDQYIKACRHCDADNESCAHIIGNCPVTQDARIKRHNYICELLLEEAKKKDWVVFKEPHIRDSNKELYKPDLIFVKDGRALVVDVTVRYEAAKSSLEEAAAEKVRKYKHLETEVRHLTNAKDVTFVGFPLGARGKWHQDNFKLLTELGLSKSRQVKMAETFSTVALFSSVDIVHMFASRARKSMVM

SEQ ID NO: 757 - protein, 1665 aa, synthetic construct
MAPKKKRKVNISGSSCGSPNSADTSSDFKDLWTKLKECHDREVQGLQVKVTKLKQERILDAQRLEEFFTKNQQLREQQKVLHETIKVLEDRLRAGLCDRCAVTEEHMRKKQQEFENIRQQNLKLITELMNERNTLQEENKKLSEQLQQKIENDQQHQAAELECEEDVIPDSPITAFSFSGVNRLRRKENPHVRYIEQTHTKLEHSVCANEMRKVSKSSTHPQHNPNENEILVADTYDQSQSPMAKAHGTSSYTPDKSSFNLATVVAETLGLGVQEESETQGPMSPLGDELYHCLEGNHKKQPFESGSETPGTSESATPEGSPKRKVSSAEGAAKEEPKRRSARLSAKPPAKVEAKPKKAAAKDKSSDKKVQTKGKRGAKGKQAEVANQETKEDLPAENGETKTEESPASDEAGEKEAKSDSGSETPGTSESATPESYEQLAPQPCVGETLHSSLPRDSELFVPEEGSSEKESEDAPKTSPPTPGKHGLEQTGEEKVMVTVPDKNPPCPCCGTRVNSVLNLIEHLKVSHGKRGVCFRCAKCGKENSNYHSVVCHFKKCRGPETEKAPAGEWICEVCNRDFTTKIGLGQHKRLAHPAVRNQERIVASQPKETSNRGAHKRCWTKEEEELLIRLEAQFEGNKNINKLIAEHITTKTAKQISDKRRLLSRKPAEEPREEPGTCHHTRRAAASLRTEPEMSHHAQAEDRDNGPGRRPLPGRAAAGGRTMDEIRRHPDKGNGQQRPTKQKSEEQLQAYYKKTLEERLSAGALNTFPRAFKQVMEGRDIKLVINQTAQDCFGCLESISQIRTATRDKKDTVTREKHPKKPFQKWMKKRAIKKGNYLRFQRLFYLDRGKLAKIILDDIECLSCDIPLSEIYSVFKTRWETTGSFKSLGDFKTYGKADNTAFRELITAKEIEKNVQEMSKGSAPGPDGITLGDVVKMDPEFSRTMEIFNLWLTTGKIPDMVRGCRTVLIPKSSKPDRLKDINNWRPITIGSILLRLFSRIVTARLSKACPLNPRQRGFIRAAGCSENLKLLQTIIWSAKREHRPLGVVFVDIAKAFDTVSHQHIIHALQQREVDPHIVGLVSNMYENISTYITTKRNTHTDKIQIRVGVKQGDPMSPLLYNLAMDPLLCKLEESGKGYHRGQSSITAMAFADDLVLLSDSWENMNTNISILETFCNLTGLKTQGQKCHGFYIKPTKKSYTINDCAAWTINGTPLNMIDPGESEKYLGLQFDPWIGIARSGLSTKLDFWLQRIDQAPLKPLQKTDILKTYTIPRLIYIADHSEVKSALLETLDQKIRTAVKEWLHLPPCTCDAILYSSTRDGGLGITKLAGLIPSVQARRLHRIAQSSDDTMKCFMEKEKMEQLHKKLWIQAGGDRENIPSIWEAPPSSEPPNNVSTNSEWEAPTQKDKFPKPCNWRKNEFKKWTKLASQGRGIVNFERDKISNHWIQYYRRIPHRKLLTALQLRANVYPTREFLARGRQDQYIKACRHCDADNESCAHIIGNCPVTQDARIKRHNYICELLLEEAKKKDWVVFKEPHIRDSNKELYKPDLIFVKDGRALVVDVTVRYEAAKSSLEEAAAEKVRKYKHLETEVRHLTNAKDVTFVGFPLGARGKWHQDNFKLLTELGLSKSRQVKMAETFSTVALFSSVDIVHMFASRARKSMVM

SEQ ID NO: 758 - DNA, 2492 bp, synthetic construct
  source 1..2492: mol_type = other DNA
gagtaactatgactctcttaagacgggatcatagttactaactgggcagagctgcagaggttacacctcctcgtggtcccgctggatgcccttcggggtaaccaagttaacctctgccccagtctgggaattatagctacttcccccctatcgtctggcctcaccaaccattcgatagattcggcctggtgatccaaattcctggcaacgatttttcgtcgctgcccaaagccttgcctacgggcacagttgggctcagtcatacagcacttgagggggtgttgtttgacttatactactcctctaactggactggcaaataccgtacgtcgacgcggcctactcgacggatcgatccgaacaaacgacccaacacccgtgcgttttattctgtctttttattgccgatcccctcagaagaactcgtcaagaaggcgatagaaggcgatgcgctgcgaatcgggagcggcgataccgtaaagcacgaggaagcggtcagcccattcgccgccaagctcttcagcaatatcacgggtagccaacgctatgtcctgatagcggtcggccgctttacttgtacagctcgtccatgccgagagtgatcccggcggcggtcacgaactccagcaggaccatgtgatcgcgcttctcgttggggtctttgctcagggcggactgggtgctcaggtagtggttgtcgggcagcagcacggggccgtcgccgatgggggtgttctgctggtagtggtcggccagctgcacgctgccgtcctcgatgttgtggcggatcttgaagttcaccttgatgccgttcttctgcttgtcggccatgatatagacgttgtggctgttgtagttgtactccagcttgtgccccaggatgttgccgtcctccttgaagtcgatgcccttcagctcgatgcggttcaccagggtgtcgccctcgaacttcacctcggcgcgggtcttgtagttgccgtcgtccttgaagaagatggtgcgctcctggacgtagccttcgggcatggcggacttgaagaagtcgtgctgcttcatgtggtcggggtagcggctgaagcactgcacgccgtaggtcagggtggtcacgagggtgggccagggcacgggcagcttgccggtggtgcagatgaacttcagggtcagcttgccgtaggtggcatcgccctcgccctcgccggacacgctgaacttgtggccgtttacgtcgccgtccagctcgaccaggatgggcaccaccccggtgaacagctcctcgcccttgctcaccatggtggcgaattcgaagcttgagctcgagatctgagtccggtagcgctagcggatctgacggttcactaaaccagctctgcttatatagacctcccaccgtacacgcctaccgcccatttgcgtcaatggggcggagttgttacgacattttggaaagtcccgttgattttggtgccaaaacaaactcccattgacgtcaatggggtggagacttggaaatccccgtgagtcaaaccgctatccacgcccattgatgtactgccaaaaccgcatcaccatggtaatagcgatgactaatacgtagatgtactgccaagtaggaaagtcccataaggtcatgtactgggcataatgccaggcgggccatttaccgtcattgacgtcaatagggggcgtacttggcatatgatacacttgatgtactgccaagtgggcagtttaccgtaaatactccacccattgacgtcaatggaaagtccctattggcgttactatgggaacatacgtcattattgacgtcaatgggcgggggtcgttgggcggtcagccaggcgggccatttaccgtaagttatgtaacgcggaactccatatatgggctatgaactaatgaccccgtaattgattactattaaattcctgcaggaattcgaagcttgatttatctatactgttctgctttatatattgtttctgctgtattactatatgttgttttattgtaattattgttttgtttcatattggtcttgctctgttatatattgctcttgtcgcatggttacttattgttttgctgtgttactatcaattctttaataaaactacccctggtactcctgctctgttaccttggcactggaaaggtcgagacagtaagttggaactcgtattcatgacgtgtcacattcacctaaatttacacaaaatactaattggacttgtcaaaattttctaccaaattggacaattttaccggattggacataggtggacgggccacctttacttaactcggaaaagaaacatatataattttatgtgtttgttaaatagccaaatgcctcgtcatcccggtagcgctagcaccggtaaaaaaaaaaaaaaaaaaaaaaaaaaaaaaaacgttgactaaaaaaaaaaaaaaaaaaaaaaaaaaaaaaaaaaaaaaaaaaaaaaaaaaaaaaaaaaaaaaaaaaaaaa

SEQ ID NO: 759 - DNA, 2338 bp, synthetic construct
  source 1..2338: mol_type = other DNA
gagtaactatgactctcttaagacgggatcatagttacaactgggcatagctgcggggggtcacacctccccgtggtcccgccggatacctcttgtgggtaaccgagttgaccccctgccccagtgcgaacggagttatggttacttcctccctatcaattggcctcaccaaccaattgatagtaatatcccaaggtgaaacaaagttctgaccttgcgtctaaattcctagcccacggtaatagttgggcttgtccggcaagttctgttggggtactgtcggacttgtcgaaatccccacaaatttggatatacgaataccgtacgtcgacgcggcctactcgacggatcgatccgaacaaacgacccaacacccgtgcgttttattctgtctttttattgccgatcccctcagaagaactcgtcaagaaggcgatagaaggcgatgcgctgcgaatcgggagcggcgataccgtaaagcacgaggaagcggtcagcccattcgccgccaagctcttcagcaatatcacgggtagccaacgctatgtcctgatagcggtcggccgctttacttgtacagctcgtccatgccgagagtgatcccggcggcggtcacgaactccagcaggaccatgtgatcgcgcttctcgttggggtctttgctcagggcggactgggtgctcaggtagtggttgtcgggcagcagcacggggccgtcgccgatgggggtgttctgctggtagtggtcggccagctgcacgctgccgtcctcgatgttgtggcggatcttgaagttcaccttgatgccgttcttctgcttgtcggccatgatatagacgttgtggctgttgtagttgtactccagcttgtgccccaggatgttgccgtcctccttgaagtcgatgcccttcagctcgatgcggttcaccagggtgtcgccctcgaacttcacctcggcgcgggtcttgtagttgccgtcgtccttgaagaagatggtgcgctcctggacgtagccttcgggcatggcggacttgaagaagtcgtgctgcttcatgtggtcggggtagcggctgaagcactgcacgccgtaggtcagggtggtcacgagggtgggccagggcacgggcagcttgccggtggtgcagatgaacttcagggtcagcttgccgtaggtggcatcgccctcgccctcgccggacacgctgaacttgtggccgtttacgtcgccgtccagctcgaccaggatgggcaccaccccggtgaacagctcctcgcccttgctcaccatggtggcgaattcgaagcttgagctcgagatctgagtccggtagcgctagcggatctgacggttcactaaaccagctctgcttatatagacctcccaccgtacacgcctaccgcccatttgcgtcaatggggcggagttgttacgacattttggaaagtcccgttgattttggtgccaaaacaaactcccattgacgtcaatggggtggagacttggaaatccccgtgagtcaaaccgctatccacgcccattgatgtactgccaaaaccgcatcaccatggtaatagcgatgactaatacgtagatgtactgccaagtaggaaagtcccataaggtcatgtactgggcataatgccaggcgggccatttaccgtcattgacgtcaatagggggcgtacttggcatatgatacacttgatgtactgccaagtgggcagtttaccgtaaatactccacccattgacgtcaatggaaagtccctattggcgttactatgggaacatacgtcattattgacgtcaatgggcgggggtcgttgggcggtcagccaggcgggccatttaccgtaagttatgtaacgcggaactccatatatgggctatgaactaatgaccccgtaattgattactattaaattcctgcaggaattcgaagcttgatacattttcattatattactcttgatgtattaggtaatagattagtataagtagtatgtagatgtattagattgtaatgtagtattgtagtattgtagaaatgtagtattgcaataaactggactgggatctcgtgatgattacctttaatcatgacgctcactggacatgacttggtaggtggacgggccaccttcataaaacccggaaaaagtacacatactcgtaatgtgttcgtaaatagccaaatgcctcgtcatcccggtagcgctagcaccggtaaaaaaaaaaaaaaaaaaaaaaaaaaaaaaaacgttgactaaaaaaaaaaaaaaaaaaaaaaaaaaaaaaaaaaaaaaaaaaaaaaaaaaaaaaaaaaaaaaaaaaaaaa

SEQ ID NO: 760 - protein, 1665 aa, synthetic construct
MAPKKKRKVNISGSSCGSPNSADTSSDFKDLWTKLKECHDREVQGLQVKVTKLKQERILDAQRLEEFFTKNQQLREQQKVLHETIKVLEDRLRAGLCDRCAVTEEHMRKKQQEFENIRQQNLKLITELMNERNTLQEENKKLSEQLQQKIENDQQHQAAELECEEDVIPDSPITAFSFSGVNRLRRKENPHVRYIEQTHTKLEHSVCANEMRKVSKSSTHPQHNPNENEILVADTYDQSQSPMAKAHGTSSYTPDKSSFNLATVVAETLGLGVQEESETQGPMSPLGDELYHCLEGNHKKQPFESGSETPGTSESATPEGSPKRKVSSAEGAAKEEPKRRSARLSAKPPAKVEAKPKKAAAKDKSSDKKVQTKGKRGAKGKQAEVANQETKEDLPAENGETKTEESPASDEAGEKEAKSDSGSETPGTSESATPESYEQLAPQPCVGETLHSSLPRDSELFVPEEGSSEKESEDAPKTSPPTPGKHGLEQTGEEKVMVTVPDKNPPCPCCGTRVNSVLNLIEHLKVSHGKRGVCFRCAKCGKENSNYHSVVCHFKKCRGPETEKAPAGEWICEVCNRDFTTKIGLGQHKRLAHPAVRNQERIVASQPKETSNRGAHKRCWTKEEEELLIRLEAQFEGNKNINKLIAEHITTKTAKQISDKRRLLSRKPAEEPREEPGTCHHTRRAAASLRTEPEMSHHAQAEDRDNGPGRRPLPGRAAAGGRTMDEIRRHPDKGNGQQRPTKQKSEEQLQAYYKKTLEERLSAGALNTFPRAFKQVMEGRDIKLVINQTAQDCFGCLESISQIRTATRDKKDTVTREKHPKKPFQKWMKKRAIKKGNYLRFQRLFYLDRGKLAKIILDDIECLSCDIPLSEIYSVFKTRWETTGSFKSLGDFKTYGKADNTAFRELITAKEIEKNVQEMSKGSAPGPDGITLGDVVKMDPEFSRTMEIFNLWLTTGKIPDMVRGCRTVLIPKSSKPDRLKDINNWRPITIGSILLRLFSRIVTARLSKACPLNPRQRGFIRAAGCSENLKLLQTIIWSAKREHRPLGVVFVDIAKAFDTVSHQHIIHALQQREVDPHIVGLVSNMYENISTYITTKRNTHTDKIQIRVGVKQGDPMSPLLFNIAMDPLLCKLEESGKGYHRGQSSITAMAFADDLVLLSDSWENMNTNISILETFCNLTGLKTQGQKCHGFYIKPTKKSYTINDCAAWTINGTPLNMIDPGESEKYLGLQFDPWIGIARSGLSTKLDFWLQRIDQAPLKPLQKTDILKTYTIPRLIYIADHSEVKSALLETLDQKIRTAVKEWLHLPPCTCDAILYSSTRDGGLGITKLAGLIPSVQARRLHRIAQSSDDTMKCFMEKEKMEQLHKKLWIQAGGDRENIPSIWEAPPSSEPPNNVSTNSEWEAPTQKDKFPKPCNWRKNEFKKWTKLASQGRGIVNFERDKISNHWIQYYRRIPHRKLLTALQLRANVYPTREFLARGRQDQYIKACRHCDADNESCAHIIGNCPVTQDARIKRHNYICELLLEEAKKKDWVVFKEPHIRDSNKELYKPDLIFVKDGRALVVDVTVRYEAAKSSLEEAAAEKVRKYKHLETEVRHLTNAKDVTFVGFPLGARGKWHQDNFKLLTELGLSKSRQVKMAETFSTVALFSSVDIVHMFASRARKSMVM

SEQ ID NO: 761 - protein, 1665 aa, synthetic construct
MAPKKKRKVNISGSSCGSPNSADTSSDFKDLWTKLKECHDREVQGLQVKVTKLKQERILDAQRLEEFFTKNQQLREQQKVLHETIKVLEDRLRAGLCDRCAVTEEHMRKKQQEFENIRQQNLKLITELMNERNTLQEENKKLSEQLQQKIENDQQHQAAELECEEDVIPDSPITAFSFSGVNRLRRKENPHVRYIEQTHTKLEHSVCANEMRKVSKSSTHPQHNPNENEILVADTYDQSQSPMAKAHGTSSYTPDKSSFNLATVVAETLGLGVQEESETQGPMSPLGDELYHCLEGNHKKQPFESGSETPGTSESATPEGSPKRKVSSAEGAAKEEPKRRSARLSAKPPAKVEAKPKKAAAKDKSSDKKVQTKGKRGAKGKQAEVANQETKEDLPAENGETKTEESPASDEAGEKEAKSDSGSETPGTSESATPESYEQLAPQPCVGETLHSSLPRDSELFVPEEGSSEKESEDAPKTSPPTPGKHGLEQTGEEKVMVTVPDKNPPCPCCGTRVNSVLNLIEHLKVSHGKRGVCFRCAKCGKENSNYHSVVCHFKKCRGPETEKAPAGEWICEVCNRDFTTKIGLGQHKRLAHPAVRNQERIVASQPKETSNRGAHKRCWTKEEEELLIRLEAQFEGNKNINKLIAEHITTKTAKQISDKRRLLSRKPAEEPREEPGTCHHTRRAAASLRTEPEMSHHAQAEDRDNGPGRRPLPGRAAAGGRTMDEIRRHPDKGNGQQRPTKQKSEEQLQAYYKKTLEERLSAGALNTFPRAFKQVMEGRDIKLVINQTAQDCFGCLESISQIRTATRDKKDTVTREKHPKKPFQKWMKKRAIKKGNYLRFQRLFYLDRGKLAKIILDDIECLSCDIPLSEIYSVFKTRWETTGSFKSLGDFKTYGKADNTAFRELITAKEIEKNVQEMSKGSAPGPDGITLGDVVKMDPEFSRTMEIFNLWLTTGKIPDMVRGCRTVLIPKSSKPDRLKDINNWRPITIGSILLRLFSRIVTARLSKACPLNPRQRGFIRAAGCSENLKLLQTIIWSAKREHRPLGVVFVDIAKAFDTVSHQHIIHALQQREVDPHIVGLVSNMYENISTYITTKRNTHTDKIQIRVGVKQGDPMSPLLFNLAMDPLICKLEESGKGYHRGQSSITAMAFADDLVLLSDSWENMNTNISILETFCNLTGLKTQGQKCHGFYIKPTKKSYTINDCAAWTINGTPLNMIDPGESEKYLGLQFDPWIGIARSGLSTKLDFWLQRIDQAPLKPLQKTDILKTYTIPRLIYIADHSEVKSALLETLDQKIRTAVKEWLHLPPCTCDAILYSSTRDGGLGITKLAGLIPSVQARRLHRIAQSSDDTMKCFMEKEKMEQLHKKLWIQAGGDRENIPSIWEAPPSSEPPNNVSTNSEWEAPTQKDKFPKPCNWRKNEFKKWTKLASQGRGIVNFERDKISNHWIQYYRRIPHRKLLTALQLRANVYPTREFLARGRQDQYIKACRHCDADNESCAHIIGNCPVTQDARIKRHNYICELLLEEAKKKDWVVFKEPHIRDSNKELYKPDLIFVKDGRALVVDVTVRYEAAKSSLEEAAAEKVRKYKHLETEVRHLTNAKDVTFVGFPLGARGKWHQDNFKLLTELGLSKSRQVKMAETFSTVALFSSVDIVHMFASRARKSMVM

SEQ ID NO: 762 - protein, 1665 aa, synthetic construct
MAPKKKRKVNISGSSCGSPNSADTSSDFKDLWTKLKECHDREVQGLQVKVTKLKQERILDAQRLEEFFTKNQQLREQQKVLHETIKVLEDRLRAGLCDRCAVTEEHMRKKQQEFENIRQQNLKLITELMNERNTLQEENKKLSEQLQQKIENDQQHQAAELECEEDVIPDSPITAFSFSGVNRLRRKENPHVRYIEQTHTKLEHSVCANEMRKVSKSSTHPQHNPNENEILVADTYDQSQSPMAKAHGTSSYTPDKSSFNLATVVAETLGLGVQEESETQGPMSPLGDELYHCLEGNHKKQPFESGSETPGTSESATPEGSPKRKVSSAEGAAKEEPKRRSARLSAKPPAKVEAKPKKAAAKDKSSDKKVQTKGKRGAKGKQAEVANQETKEDLPAENGETKTEESPASDEAGEKEAKSDSGSETPGTSESATPESYEQLAPQPCVGETLHSSLPRDSELFVPEEGSSEKESEDAPKTSPPTPGKHGLEQTGEEKVMVTVPDKNPPCPCCGTRVNSVLNLIEHLKVSHGKRGVCFRCAKCGKENSNYHSVVCHFKKCRGPETEKAPAGEWICEVCNRDFTTKIGLGQHKRLAHPAVRNQERIVASQPKETSNRGAHKRCWTKEEEELLIRLEAQFEGNKNINKLIAEHITTKTAKQISDKRRLLSRKPAEEPREEPGTCHHTRRAAASLRTEPEMSHHAQAEDRDNGPGRRPLPGRAAAGGRTMDEIRRHPDKGNGQQRPTKQKSEEQLQAYYKKTLEERLSAGALNTFPRAFKQVMEGRDIKLVINQTAQDCFGCLESISQIRTATRDKKDTVTREKHPKKPFQKWMKKRAIKKGNYLRFQRLFYLDRGKLAKIILDDIECLSCDIPLSEIYSVFKTRWETTGSFKSLGDFKTYGKADNTAFRELITAKEIEKNVQEMSKGSAPGPDGITLGDVVKMDPEFSRTMEIFNLWLTTGKIPDMVRGCRTVLIPKSSKPDRLKDINNWRPITIGSILLRLFSRIVTARLSKACPLNPRQRGFIRAAGCSENLKLLQTIIWSAKREHRPLGVVFVDIAKAFDTVSHQHIIHALQQREVDPHIVGLVSNMYENISTYITTKRNTHTDKIQIRVGVKQGDPMSPLLFNLAMDPLLCKLEESGKGYHRGQSSITAMAFADDLVLLSDSWENMNTNISILETFCNLTGLKTQGQKCHGFYIKPTKKSYTINDCAAWTINGTPLNMIDPGESEKYLGLQFDPWIGIARSGLSTKLDFWLQRIDQAPLKPLQKTDILKTYTIPRLIYIADHSEVKSALLETLDQKIRTAVKEWLHLPPCTCDAILYSSTRDGGLGITKLAGLIPSVQARRLHRIAQSSDDTMKCFMEKEKMEQLHKKLWIQAGGDRENIPSIWEAPPSSEPPNNVSTNSEWEAPTQKDKFPKPCNWRKNEFKKWTKLASQGRGIVNYERDKISNHWIQYYRRIPHRKLLTALQLRANVYPTREFLARGRQDQYIKACRHCDADNESCAHIIGNCPVTQDARIKRHNYICELLLEEAKKKDWVVFKEPHIRDSNKELYKPDLIFVKDGRALVVDVTVRYEAAKSSLEEAAAEKVRKYKHLETEVRHLTNAKDVTFVGFPLGARGKWHQDNFKLLTELGLSKSRQVKMAETFSTVALFSSVDIVHMFASRARKSMVM

SEQ ID NO: 763 - protein, 1665 aa, synthetic construct
MAPKKKRKVNISGSSCGSPNSADTSSDFKDLWTKLKECHDREVQGLQVKVTKLKQERILDAQRLEEFFTKNQQLREQQKVLHETIKVLEDRLRAGLCDRCAVTEEHMRKKQQEFENIRQQNLKLITELMNERNTLQEENKKLSEQLQQKIENDQQHQAAELECEEDVIPDSPITAFSFSGVNRLRRKENPHVRYIEQTHTKLEHSVCANEMRKVSKSSTHPQHNPNENEILVADTYDQSQSPMAKAHGTSSYTPDKSSFNLATVVAETLGLGVQEESETQGPMSPLGDELYHCLEGNHKKQPFESGSETPGTSESATPEGSPKRKVSSAEGAAKEEPKRRSARLSAKPPAKVEAKPKKAAAKDKSSDKKVQTKGKRGAKGKQAEVANQETKEDLPAENGETKTEESPASDEAGEKEAKSDSGSETPGTSESATPESYEQLAPQPCVGETLHSSLPRDSELFVPEEGSSEKESEDAPKTSPPTPGKHGLEQTGEEKVMVTVPDKNPPCPCCGTRVNSVLNLIEHLKVSHGKRGVCFRCAKCGKENSNYHSVVCHFKKCRGPETEKAPAGEWICEVCNRDFTTKIGLGQHKRLAHPAVRNQERIVASQPKETSNRGAHKRCWTKEEEELLIRLEAQFEGNKNINKLIAEHITTKTAKQISDKRRLLSRKPAEEPREEPGTCHHTRRAAASLRTEPEMSHHAQAEDRDNGPGRRPLPGRAAAGGRTMDEIRRHPDKGNGQQRPTKQKSEEQLQAYYKKTLEERLSAGALNTFPRAFKQVMEGRDIKLVINQTAQDCFGCLESISQIRTATRDKKDTVTREKHPKKPFQKWMKKRAIKKGNYLRFQRLFYLDRGKLAKIILDDIECLSCDIPLSEIYSVFKTRWETTGSFKSLGDFKTYGKADNTAFRELITAKEIEKNVQEMSKGSAPGPDGITLGDVVKMDPEFSRTMEIFNLWLTTGKIPDMVRGCRTVLIPKSSKPDRLKDINNWRPITIGSILLRLFSRIVTARLSKACPLNPRQRGFIRAAGCSENLKLLQTIIWSAKREHRPLGVVFVDIAKAFDTVSHQHIIHALQQREVDPHIVGLVSNMYENISTYITTKRNTHTDKIQIRVGVKQGDPMSPLLFNLAMDPLLCKLEESGKGYHRGQSSITAMAFADDLVLLSDSWENMNTNISILETFCNLTGLKTQGQKCHGFYIKPTKKSYTINDCAAWTINGTPLNMIDPGESEKYLGLQFDPWIGIARSGLSTKLDFWLQRIDQAPLKPLQKTDILKTYTIPRLIYIADHSEVKSALLETLDQKIRTAVKEWLHLPPCTCDAILYSSTRDGGLGITKLAGLIPSVQARRLHRIAQSSDDTMKCFMEKEKMEQLHKKLWIQAGGDRENIPSIWEAPPSSEPPNNVSTNSEWEAPTQKDKFPKPCNWRKNEFKKWTKLASQGRGIVNFERDKISNHWIRYYRRIPHRKLLTALQLRANVYPTREFLARGRQDQYIKACRHCDADNESCAHIIGNCPVTQDARIKRHNYICELLLEEAKKKDWVVFKEPHIRDSNKELYKPDLIFVKDGRALVVDVTVRYEAAKSSLEEAAAEKVRKYKHLETEVRHLTNAKDVTFVGFPLGARGKWHQDNFKLLTELGLSKSRQVKMAETFSTVALFSSVDIVHMFASRARKSMVM

SEQ ID NO: 764 - protein, 1259 aa, synthetic construct
MGRPTRISFVSVATQTSPLDLRDNLVSCSTKDHGGLLEVRFEIRGLEFVNSDLVGPKGQQSPTLTDYLALLPEVYEISNSLSLRDENTCPTPVEIENEEEESSPLGATARTSPLPSTPVSRSRDDLPTEGTPVVKIPDRNTSCPCCGNRMGKLSGLIEHLKRAHGKKKILFQCARCGRTDVRHHSIACHFPKCKGPVEASPERSWKCEECEKTFETKIGLGQHKRLVHPVTRNLERIAATRPKAGTMRGAHRRCWTEDEIELLRKLDKQYEGQKNINKLIAEHIPTKTTKQISDKRRDLHKSPVKKGKDHGRKKHLELEGEHLAEGEHLVCIGSELEGGLRSRYRKTIAEWVTSGKLSILHGMFEQVIEGEEDPAIVADRAMKDCFACLASKSVELKAGQGRPCQRAQTARPSEPPKGWMKKRARKRGQFLRFQRLFYLDRGKLAGIILDDVESLKCGIPQDEIHDVFKSRWESPGTFKGLGAFRSKGQADNSAFEAMITAREISKNIREMNKNSAPGPDRLSLRDIIKIDPHCVQLMEVFNLWLVTGIVPDVVKECRTVLISKSSLPERQMDINNWRPITIGSIILRLFSRILTARLAKACPINPRQKGFIRSAGCAENLKLLQLLIKNAKKEHRPLGVVFIDLAKAFDTVSHHHLIAVLKQKGVDHHIITLISNMYQNIRTRITMKNEQSDPIGIQIGVKQGDPMSPLLFNLSVDPLLCKLEEEGNGYHHGSKCVTSMAFADDLVLLSGSWEGMQSNIKILEAFCDLTGLRTQGEKCHGFYIQPTKDSYTINDCPPWQINGTPLNMIEPGSSEKYLGLRIDPWTGISKPELLMKIRDWLQRIGEAPLKPFQKVDILKGYTIPRLIYLADQADVKATYLEELDLAIRTTVKEWLHLPPSTCDAILYSSTRDGGLGITRLSGLIPSIQARRLHRIAQSSDDVIRSIVKQEGIDKEFEKLWLIAGGDKEKIPSIWDPSAIRVTSEELGEEELVSEWEIPTPKTIFPKPCDWRKQEFKNWTKLQSQGRGIANFEKDKISNNWLERYRGIPHRKLLTALQLRANVYPTREFLARGRQESHIKSCRHCQAENESSAHIIGYCPAVQDARIKRHNQLCDLLAVEVKRKDWIVFQEPILKDEQNEIYKPDLVFVKGDQAIVIDVTIRYESKLSSLADAAAEKVKKYCHLKSQIQELTNAKNITFKGFPVGARGKWYSGNYEVLKALGISNSRQDKIARCMSRKALFTSVDIIHMFVSHSRSIVRT

SEQ ID NO: 765 - protein, 1251 aa, synthetic construct
MGRPIRVAFVSVATQTSPLDLRDDVVIKSIIDHREVVGEEIEYRGLEFINSQIVGVMAHPPTPIETLAMLPDVYEVPDVGPRGATTSPHLVEVESEEEVLSPPGATAHPIQIPSTPILGAGSEHPTEGTPVVKVPDNNPPCPCCGNRMGKMSGLIEHLRRAHGKRKILFQCARCGRTNVKHHSIACHFPKCKGDITSPPKGDWVCEECGKAFETKIGLGQHKRLVHPAARNIERIIASRPKEGTARGLHRQCWTEEEVELLKRLDKQYEGSKNINKLIAEHIPSKTAKQISDKRRGLHKSPIKRGKEQGGKKLLEEEGEHLVETGSHENGGLRSHYRRTVSEWITSEKLPILQGTFESVLEGSGEPSTLVDEAVDESYARMFRTSIELKACQERKQRMARRARPSEPPKGWMKRRAKKRGQFLRFQRLFHLDRGKLAGIILDDVESLKCEIPLDEVHSVFKSRWESPGTFKGLGAFRTNGQADNSAFEAMITAKEISKNIKEMSKNAAPGPDGLTLRDLIKMDPECDQLMEVFNLWLVTGSIPDMVRECRTVLISKSALPERQRDINNWRPITIGSILLRLFSRILTARLTKACPINPRQRGFIKSAGCAENLKLLQLLIKNAKKEHRPLGIVFVDLAKAFDTVSHHHIIMALKQRGVDNHIIALIKNLYSNISTRIYLKNEQSDPIGIHIGVKQGDPMSPILFNLSIDPLLCKLEEEGNGFQHCSRTITALAFADDLVLLSGSWEGMERNIEILEAFCELTGLKTQGEKCHGFYIKPTKDSYTINDCPAWTINGTPLNMIEPGSTEKYLGLQIDPWVGISKPELRMKIEDWLQRIGRAPLKPFQKVDILKGYTIPRLIYLADQADVKVTYLESLDLIIRTTVKEWLHLPTSTCDAILYSNTRDGGLGITRLVGLIPNIQARRLHRIAQSSDELIRSVVKEEGIEREFEKLWVTAGGKKDKIPSIWDPGTVMIISEGVGGEEPASEWEIPAPKAIFPRPCDWRKQEFANWTKLLSQGRGISNFEKDKISNSWLEYYRGIPHRKLITALQLRANVYPTREFLARGRQEYQIKACRHCQAENESCAHIIGFCPAVQDARIKRHNQLCELLANEAKKKDWIIFNEPVLRDEQNELYKPDLIFVKENQAMVVDITIRYESKITSLVDAAAEKVKKYEHLKIQIQDLTNCENIKFYGFPIGARGKWYQGNYQLLTELGLSSSRQEKVARQMSKRALFTSVDIMHMFMSKSRSVVRS

SEQ ID NO: 766 - protein, 1388 aa, synthetic construct
MASCPKLGPPISAGAMSLESGLTTHSVLAIEHGPNSLANSGSDFGGGGLGLPVCLLRVSVGTQTSRSDWVDLVSWSHPGPSSKSQRVDLVSLFPKHRVDLLSKNDQVDLVAQFLPSKFPPNLAENDLALLVNLEFYRSDLHVYECVHFAADWEGLSGLPEVYEQLAPQPCVGETLHSSLPRDSEPFVPEEGSSEKESEDAPKTSPPTPGKHGEQTGEEKVVVTVPDKNPPCPCCGTRVNSVLNRIEHLKVSHGKRGVCFRCAKCGKENSNYHSVVCHFPKCRGPETEKAPAGEWIYEVCNRNFTTKIGLGQHKRLAHPAVRNQERIVASQPKETSNRGAHKRCWTKEEEELLIRLEAQFEGNKNINKLIAEHITTKTAKQISDKRRLLPRKPAEETREEPGVCHRTRRAAAGLRTEPEMSHHAQAEARDNGPGRRPLPGRAAAGGRTMDEIRHHPDKGNGRQRTTKQKSEGQLQAYYKKTLEERLSAGALNTFPRAFKQVTEGRDIQLVINQTAQSCFGCLESISQIRTATRDKKDTVTREERPKKPFQKWMKDRAIKKGNYLRFQRLFYLDRGKLAKIILDDIECLSCDIPPSEIYSVFKTRWETTGNFKSLGDFKTYGKADNTAFRELITAKEIEKNVQEMSKGSAPGPDGITLGDVVKMDPEFSRTMEIFNLWLTTGKIPDMVRGCRTVLIPKSTKPDRLKDINNWRPITIGSILLRLFSRIVTARLSKACPLNPRQRGFIRAAGCSENLKLLQTIIWSAKREHRPLGVVFVDIAKAFDTVSHQHIIHALQQREVDPHIVGLVSNMYENISTYITTKRNTHTDKIQIRVGVKQGDPMSPLLFNLAMDPLLCKLEESGKGYHRGQSSITAMAFADDLVLLSDSWENMNTNISILETFCNLTGLKTQGQKCHGFYIKPTKDSYTINDCAAWTINGTPLNMIDPGESEKYLGLQFDPWIGIARSGLSTKLDFWLQRIDQAPLKPLQKTDILKTYTIPRLIYIADHSEVKTGLLETLDQKIRTAVKEWLHLPPCTCDAILYSSTRDGGLGITKLAGLIPSVQARRLHRIAQSSDETMKCFMEKEKMEQLHKKLWIQAGGDRENIPSIWEAPPSIEPPNNVSTNSEWEAPTQKDKFPKPCNWRKNEFKKWTKLASQGRGIVNFERDKISNPWIQYYRRIPHRKLLTALQLRANVYPTREFLARGRQDQYIKACRHCDADIESCAHIIGNCPVTQDARIKRHNYICELLLEEAKKKDWVVFKEPHIRDSNKELYKPDLIFVKDARALVVDVTVRYEAAKSSLEEAAAEKVRKYKHLEMEVRHLTNAKDVTFVGFPLGARGKWHQDNFKLLTELGLSKSRQVKMAETFSTVALFSSVDIVHMFASRARQMVM

SEQ ID NO: 767 - protein, 1389 aa, synthetic construct
MASCPKPGPPVSAGAMSLESGLTTHSVLAIERGPNSLANSGSDFGGGGLGLPVCLLRVSVGTQTSRSDWVDLVSWSHPGPSSKSQRVDLVSLFPKHRVDLLSKNDQVDLVAQFLPSKFPPNLAENDLALLVNLEFYRSDLHVYECVHFAADWEGLSGLPEVYEQLAPQPCVGETLHSSLPRDSEPFVPEEGSSEKESEDAPKTSPPTPGKHGEQTGEEKVVVTVPDKNPPCPCCGTRVNSVLNRIEHLKVSHGKRGVCFRCAKCGKENSNYHSVVCHFPKCRGPETEKAPAGEWIYEVCNRNFTTKIGLGQHKRLAHPAVRNQERIVASQPKETSNRGAHKRCWTKEEEELLIRLEAQFEGNKNINKLIAEHITTKTAKQISDKRRLLPRKPAEETREEPGVCHRTRRAAAGLRTEPEMSHHAQAEARDNGPGRRPLPGRAAAGGRTMDEIRHHPDKGNGRQRTTKQKSEGQLQAYYKKTLEERLSAGALNTFPRAFKQVTEGRDIQLVINQTAQSCFGCLESISQIRTATRDKKDTVTREERPKKPFQKWMKDRAIKKGNYLRFQRLFYLDRGKLAKIILDDIECLSCDIPPSEIYSVFKTRWETTGNFKSLGDFKTYGKADNTAFRELITAKEIEKNVQEMSKGSAPGPDGITLGDVVKMDPEFSRTMEIFNLWLTTGKIPDMVRGCRTVLIPKSTKPDRLKDINNWRPITIGSILLRLFSRIVTARLSKACPLNPRQRGFIRAAGCSENLKLLQTIIWSAKREHRPLGVVFVDIAKAFDTVSHQHIIHALQQREVDPHIVGLVSNMYENISTYITTKRNTHTDKIQIRVGVKQGDPMSPLLFNLAMDPLLCKLEESGKGYHRGQSSITAMAFADDLVLLSDSWENMNTNISILETFCNLTGLKTQGQKCHGFYIKPTKDSYTINDCAAWTINGTPLNMIDPGESEKYLGLQFDPWIGIARSGLSTKLDFWLQRIDQAPLKPLQKTDILKTYTIPRLIYIADHSEVKTGLLETLDQKIRTAVKEWLHLPPCTCDAILYSSTRDGGLGITKLAGLIPSVQARRLHRIAQSSDETMKCFMEKDKMEQLHKKLWIQAGGDRENIPSIWEAPPSSEPPNNVSTNSEWEAPTQKDKFPKPCNWRKNEFKKWTKLASQGRGIVNFERDKISNPWIQYYRRIPHRKLLTALQLRANVYPTREFLARGRQDQYIKACRHCDADIESCAHIIGNCPVTQDARIKRHNYICELLLEEAKKKDWVVFKEPHIRDSNKELYKPDLIFVKDARALVVDVTVRYEAAKSSLEEAAAEKVRKYKHLETEVRHLTNAKDVTFVGFPLGARGKWHQDNFKLLTELGLSKSRQVKMAETFSTVALFSSVDIVHMFASRARKSMVM

SEQ ID NO: 768 - protein, 1539 aa, synthetic construct
MRKKQQEFENIRQQNLKLITELMNERNTLQEENKKLSEQLQQKIENDQQHQAAELECEEDVIPDSPITAFSFSGVNRLRRKENPHVRYIEQTHTKLEHSVCANEMRKVSKSSTHPQHNPNENEILVADTYDQSQSPMAKAHGTSSYTPDKSSFNLATVVAETLGLGVQEESETQGPMSPLGDELYHCLEGNHKKQPFESGSETPGTSESATPEGSPKRKVSSAEGAAKEEPKRRSARLSAKPPAKVEAKPKKAAAKDKSSDKKVQTKGKRGAKGKQAEVANQETKEDLPAENGETKTEESPASDEAGEKEAKSDSGSETPGTSESATPESYETPRVMGKVTSPSSVLTEHEGDRTSSPPRTPPPILETGADLPQEGTPVVKVPDDNPACPCCGNRIGRISGLIDHLKRTHGKKKILFQCAKCGRTNLKHHSIACHVPKCKGAKGTSPLRGWACEECNRTFGTKIGLGQHKRLAHPAVRNQERIVASQPKETSNRGAHKRCWTKEEEELLIRLEAQFEGNKNINKLIAEHITTKTAKQISDKRRLLSRKPAEEPREEPGTCHHTRRAAASLRTEPEMSHHAQAEDRDNGPPSKKKVKELGIREELMKEGEYLERSGSQEEGGLRSRYRKSIAEWLRTRKITTLREIYERVMKGKKDLPALVDEAAQGHYACLKKDLLEGERRQIQKIREIRRSRPQKPSKQWTIKRARKRGQFLRFQRLFHLDRRKLAGIILDDVESLQCGIPLDAIHEVFKSRWESPGTFKGLGTFCTNGLADNSAFQPMITVKEIEKNIREMNKNTAPGPDGVTLRDLMKADPQCVNLMELFNLWLLTGYIPDGIKNCRTILIPKSNVPEKLNDVNNWRPITIGSIILRLFSKILTARLSKACPINTRQRGFIKSPGCSENLKLLQLVIQYAKREHRPLGVVFVDLAKAFDTVSHAHIIAVLKQKGVDEHIINLIENSYHNIKTYIDMKKEKSDSIGIRIGVKQGDPMSPILFNLSVDPLLCKLDEIGNGFECHTKVVTSLAFADDLVLLSGSWEGMQKNIEIVETFCELTGLKMQGEKCHGFYIKPTKDSYTINDCPPWTINGTPLNMIEPGSSEKYLGLRIDPWTGISKPELLEKVDRWLAKVGKAPLKPFQKVDILKGHLIPRLIYLADQANLKPTHLENIDLAIRNGVKEWLHLPACTCDAILYSNTQDGGLGINRLAALIPNVQTRRLHRIAQTTDDVLKEIVKQEGIEREYEKLWVMAGGDKEKIPSIWDPKSIMVISETGGEELSEWESPNPKLIYPKPCNWRKREFNNWVKLSTQGRGISNFEKDKISNNWIQQYRGIPQRKVITALQLRANIYPTREFLARGQSETYIKSCRHCQADIETCAHIIGYCPSVQDARIKRHNQICNILAEEAKSKDWLVYQEPLLRDESNELYKPDLIFVKENQAIVTDVTVRYEAAKSSLEEAAAEKVRKYKHLETEVRHLTNAKDVTFVGFPLGARGKWHQDNFKLLTELGLSKSRQVKMAETFSTVALFSSVDIVHMFASRARKSMVM

SEQ ID NO: 769 - protein, 1238 aa, synthetic construct
MGWSGRIWFVSVATQTKYSDWAFTVPSILNPELAGDGIAEIRGLEFVNSEKGYYVGLSPSRSSLLATLPEVYESPRVMGKVISPSSVQTEYEGERTSSPPRTPPPILEAGADLPQEGTPVVKVPDNNPACPCCGNRMGRITGLIDHLKRTHGKKKILFQCARCGRTNLKHHSIACHVPKCKGAKESSPLRGWTCEECNRTFGTKIGLSQHKRLAHPVTRNIERITASRPKEESARGAHRRCWSEEEVELLKKLEKQYEGNKNINKLIAEHLPTKTAKQISDKRRGLVKSPSKKKGKDLALREQLMEEGEHLVESGSQEGGGLRSHYRKSIAEWLRSQKITTLRKIYERVIKGKEDLPSLVDEAAQDCYACLKKDLIEGEGRQIQKIREIRRPRPQKPSKQWTKKRARKRGQFLRFQRLFHLDRGKLAGIILDDVESLKCGIPLDAVHEVFKSRWESPGTFKGLGTFCTIGHADNSAFQSMITAKEIKKNIREMNKNAAPGPDGITLRDLMKIDPQCVKLMELFNLWLLTGYIPDGVKNCRTILIPKSNVPEKLNDVNNWRPITIGSIILRLFSKILTARLSKACPINTRQRGFIKSPGCSENLKLLQLLIRYAKREHRPLGVVFVDLAKAFDTVSHSHILAVLKQKGVDEHIIRLIENSYHNIKTYIDMKNEKSDSIGIRIGVKQGDPMSPILFNLSVDPLLCKLEEIGNGFQCHSQNVTALAFADDLVLLSGSWEGMQNNIEIVETFCELTGLKMQGEKCHGFYIKPTKDSYTINDCPPWTINGTPLNMIEPGSSEKYLGLYIDPWTGISKPELLEKVDRWLAKVGKAPLKPFQKVDILKGYLIPRLIYLADQANLKPTYLENIDLAIRNGVKEWLHLPACTCDAILYSNTQDGGLGISRLAALIPSVQARRLHRIAQTSDDVLKEIVKQEGIEREFEKLWLMAGGDKEKIPSIWDPKTIMVISETGGDELSEWETPNPKLIYPKPCNWRKREFNNWTKLLSQGRGIVNFEKDKISNNWITQYRGIPQRKLITALQLRANIYPTREFLARGRSETYIKSCRHCQADNETCAHIIGYCPSVQDARIKRHNQICHILAEEAKSKDWLVYQEPLLRDEQNELYKPDLIFVKGNQAIVTDVTIRYETTITTLEEAALEKAKKYAHLKSQVQDLTNTSIINFTGFPLGSRGKWYQGNYKILKELGLSSSRQEKVARRLSNYALFSSVDIVHMFASKARTEVR

SEQ ID NO: 770 - protein, 1259 aa, synthetic construct
MGRPMRISFVSVATQTSPLDLRDNVVSCSTKDHGGLLEVRFEIRGLEFVNSDLVGPKGQQSPTLTDYLALLPEVYEVSNSLSLRDKNTCPTPVESENEEEESSPLGATARTSPLPSTPVSRSRDDLPTEGTPVVKIPDKNTSCPCCGNRMGKLSGLIEHLKRAHGKKKILFQCARCGRTDVRHHSIACHFPKCKGPVEASPERSWKCEECEKTFDTKIGLGQHKRLVHPVTRNLERITAARPKAGTMRGAHRRCWTEDEIELLRKLDKQYEGQKNINKLIAEHIPTKTTKQISDKRRDLHKSPVKKGKDQGRKKHLELEGEHLAEGEHLVCIGSEMEGGLRSRYRKTISEWVTSGKLSILHGMFEQVIEGEEDPAIVADKAMKDCFACLASKSVELKAGQGRPRQVAQTARPSEPPKGWMKKRARKRGQFLRFQRLFYLDRGKLAGIILDDVESLKCGIPQDEIHDVFKSRWESPGTFKGLGAFRSKGQADNSAFEAMITAKEISKNIREMNKNSAPGPDRLSLRDIIKIDPHCVQLMEVFNLWLVTGVVPDVVKECRTVLISKSSLPERQMDINNWRPITIGSIILRLFSRILTARLAKACPINPRQKGFIRSAGCAENLKLLQLLIKNAKKEHRPLGVVFIDLAKAFDTVSHHHLIAVLKQKGVDHHIITLITNMYQNIRTRITMKNEQSDPIGIQIGVKQGDPMSPLLFNLSVDPLLCKLEEEGNGYHHGSKCVTSMAFADDLVLLSGSWEGMQSNIKILEAFCELTGLRTQGEKCHGFYIQPTKDSYTINDCPPWQINGTPLNMIEPGSSEKYLGLRIDPWTGISKPELLMKIRDWLQRIGEAPLKPFQKVDILKGYTIPRLIYLADQADVKATYLEELDLTIRTTVKEWLHLPPSTCDAILYSSTRDGGLGITRLSGLIPSIQARRLHRIAQSSDDVIRSIVKQEGIEKEFEKLWLTAGGDKEKIPSIWDPSAIRVTSEELGEDELVSEWEIPTPKTIFPKPCDWRKQEFINWTKLQSQGRGIANFEKDKISNNWLERYRGIPHRKLLTALQLRANVYPTREFLARGRQESHIKSCRHCQAENESSAHIIGYCPAVQDARIKRHNQLCDLLITEVKRKDWIVFQEPILKDEQNEIYKPDLVFVKGDQAIVIDVTIRYESKLSSLADAAAEKVKKYCHLKSQIQELTNAKNIKFKGFPVGARGKWYSGNYEVLKALGISNSRQDKIARCMSRKALFTSVDIVHMFVSHSRSIVRT

SEQ ID NO: 771 - protein, 1238 aa, synthetic construct
MGWSGRIWFVSVATQTKYSDWAFTVHSITNPELAGDGIAEIRGLEFVNSEKGYYVGHSPSRSSLLATLPEVYETPRVMGKVISPSSVQTEHEGERTSSPPRTPPPILETGADLPQEGTPVVKVPDDNPACPCCGNRMGRISGLIDHLKRTHGKKKILFQCARCGRTNLKHHSIACHVPKCKGAKGTSPLRGWTCEECNRTFGTKIGLSQHKRLAHPVTRNIERITASRPKEESARGAHRRCWSEEEVELLKKLEKQYEGNKNINKLIAEHLPSKTAKQISDKRRGLVKSPSKKKGKDLALREQLMEEGEHLVESGSQEGGGLRSHYRKSIAEWIRSQKITSLRKIFERVIKGKEDLPSLVDEAAQDCYACLKKDLIEGEGRQIQKIREIRRPRPQKPSKQWTKKRARKRGQFLRFQRLFHLDRGKLAGIILDDVESLKCGIPLDVVHEVFKSRWESPGTFKGLGTFNTIGHADNSAFQSMITAKEIKKNIREMNKNAAPGPDGISLRDLMKIDPQCVKLMELFNLWLLTGYIPDGVKNCRTILIPKSSVPEKLNDVNNWRPITIGSIILRLFSKILTARLTKACPINTRQRGFIKSPGCSENLKLLQLLIRYAKREHRPLGVVFVDLAKAFDTVSHSHILAVLKQKGVDEHIIRLIENSYHNIKTYIDMKNEKSDSIGIRIGVKQGDPMSPILFNLSVDPLLCKLEEMGNGFQCHSQNVTALAFADDLVLLSGSWEGMQNNIEIVETFCELTGLKMQGEKCHGFYIKPTKDSYTINDCPPWTINGTPLNMIEPGSSEKYLGLYIDPWTGISKPELLEKVDRWLAKVGKAPLKPFQKVDILKGYLIPRLIYLADQANLKPTYLESIDLAIRTGVKEWLHLPACTCDAILYSNTQDGGLGISRLAALIPSVQARRLHRIAQTSDDVLKTIVKREGIEREFEKLWLMAGGDKEKIPSIWDPKTIMVISETGGDQLSEWETPNPKLIYPKPCNWRKREFNNWTKLLSQGRGIVNFEKDKISNNWIIHYRGIPQRKLITALQLRANIYPTREFLARGRSETYIKSCRHCQADNETCAHIIGYCPSVQDARIKRHNQICHILAEEAKSKDWLVYQEPLLRDQQNELYKPDLIFVKGNQAIVTDITIRYETTITTLEEAALEKAKKYAHLKSQVQDLTNTSVINFTGFPLGSRGKWYQGNYKILKELGLSSSRQEKVARRLSNYALFSSVDIVHMFASKARTEVR

SEQ ID NO: 772 - protein, 1251 aa, synthetic construct
MGRPMRISFVSVATQTSPLDLRDNVVSCSTKDHGGLLEVRFEIRGLEFVNSDLVGPKGQSPTLTDHLALLPEVYEVSNLSLRDKNTCPTPVESENEEEESSPLGATARTSPLPSTPVSRSRDDLPTEGTPVVKIPDKNTSCPCCGNRMGKLSGLIEHLKRAHGKKKILFQCARCGRTDVRHHSIACHFPKCKGPVEASPERSWKCEECEKTFDTKIGLGQHKRLVHPVTRNLERITAARPKAGTMRGAHRRCWTEDEIELLRKLDKQYEGQKNINKLIAEHIPTKTTKQISDKRRDLHKSPVKKGKDQGRKKHLELEGEHLAEIGSEMEGGLRSRYRKTISEWVTSGKLSILHGMFEQVIEGEEDPATVADKAMKDCFACLASKSVELKAGQGRPRQVAQTARPSEPPKGWMKKRARKRGQFLRFQRLFYLDRGKLAGIILDDVESLKCGIPQDEIHNVFKSRWESPGTFKGLGAFRSKGQADNSAFEAMITAKEISKNIREMNKNSAPGPDGLSLRDIIKIDPHCVQLMEVFNLWLVTGVVPDVVKECRTVLISKSSLPERQMDINNWRPITIGSIILRLFSRILTARLAKACPINPRQKGFIRSAGCAENLKLLQLLIKNAKKEHRPLGVVFIDLAKAFDTVSHHHLIAVLKQKGVDHHIITLITNMYQNIRTRITMKNEQSDPIGIQIGVKQGDPMSPLLFNLSVDPLLCKLEEEGNGYHHGSKCVTSMAFADDLVLLSGSWEGMQSNIKILEAFCELTGLRTQGEKCHGFYIQPTKDSYTINDCPPWQINGTPLNMIEPGSSEKYLGLRIDPWTGISKPELLMKIRDWLQRIGEAPLKPFQKVDILKGYTIPRLIYLADQADVKATYLEELDLTIRTTVKEWLHLPPSTCDAILYSSTRDGGLGITRLSGLIPSIQARRLHRIAQSSDDVIRSIVKQEGIEKEFEKLWLTAGGDKEKIPSIWDPSAIRVTSEELGEDELVSEWEIPTPKTIFPKPCDWRKQEFINWTKLQSQGRGIANFEKDKISNNWLERYRGIPHRKLLTALQLRANVYPTREFLARGRQESHIKSCRHCQAENESSAHIIGYCPAVQDARIKRHNQLCDLLITEVKRKDWIVFQEPILKDEQNEIYKPDLVFVKGDQAIVIDVTIRYESKLSSLADAAAEKVKKYCHLKSQIQELTNAKNIKFKGFPVGARGKWYSGNYEVLKALGISNSRQDKIARCMSRKALFTSVDIVHMFVSHSRSIVRT

SEQ ID NO: 773 - protein, 1251 aa, synthetic construct
MGRPMRISFVSVATQTSPLDLRDNVVSCSIKDHGGLLEVRFEIRGLEFVNSDLVGLKGQSPTLTDHLALLPEVYEVPNLSLRDKNTCPTPVESENEEEESSPLGATARTSPLPSTPVSRSRDDLPTEGTPVVKIPDKNTSCPCCGNRMGKLSGLIEHLKRAHGKKKILFQCARCGRTDVKHHSIACHFPKCKGPVEASPERSWKCEECEKTFDTKIGLGQHKRLVHPVTRNLERITAARPKAGTMRGAHRRCWTEDEIELLRKLDKQYEGQKNINKLIAEHIPTKTTKQISDKRRDLHKSPVKKGKDQGRKKHLELEGEHLVEIGSEMEGGLRSRYRKTVSEWVTSGKLSILHGMFEQVIEGEEDPATVADKAMKDCFACLASKSVELKASQGRPRQVAQTARPSEPPKGWMKKRARKRGQFLRFQRLFYLDRGKLAGIILDDVESLKCGIPQDEIHNVFKSRWESPGTFKGLGAFRSKGQADNSAFEAMITAKEISKNIREMNKNSAPGPDGLSLRDIIKIDPHCVQLMEVFNLWLVTGTVPDVVKECRTVLISKSSLPERQMDINNWRPITIGSIILRLFSRILTARLAKACPINPRQKGFIRSAGCAENLKLLQLLIKNAKKEHRPLGVVFIDLAKAFDTVSHHHLIAVLKQKGVDHHIITLITNMYQNIRTRITMKNEQSDPIGIQIGVKQGDPMSPLLFNLSVDPLLCKLEEEGNGYHHGSKCVTSMAFADDLVLLSGSWEGMQSNIKILEAFCELTGLRTQGEKCHGFYIQPTKDSYTINDCPPWQINGTPLNMIEPGSSEKYLGLRIDPWTGISKPELLMKIRDWLQRIGEAPLKPFQKVDILKGYTIPRLIYLADQADVKATYLEELDLTIRTTVKEWLHLPPSTCDAILYSSTRDGGLGITRLSGLIPSIQARRLHRIAQSSDDVIRSIVKQEGIEKEFEKLWLTAGGDKEKIPSIWDPSAIRVTSEELGEDELASEWEIPTPKTIFPKPCDWRKQEFINWTKLQSQGRGIANFEKDKISNNWLERYRGIPHRKLLTALQLRANVYPTREFLARGRQESHIKSCRHCQAENESSAHIIGYCPAVQDARIKRHNQLCDLLITEVKKKDWIVFQEPILKDEQNEIYKPDLVFVKGDQAMVIDVTIRYESKLSSLADAAAEKVKKYCHLKSQIQELTNAKNIKFKGFPVGARGKWYSGNYEVLKALGISNSRQDKIARCMSRKALFTSVDIVHMFVSHSRSIVRT

SEQ ID NO: 774 - protein, 1238 aa, synthetic construct
MGWSGRIWFVTVATQTKYSDWAFTVHSITNPELAGDGIADLRGLEFVNSEKGYYVGHSPSRSSLLATLPEVYETPRVMGKVTSPSSVLTEHEGDRTSSPPRTPPPILETGADLPQEGTPVVKVPDDNPACPCCGNRIGRISGLIDHLKRTHGKKKILFQCAKCGRTNLKHHSIACHVPKCKGAKGTSPLRGWACEECNRTFGTKIGLSQHKRLAHPVTRNIERITASRPKEESARGAHRRCWSEEEVELLKKLEKQYEGNKNINKLIAEHLPSKTAKQISDKRRGLIKSPSKKNGKDLTLREQLTEEGEHLIESGSQEGGGLRSHYRKSIAEWIRSQKITSLRKIFERVIEGKEDLPSIVDEAAQDCYACLKRDLTEGEGRQIQKIREIRRTHPQKPSKQWTKKRARKRGQFLRFQRLFYLDRGKLAGIILDDVESLKCGIPLDVVHEVFKSRWESPGTFKGLGTFKTIGQADNSAFQAMITMKEIKKNIREMNKNAAPGPDGISLRDLMKIDPQCAKLMELFNLWLLTGYIPDGVKNCRTILIPKSTVPEKLNDVNNWRPITIGSIILRLFSKILTARLTKACPINIRQRGFIKSSGCSENLKLLQLIIRYAKREHRPLGVVFVDLAKAFDTVSHSHILSVLKQKGVDEHIIKLIENSYYNIKTYIDLKNEKSDSIGIRIGVKQGDPMSPILFNLSVDPLLCKLEEMGNGFQCHSQNVTALAFADDLVLLSGSWEGMQNNITIVETFCELTGLKMQGEKCHGFYIKPTKDSYTINDCPVWTINGTPLNMIEPGSSEKYLGLYVDPWIGISKPELLEKVDRWLVKVGKAPLKPFQKVDILKGYLIPRVIYLADQANLKPTYLESIDLAIRTGVKEWLHLPACTCDAILYSNTQDGGLGISRLAALIPSVQVRRLHRIAQTSDEVLKTIVKREGIEREFEKLWLMAGGDKERIPSIWDPKTVMIISETGGDQLSEWEIPNPKLIYPKPCNWRKREFNNWTKLLSQGRGIVNFEKDKISNNWLIHYRGIPQRKLITALQLRANIYPTREFLARGRSETYIKSCRHCQADNETCAHIIGYCPSVQDARIKRHNQICHILAEEAKRKDWLVYQEPLLRDQQNELYKPDLIFVKGNQAIVTDITIRYETTITTLEEAALEKAKKYVHLESQVQDLTNTSVINFTGFPLGSRGKWYQGNYKILNELGLSNSRQEKVARRLSNYALFSSVDIIHMFASKARTEVR

SEQ ID NO: 775 - protein, 1728 aa, synthetic construct
MAFGGNPFASVGSSSSSGEGTQPSRTENRDPLPNPWAPPPATQSSATTSTTTSTGSGSGNSSSNAPKKKRKVNISGSSCGSPNSADTSSDFKDLWTKLKECHDREVQGLQVKVTKLKQERILDAQRLEEFFTKNQQLREQQKVLHETIKVLEDRLRAGLCDRCAVTEEHMRKKQQEFENIRQQNLKLITELMNERNTLQEENKKLSEQLQQKIENDQQHQAAELECEEDVIPDSPITAFSFSGVNRLRRKENPHVRYIEQTHTKLEHSVCANEMRKVSKSSTHPQHNPNENEILVADTYDQSQSPMAKAHGTSSYTPDKSSFNLATVVAETLGLGVQEESETQGPMSPLGDELYHCLEGNHKKQPFESGSETPGTSESATPEGSPKRKVSSAEGAAKEEPKRRSARLSAKPPAKVEAKPKKAAAKDKSSDKKVQTKGKRGAKGKQAEVANQETKEDLPAENGETKTEESPASDEAGEKEAKSDSGSETPGTSESATPESYEQLAPQPCVGETLHSSLPRDSELFVPEEGSSEKESEDAPKTSPPTPGKHGLEQTGEEKVMVTVPDKNPPCPCCGTRVNSVLNLIEHLKVSHGKRGVCFRCAKCGKENSNYHSVVCHFKKCRGPETEKAPAGEWICEVCNRDFTTKIGLGQHKRLAHPAVRNQERIVASQPKETSNRGAHKRCWTKEEEELLIRLEAQFEGNKNINKLIAEHITTKTAKQISDKRRLLSRKPAEEPREEPGTCHHTRRAAASLRTEPEMSHHAQAEDRDNGPGRRPLPGRAAAGGRTMDEIRRHPDKGNGQQRPTKQKSEEQLQAYYKKTLEERLSAGALNTFPRAFKQVMEGRDIKLVINQTAQDCFGCLESISQIRTATRDKKDTVTREKHPKKPFQKWMKKRAIKKGNYLRFQRLFYLDRGKLAKIILDDIECLSCDIPLSEIYSVFKTRWETTGSFKSLGDFKTYGKADNTAFRELITAKEIEKNVQEMSKGSAPGPDGITLGDVVKMDPEFSRTMEIFNLWLTTGKIPDMVRGCRTVLIPKSSKPDRLKDINNWRPITIGSILLRLFSRIVTARLSKACPLNPRQRGFIRAAGCSENLKLLQTIIWSAKREHRPLGVVFVDIAKAFDTVSHQHIIHALQQREVDPHIVGLVSNMYENISTYITTKRNTHTDKIQIRVGVKQGDPMSPLLFNLAMDPLLCKLEESGKGYHRGQSSITAMAFADDLVLLSDSWENMNTNISILETFCNLTGLKTQGQKCHGFYIKPTKKSYTINDCAAWTINGTPLNMIDPGESEKYLGLQFDPWIGIARSGLSTKLDFWLQRIDQAPLKPLQKTDILKTYTIPRLIYIADHSEVKSALLETLDQKIRTAVKEWLHLPPCTCDAILYSSTRDGGLGITKLAGLIPSVQARRLHRIAQSSDDTMKCFMEKEKMEQLHKKLWIQAGGDRENIPSIWEAPPSSEPPNNVSTNSEWEAPTQKDKFPKPCNWRKNEFKKWTKLASQGRGIVNFERDKISNHWIQYYRRIPHRKLLTALQLRANVYPTREFLARGRQDQYIKACRHCDADNESCAHIIGNCPVTQDARIKRHNYICELLLEEAKKKDWVVFKEPHIRDSNKELYKPDLIFVKDGRALVVDVTVRYEAAKSSLEEAAAEKVRKYKHLETEVRHLTNAKDVTFVGFPLGARGKWHQDNFKLLTELGLSKSRQVKMAETFSTVALFSSVDIVHMFASRARKSMVM

SEQ ID NO: 776 - protein, 1748 aa, synthetic construct
MACNQCKAPKPDGPGGGPGGSHMGGNYGDDRRGGRGGYDRGGYRGRGGDRGGFRGGRGGGDRGGFGPGKMDSRGEHRQDRRERPYPKKKRKVNISGSSCGSPNSADTSSDFKDLWTKLKECHDREVQGLQVKVTKLKQERILDAQRLEEFFTKNQQLREQQKVLHETIKVLEDRLRAGLCDRCAVTEEHMRKKQQEFENIRQQNLKLITELMNERNTLQEENKKLSEQLQQKIENDQQHQAAELECEEDVIPDSPITAFSFSGVNRLRRKENPHVRYIEQTHTKLEHSVCANEMRKVSKSSTHPQHNPNENEILVADTYDQSQSPMAKAHGTSSYTPDKSSFNLATVVAETLGLGVQEESETQGPMSPLGDELYHCLEGNHKKQPFESGSETPGTSESATPEGSPKRKVSSAEGAAKEEPKRRSARLSAKPPAKVEAKPKKAAAKDKSSDKKVQTKGKRGAKGKQAEVANQETKEDLPAENGETKTEESPASDEAGEKEAKSDSGSETPGTSESATPESYEQLAPQPCVGETLHSSLPRDSELFVPEEGSSEKESEDAPKTSPPTPGKHGLEQTGEEKVMVTVPDKNPPCPCCGTRVNSVLNLIEHLKVSHGKRGVCFRCAKCGKENSNYHSVVCHFKKCRGPETEKAPAGEWICEVCNRDFTTKIGLGQHKRLAHPAVRNQERIVASQPKETSNRGAHKRCWTKEEEELLIRLEAQFEGNKNINKLIAEHITTKTAKQISDKRRLLSRKPAEEPREEPGTCHHTRRAAASLRTEPEMSHHAQAEDRDNGPGRRPLPGRAAAGGRTMDEIRRHPDKGNGQQRPTKQKSEEQLQAYYKKTLEERLSAGALNTFPRAFKQVMEGRDIKLVINQTAQDCFGCLESISQIRTATRDKKDTVTREKHPKKPFQKWMKKRAIKKGNYLRFQRLFYLDRGKLAKIILDDIECLSCDIPLSEIYSVFKTRWETTGSFKSLGDFKTYGKADNTAFRELITAKEIEKNVQEMSKGSAPGPDGITLGDVVKMDPEFSRTMEIFNLWLTTGKIPDMVRGCRTVLIPKSSKPDRLKDINNWRPITIGSILLRLFSRIVTARLSKACPLNPRQRGFIRAAGCSENLKLLQTIIWSAKREHRPLGVVFVDIAKAFDTVSHQHIIHALQQREVDPHIVGLVSNMYENISTYITTKRNTHTDKIQIRVGVKQGDPMSPLLFNLAMDPLLCKLEESGKGYHRGQSSITAMAFADDLVLLSDSWENMNTNISILETFCNLTGLKTQGQKCHGFYIKPTKKSYTINDCAAWTINGTPLNMIDPGESEKYLGLQFDPWIGIARSGLSTKLDFWLQRIDQAPLKPLQKTDILKTYTIPRLIYIADHSEVKSALLETLDQKIRTAVKEWLHLPPCTCDAILYSSTRDGGLGITKLAGLIPSVQARRLHRIAQSSDDTMKCFMEKEKMEQLHKKLWIQAGGDRENIPSIWEAPPSSEPPNNVSTNSEWEAPTQKDKFPKPCNWRKNEFKKWTKLASQGRGIVNFERDKISNHWIQYYRRIPHRKLLTALQLRANVYPTREFLARGRQDQYIKACRHCDADNESCAHIIGNCPVTQDARIKRHNYICELLLEEAKKKDWVVFKEPHIRDSNKELYKPDLIFVKDGRALVVDVTVRYEAAKSSLEEAAAEKVRKYKHLETEVRHLTNAKDVTFVGFPLGARGKWHQDNFKLLTELGLSKSRQVKMAETFSTVALFSSVDIVHMFASRARKSMVM

SEQ ID NO: 777 - protein, 1851 aa, synthetic construct
MAGTARGPGRKDAGPPGAGLPPQQRRLGDGVYDTFMMIDETKCPPCSNVLCNPSEPPPPRRLNMTTEQFTGDHTQHFLDGGEMKVEQLFQEFGNRKSNTIQSDGISDSEKCSPTVSQGKSSDCLNTVKSNSSSKAPKVVPLTPEQALKQYKHHLTAYEKLEIINYPEIYFVGPNAKKRHGVIGGPNNGPKKKRKVNISGSSCGSPNSADTSSDFKDLWTKLKECHDREVQGLQVKVTKLKQERILDAQRLEEFFTKNQQLREQQKVLHETIKVLEDRLRAGLCDRCAVTEEHMRKKQQEFENIRQQNLKLITELMNERNTLQEENKKLSEQLQQKIENDQQHQAAELECEEDVIPDSPITAFSFSGVNRLRRKENPHVRYIEQTHTKLEHSVCANEMRKVSKSSTHPQHNPNENEILVADTYDQSQSPMAKAHGTSSYTPDKSSFNLATVVAETLGLGVQEESETQGPMSPLGDELYHCLEGNHKKQPFESGSETPGTSESATPEGSPKRKVSSAEGAAKEEPKRRSARLSAKPPAKVEAKPKKAAAKDKSSDKKVQTKGKRGAKGKQAEVANQETKEDLPAENGETKTEESPASDEAGEKEAKSDSGSETPGTSESATPESYEQLAPQPCVGETLHSSLPRDSELFVPEEGSSEKESEDAPKTSPPTPGKHGLEQTGEEKVMVTVPDKNPPCPCCGTRVNSVLNLIEHLKVSHGKRGVCFRCAKCGKENSNYHSVVCHFKKCRGPETEKAPAGEWICEVCNRDFTTKIGLGQHKRLAHPAVRNQERIVASQPKETSNRGAHKRCWTKEEEELLIRLEAQFEGNKNINKLIAEHITTKTAKQISDKRRLLSRKPAEEPREEPGTCHHTRRAAASLRTEPEMSHHAQAEDRDNGPGRRPLPGRAAAGGRTMDEIRRHPDKGNGQQRPTKQKSEEQLQAYYKKTLEERLSAGALNTFPRAFKQVMEGRDIKLVINQTAQDCFGCLESISQIRTATRDKKDTVTREKHPKKPFQKWMKKRAIKKGNYLRFQRLFYLDRGKLAKIILDDIECLSCDIPLSEIYSVFKTRWETTGSFKSLGDFKTYGKADNTAFRELITAKEIEKNVQEMSKGSAPGPDGITLGDVVKMDPEFSRTMEIFNLWLTTGKIPDMVRGCRTVLIPKSSKPDRLKDINNWRPITIGSILLRLFSRIVTARLSKACPLNPRQRGFIRAAGCSENLKLLQTIIWSAKREHRPLGVVFVDIAKAFDTVSHQHIIHALQQREVDPHIVGLVSNMYENISTYITTKRNTHTDKIQIRVGVKQGDPMSPLLFNLAMDPLLCKLEESGKGYHRGQSSITAMAFADDLVLLSDSWENMNTNISILETFCNLTGLKTQGQKCHGFYIKPTKKSYTINDCAAWTINGTPLNMIDPGESEKYLGLQFDPWIGIARSGLSTKLDFWLQRIDQAPLKPLQKTDILKTYTIPRLIYIADHSEVKSALLETLDQKIRTAVKEWLHLPPCTCDAILYSSTRDGGLGITKLAGLIPSVQARRLHRIAQSSDDTMKCFMEKEKMEQLHKKLWIQAGGDRENIPSIWEAPPSSEPPNNVSTNSEWEAPTQKDKFPKPCNWRKNEFKKWTKLASQGRGIVNFERDKISNHWIQYYRRIPHRKLLTALQLRANVYPTREFLARGRQDQYIKACRHCDADNESCAHIIGNCPVTQDARIKRHNYICELLLEEAKKKDWVVFKEPHIRDSNKELYKPDLIFVKDGRALVVDVTVRYEAAKSSLEEAAAEKVRKYKHLETEVRHLTNAKDVTFVGFPLGARGKWHQDNFKLLTELGLSKSRQVKMAETFSTVALFSSVDIVHMFASRARKSMVM

SEQ ID NO: 778 - protein, 1738 aa, synthetic construct
MATLHRSRPETGRPRPKGLEGKRPARLTRREADRDTYRRCSVPPGADKKAEAGAGSATEFQFRGRCGRGRGQPPQPKKKRKVNISGSSCGSPNSADTSSDFKDLWTKLKECHDREVQGLQVKVTKLKQERILDAQRLEEFFTKNQQLREQQKVLHETIKVLEDRLRAGLCDRCAVTEEHMRKKQQEFENIRQQNLKLITELMNERNTLQEENKKLSEQLQQKIENDQQHQAAELECEEDVIPDSPITAFSFSGVNRLRRKENPHVRYIEQTHTKLEHSVCANEMRKVSKSSTHPQHNPNENEILVADTYDQSQSPMAKAHGTSSYTPDKSSFNLATVVAETLGLGVQEESETQGPMSPLGDELYHCLEGNHKKQPFESGSETPGTSESATPEGSPKRKVSSAEGAAKEEPKRRSARLSAKPPAKVEAKPKKAAAKDKSSDKKVQTKGKRGAKGKQAEVANQETKEDLPAENGETKTEESPASDEAGEKEAKSDSGSETPGTSESATPESYEQLAPQPCVGETLHSSLPRDSELFVPEEGSSEKESEDAPKTSPPTPGKHGLEQTGEEKVMVTVPDKNPPCPCCGTRVNSVLNLIEHLKVSHGKRGVCFRCAKCGKENSNYHSVVCHFKKCRGPETEKAPAGEWICEVCNRDFTTKIGLGQHKRLAHPAVRNQERIVASQPKETSNRGAHKRCWTKEEEELLIRLEAQFEGNKNINKLIAEHITTKTAKQISDKRRLLSRKPAEEPREEPGTCHHTRRAAASLRTEPEMSHHAQAEDRDNGPGRRPLPGRAAAGGRTMDEIRRHPDKGNGQQRPTKQKSEEQLQAYYKKTLEERLSAGALNTFPRAFKQVMEGRDIKLVINQTAQDCFGCLESISQIRTATRDKKDTVTREKHPKKPFQKWMKKRAIKKGNYLRFQRLFYLDRGKLAKIILDDIECLSCDIPLSEIYSVFKTRWETTGSFKSLGDFKTYGKADNTAFRELITAKEIEKNVQEMSKGSAPGPDGITLGDVVKMDPEFSRTMEIFNLWLTTGKIPDMVRGCRTVLIPKSSKPDRLKDINNWRPITIGSILLRLFSRIVTARLSKACPLNPRQRGFIRAAGCSENLKLLQTIIWSAKREHRPLGVVFVDIAKAFDTVSHQHIIHALQQREVDPHIVGLVSNMYENISTYITTKRNTHTDKIQIRVGVKQGDPMSPLLFNLAMDPLLCKLEESGKGYHRGQSSITAMAFADDLVLLSDSWENMNTNISILETFCNLTGLKTQGQKCHGFYIKPTKKSYTINDCAAWTINGTPLNMIDPGESEKYLGLQFDPWIGIARSGLSTKLDFWLQRIDQAPLKPLQKTDILKTYTIPRLIYIADHSEVKSALLETLDQKIRTAVKEWLHLPPCTCDAILYSSTRDGGLGITKLAGLIPSVQARRLHRIAQSSDDTMKCFMEKEKMEQLHKKLWIQAGGDRENIPSIWEAPPSSEPPNNVSTNSEWEAPTQKDKFPKPCNWRKNEFKKWTKLASQGRGIVNFERDKISNHWIQYYRRIPHRKLLTALQLRANVYPTREFLARGRQDQYIKACRHCDADNESCAHIIGNCPVTQDARIKRHNYICELLLEEAKKKDWVVFKEPHIRDSNKELYKPDLIFVKDGRALVVDVTVRYEAAKSSLEEAAAEKVRKYKHLETEVRHLTNAKDVTFVGFPLGARGKWHQDNFKLLTELGLSKSRQVKMAETFSTVALFSSVDIVHMFASRARKSMVM

SEQ ID NO: 779 - protein, 1910 aa, synthetic construct
MAMQREMSMDESKQVETKTDAKNGEERGRDASKKALGPRRDSDLGKEPKRGGLKKSFSRDRDEAGGKSGEKPKEEKIIRGIDKGRVRAAVDKKEAGKDGRGEERAVATKKEEEKKGSDRNTGLSRDKDKKREEMKEVAKKEDDEKVKGERRNTDTRKEGEKMKRAGGNTDMKKEDEKVKRGTGNTDTKKDDEKVKKNEPLHEKEAKDDSKTKTPEKQTPSGPTKPSEGPAKVEEEAAPSIFDEPLERPKKKRKVNISGSSCGSPNSADTSSDFKDLWTKLKECHDREVQGLQVKVTKLKQERILDAQRLEEFFTKNQQLREQQKVLHETIKVLEDRLRAGLCDRCAVTEEHMRKKQQEFENIRQQNLKLITELMNERNTLQEENKKLSEQLQQKIENDQQHQAAELECEEDVIPDSPITAFSFSGVNRLRRKENPHVRYIEQTHTKLEHSVCANEMRKVSKSSTHPQHNPNENEILVADTYDQSQSPMAKAHGTSSYTPDKSSFNLATVVAETLGLGVQEESETQGPMSPLGDELYHCLEGNHKKQPFESGSETPGTSESATPEGSPKRKVSSAEGAAKEEPKRRSARLSAKPPAKVEAKPKKAAAKDKSSDKKVQTKGKRGAKGKQAEVANQETKEDLPAENGETKTEESPASDEAGEKEAKSDSGSETPGTSESATPESYEQLAPQPCVGETLHSSLPRDSELFVPEEGSSEKESEDAPKTSPPTPGKHGLEQTGEEKVMVTVPDKNPPCPCCGTRVNSVLNLIEHLKVSHGKRGVCFRCAKCGKENSNYHSVVCHFKKCRGPETEKAPAGEWICEVCNRDFTTKIGLGQHKRLAHPAVRNQERIVASQPKETSNRGAHKRCWTKEEEELLIRLEAQFEGNKNINKLIAEHITTKTAKQISDKRRLLSRKPAEEPREEPGTCHHTRRAAASLRTEPEMSHHAQAEDRDNGPGRRPLPGRAAAGGRTMDEIRRHPDKGNGQQRPTKQKSEEQLQAYYKKTLEERLSAGALNTFPRAFKQVMEGRDIKLVINQTAQDCFGCLESISQIRTATRDKKDTVTREKHPKKPFQKWMKKRAIKKGNYLRFQRLFYLDRGKLAKIILDDIECLSCDIPLSEIYSVFKTRWETTGSFKSLGDFKTYGKADNTAFRELITAKEIEKNVQEMSKGSAPGPDGITLGDVVKMDPEFSRTMEIFNLWLTTGKIPDMVRGCRTVLIPKSSKPDRLKDINNWRPITIGSILLRLFSRIVTARLSKACPLNPRQRGFIRAAGCSENLKLLQTIIWSAKREHRPLGVVFVDIAKAFDTVSHQHIIHALQQREVDPHIVGLVSNMYENISTYITTKRNTHTDKIQIRVGVKQGDPMSPLLFNLAMDPLLCKLEESGKGYHRGQSSITAMAFADDLVLLSDSWENMNTNISILETFCNLTGLKTQGQKCHGFYIKPTKKSYTINDCAAWTINGTPLNMIDPGESEKYLGLQFDPWIGIARSGLSTKLDFWLQRIDQAPLKPLQKTDILKTYTIPRLIYIADHSEVKSALLETLDQKIRTAVKEWLHLPPCTCDAILYSSTRDGGLGITKLAGLIPSVQARRLHRIAQSSDDTMKCFMEKEKMEQLHKKLWIQAGGDRENIPSIWEAPPSSEPPNNVSTNSEWEAPTQKDKFPKPCNWRKNEFKKWTKLASQGRGIVNFERDKISNHWIQYYRRIPHRKLLTALQLRANVYPTREFLARGRQDQYIKACRHCDADNESCAHIIGNCPVTQDARIKRHNYICELLLEEAKKKDWVVFKEPHIRDSNKELYKPDLIFVKDGRALVVDVTVRYEAAKSSLEEAAAEKVRKYKHLETEVRHLTNAKDVTFVGFPLGARGKWHQDNFKLLTELGLSKSRQVKMAETFSTVALFSSVDIVHMFASRARKSMVM

SEQ ID NO: 780 - protein, 1767 aa, synthetic construct
MADKQRQKRLQEQRQAQEAKGEKKDLLEVPKAGAVAKGSPKPSPQPSPKPSPKNSPKKGGAPAAPPPPPPPLAPPLIMENLKNSLSPATQRKMGDKVLPAQEKNPKKKRKVNISGSSCGSPNSADTSSDFKDLWTKLKECHDREVQGLQVKVTKLKQERILDAQRLEEFFTKNQQLREQQKVLHETIKVLEDRLRAGLCDRCAVTEEHMRKKQQEFENIRQQNLKLITELMNERNTLQEENKKLSEQLQQKIENDQQHQAAELECEEDVIPDSPITAFSFSGVNRLRRKENPHVRYIEQTHTKLEHSVCANEMRKVSKSSTHPQHNPNENEILVADTYDQSQSPMAKAHGTSSYTPDKSSFNLATVVAETLGLGVQEESETQGPMSPLGDELYHCLEGNHKKQPFESGSETPGTSESATPEGSPKRKVSSAEGAAKEEPKRRSARLSAKPPAKVEAKPKKAAAKDKSSDKKVQTKGKRGAKGKQAEVANQETKEDLPAENGETKTEESPASDEAGEKEAKSDSGSETPGTSESATPESYEQLAPQPCVGETLHSSLPRDSELFVPEEGSSEKESEDAPKTSPPTPGKHGLEQTGEEKVMVTVPDKNPPCPCCGTRVNSVLNLIEHLKVSHGKRGVCFRCAKCGKENSNYHSVVCHFKKCRGPETEKAPAGEWICEVCNRDFTTKIGLGQHKRLAHPAVRNQERIVASQPKETSNRGAHKRCWTKEEEELLIRLEAQFEGNKNINKLIAEHITTKTAKQISDKRRLLSRKPAEEPREEPGTCHHTRRAAASLRTEPEMSHHAQAEDRDNGPGRRPLPGRAAAGGRTMDEIRRHPDKGNGQQRPTKQKSEEQLQAYYKKTLEERLSAGALNTFPRAFKQVMEGRDIKLVINQTAQDCFGCLESISQIRTATRDKKDTVTREKHPKKPFQKWMKKRAIKKGNYLRFQRLFYLDRGKLAKIILDDIECLSCDIPLSEIYSVFKTRWETTGSFKSLGDFKTYGKADNTAFRELITAKEIEKNVQEMSKGSAPGPDGITLGDVVKMDPEFSRTMEIFNLWLTTGKIPDMVRGCRTVLIPKSSKPDRLKDINNWRPITIGSILLRLFSRIVTARLSKACPLNPRQRGFIRAAGCSENLKLLQTIIWSAKREHRPLGVVFVDIAKAFDTVSHQHIIHALQQREVDPHIVGLVSNMYENISTYITTKRNTHTDKIQIRVGVKQGDPMSPLLFNLAMDPLLCKLEESGKGYHRGQSSITAMAFADDLVLLSDSWENMNTNISILETFCNLTGLKTQGQKCHGFYIKPTKKSYTINDCAAWTINGTPLNMIDPGESEKYLGLQFDPWIGIARSGLSTKLDFWLQRIDQAPLKPLQKTDILKTYTIPRLIYIADHSEVKSALLETLDQKIRTAVKEWLHLPPCTCDAILYSSTRDGGLGITKLAGLIPSVQARRLHRIAQSSDDTMKCFMEKEKMEQLHKKLWIQAGGDRENIPSIWEAPPSSEPPNNVSTNSEWEAPTQKDKFPKPCNWRKNEFKKWTKLASQGRGIVNFERDKISNHWIQYYRRIPHRKLLTALQLRANVYPTREFLARGRQDQYIKACRHCDADNESCAHIIGNCPVTQDARIKRHNYICELLLEEAKKKDWVVFKEPHIRDSNKELYKPDLIFVKDGRALVVDVTVRYEAAKSSLEEAAAEKVRKYKHLETEVRHLTNAKDVTFVGFPLGARGKWHQDNFKLLTELGLSKSRQVKMAETFSTVALFSSVDIVHMFASRARKSMVM

SEQ ID NO: 781 - protein, 1827 aa, synthetic construct
MADVGGVQGKRKAASKAAAQQRKILLEGSDGDSANDTEPDFAPGEDSEDDSDFCESEDNDEDFSMRKSKVKEIKKKEVKVKSPVEKKEKKSKSKCNALVTSVDSAPAAVKSESQSLPKKVSLSSDTTRKPLEIRSPSAESKKPKWVPPAASGGSRSSSSPLVVVPKKKRKVNISGSSCGSPNSADTSSDFKDLWTKLKECHDREVQGLQVKVTKLKQERILDAQRLEEFFTKNQQLREQQKVLHETIKVLEDRLRAGLCDRCAVTEEHMRKKQQEFENIRQQNLKLITELMNERNTLQEENKKLSEQLQQKIENDQQHQAAELECEEDVIPDSPITAFSFSGVNRLRRKENPHVRYIEQTHTKLEHSVCANEMRKVSKSSTHPQHNPNENEILVADTYDQSQSPMAKAHGTSSYTPDKSSFNLATVVAETLGLGVQEESETQGPMSPLGDELYHCLEGNHKKQPFESGSETPGTSESATPEGSPKRKVSSAEGAAKEEPKRRSARLSAKPPAKVEAKPKKAAAKDKSSDKKVQTKGKRGAKGKQAEVANQETKEDLPAENGETKTEESPASDEAGEKEAKSDSGSETPGTSESATPESYEQLAPQPCVGETLHSSLPRDSELFVPEEGSSEKESEDAPKTSPPTPGKHGLEQTGEEKVMVTVPDKNPPCPCCGTRVNSVLNLIEHLKVSHGKRGVCFRCAKCGKENSNYHSVVCHFKKCRGPETEKAPAGEWICEVCNRDFTTKIGLGQHKRLAHPAVRNQERIVASQPKETSNRGAHKRCWTKEEEELLIRLEAQFEGNKNINKLIAEHITTKTAKQISDKRRLLSRKPAEEPREEPGTCHHTRRAAASLRTEPEMSHHAQAEDRDNGPGRRPLPGRAAAGGRTMDEIRRHPDKGNGQQRPTKQKSEEQLQAYYKKTLEERLSAGALNTFPRAFKQVMEGRDIKLVINQTAQDCFGCLESISQIRTATRDKKDTVTREKHPKKPFQKWMKKRAIKKGNYLRFQRLFYLDRGKLAKIILDDIECLSCDIPLSEIYSVFKTRWETTGSFKSLGDFKTYGKADNTAFRELITAKEIEKNVQEMSKGSAPGPDGITLGDVVKMDPEFSRTMEIFNLWLTTGKIPDMVRGCRTVLIPKSSKPDRLKDINNWRPITIGSILLRLFSRIVTARLSKACPLNPRQRGFIRAAGCSENLKLLQTIIWSAKREHRPLGVVFVDIAKAFDTVSHQHIIHALQQREVDPHIVGLVSNMYENISTYITTKRNTHTDKIQIRVGVKQGDPMSPLLFNLAMDPLLCKLEESGKGYHRGQSSITAMAFADDLVLLSDSWENMNTNISILETFCNLTGLKTQGQKCHGFYIKPTKKSYTINDCAAWTINGTPLNMIDPGESEKYLGLQFDPWIGIARSGLSTKLDFWLQRIDQAPLKPLQKTDILKTYTIPRLIYIADHSEVKSALLETLDQKIRTAVKEWLHLPPCTCDAILYSSTRDGGLGITKLAGLIPSVQARRLHRIAQSSDDTMKCFMEKEKMEQLHKKLWIQAGGDRENIPSIWEAPPSSEPPNNVSTNSEWEAPTQKDKFPKPCNWRKNEFKKWTKLASQGRGIVNFERDKISNHWIQYYRRIPHRKLLTALQLRANVYPTREFLARGRQDQYIKACRHCDADNESCAHIIGNCPVTQDARIKRHNYICELLLEEAKKKDWVVFKEPHIRDSNKELYKPDLIFVKDGRALVVDVTVRYEAAKSSLEEAAAEKVRKYKHLETEVRHLTNAKDVTFVGFPLGARGKWHQDNFKLLTELGLSKSRQVKMAETFSTVALFSSVDIVHMFASRARKSMVM

SEQ ID NO: 782 - protein, 1971 aa, synthetic construct
MAPKKKRKVDRKTRLSEPPTLALRLKPYKTAIQQLRSVIRALKENTTVTFLPTPSLILQTVRSHCVSKITFNSSCLYITDKSFQPKTINNSTPLLGNFMYLTSSKDLTKFYVQDISDLSAKISMCAPDFNMEFSSACVHGQDIVRESENSAVHVDLDFGVVADLLKWIGPHTRVKRNVKKAPCPTGTVQILVHAGPPAIKFILTNGSELEFTANNRVSFHGVKNMRINVQLKNFYQTLLNCAVTKLPCTLRIVTEHDTLLYVASRNGLFAVENFLTEEPFQRGDPFDKNYVGNSGKSRSGSETPGTSESATPEGSNISGSSCGSPNSADTSSDFKDLWTKLKECHDREVQGLQVKVTKLKQERILDAQRLEEFFTKNQQLREQQKVLHETIKVLEDRLRAGLCDRCAVTEEHMRKKQQEFENIRQQNLKLITELMNERNTLQEENKKLSEQLQQKIENDQQHQAAELECEEDVIPDSPITAFSFSGVNRLRRKENPHVRYIEQTHTKLEHSVCANEMRKVSKSSTHPQHNPNENEILVADTYDQSQSPMAKAHGTSSYTPDKSSFNLATVVAETLGLGVQEESETQGPMSPLGDELYHCLEGNHKKQPFESGSETPGTSESATPEGSPKRKVSSAEGAAKEEPKRRSARLSAKPPAKVEAKPKKAAAKDKSSDKKVQTKGKRGAKGKQAEVANQETKEDLPAENGETKTEESPASDEAGEKEAKSDSGSETPGTSESATPESYEQLAPQPCVGETLHSSLPRDSELFVPEEGSSEKESEDAPKTSPPTPGKHGLEQTGEEKVMVTVPDKNPPCPCCGTRVNSVLNLIEHLKVSHGKRGVCFRCAKCGKENSNYHSVVCHFKKCRGPETEKAPAGEWICEVCNRDFTTKIGLGQHKRLAHPAVRNQERIVASQPKETSNRGAHKRCWTKEEEELLIRLEAQFEGNKNINKLIAEHITTKTAKQISDKRRLLSRKPAEEPREEPGTCHHTRRAAASLRTEPEMSHHAQAEDRDNGPGRRPLPGRAAAGGRTMDEIRRHPDKGNGQQRPTKQKSEEQLQAYYKKTLEERLSAGALNTFPRAFKQVMEGRDIKLVINQTAQDCFGCLESISQIRTATRDKKDTVTREKHPKKPFQKWMKKRAIKKGNYLRFQRLFYLDRGKLAKIILDDIECLSCDIPLSEIYSVFKTRWETTGSFKSLGDFKTYGKADNTAFRELITAKEIEKNVQEMSKGSAPGPDGITLGDVVKMDPEFSRTMEIFNLWLTTGKIPDMVRGCRTVLIPKSSKPDRLKDINNWRPITIGSILLRLFSRIVTARLSKACPLNPRQRGFIRAAGCSENLKLLQTIIWSAKREHRPLGVVFVDIAKAFDTVSHQHIIHALQQREVDPHIVGLVSNMYENISTYITTKRNTHTDKIQIRVGVKQGDPMSPLLFNLAMDPLLCKLEESGKGYHRGQSSITAMAFADDLVLLSDSWENMNTNISILETFCNLTGLKTQGQKCHGFYIKPTKDSYTINDCAAWTINGTPLNMIDPGESEKYLGLQFDPWIGIARSGLSTKLDFWLQRIDQAPLKPLQKTDILKTYTIPRLIYIADHSEVKSALLETLDQKIRTAVKEWLHLPPCTCDAILYSSTRDGGLGITKLAGLIPSVQARRLHRIAQSSDDTMKCFMEKEKMEQLHKKLWIQAGGDRENIPSIWEAPPSSEPPNNVSTNSEWEAPTQKDKFPKPCNWRKNEFKKWTKLASQGRGIVNFERDKISNHWIQYYRRIPHRKLLTALQLRANVYPTREFLARGRQDQYIKACRHCDADNESCAHIIGNCPVTQDARIKRHNYICELLLEEAKKKDWVVFKEPHIRDSNKELYKPDLIFVKDGRALVVDVTVRYEAAKSSLEEAAAEKVRKYKHLETEVRHLTNAKDVTFVGFPLGARGKWHQDNFKLLTELGLSKSRQVKMAETFSTVALFSSVDIVHMFASRARKSMVM

SEQ ID NO: 783 - protein, 2087 aa, synthetic construct
MAPKKKRKVSASQDSRSRDNGPDGMEPEGVIESNWNEIVDSFDDMNLSESLLRGIYAYGFEKPSAIQQRAILPCIKGYDVIAQAQSGTGKTATFAISILQQIELDLKATQALVLAPTRELAQQIQKVVMALGDYMGASCHACIGGTNVRAEVQKLQMEAPHIIVGTPGRVFDMLNRRYLSPKYIKMFVLDEADEMLSRGFKDQIYDIFQKLNSNTQVVLLSATMPSDVLEVTKKFMRDPIRILVKKEELTLEGIRQFYINVEREEWKLDTLCDLYETLTITQAVIFINTRRKVDWLTEKMHARDFTVSAMHGDMDQKERDVIMREFRSGSSRVLITTDLLARGIDVQQVSLVINYDLPTNRENYIHRIGRGGRFGRKGVAINMVTEEDKRTLRDIETFYNTSIEEMPLNVADLISGSETPGTSESATPEGSNISGSSCGSPNSADTSSDFKDLWTKLKECHDREVQGLQVKVTKLKQERILDAQRLEEFFTKNQQLREQQKVLHETIKVLEDRLRAGLCDRCAVTEEHMRKKQQEFENIRQQNLKLITELMNERNTLQEENKKLSEQLQQKIENDQQHQAAELECEEDVIPDSPITAFSFSGVNRLRRKENPHVRYIEQTHTKLEHSVCANEMRKVSKSSTHPQHNPNENEILVADTYDQSQSPMAKAHGTSSYTPDKSSFNLATVVAETLGLGVQEESETQGPMSPLGDELYHCLEGNHKKQPFESGSETPGTSESATPEGSPKRKVSSAEGAAKEEPKRRSARLSAKPPAKVEAKPKKAAAKDKSSDKKVQTKGKRGAKGKQAEVANQETKEDLPAENGETKTEESPASDEAGEKEAKSDSGSETPGTSESATPESYEQLAPQPCVGETLHSSLPRDSELFVPEEGSSEKESEDAPKTSPPTPGKHGLEQTGEEKVMVTVPDKNPPCPCCGTRVNSVLNLIEHLKVSHGKRGVCFRCAKCGKENSNYHSVVCHFKKCRGPETEKAPAGEWICEVCNRDFTTKIGLGQHKRLAHPAVRNQERIVASQPKETSNRGAHKRCWTKEEEELLIRLEAQFEGNKNINKLIAEHITTKTAKQISDKRRLLSRKPAEEPREEPGTCHHTRRAAASLRTEPEMSHHAQAEDRDNGPGRRPLPGRAAAGGRTMDEIRRHPDKGNGQQRPTKQKSEEQLQAYYKKTLEERLSAGALNTFPRAFKQVMEGRDIKLVINQTAQDCFGCLESISQIRTATRDKKDTVTREKHPKKPFQKWMKKRAIKKGNYLRFQRLFYLDRGKLAKIILDDIECLSCDIPLSEIYSVFKTRWETTGSFKSLGDFKTYGKADNTAFRELITAKEIEKNVQEMSKGSAPGPDGITLGDVVKMDPEFSRTMEIFNLWLTTGKIPDMVRGCRTVLIPKSSKPDRLKDINNWRPITIGSILLRLFSRIVTARLSKACPLNPRQRGFIRAAGCSENLKLLQTIIWSAKREHRPLGVVFVDIAKAFDTVSHQHIIHALQQREVDPHIVGLVSNMYENISTYITTKRNTHTDKIQIRVGVKQGDPMSPLLFNLAMDPLLCKLEESGKGYHRGQSSITAMAFADDLVLLSDSWENMNTNISILETFCNLTGLKTQGQKCHGFYIKPTKDSYTINDCAAWTINGTPLNMIDPGESEKYLGLQFDPWIGIARSGLSTKLDFWLQRIDQAPLKPLQKTDILKTYTIPRLIYIADHSEVKSALLETLDQKIRTAVKEWLHLPPCTCDAILYSSTRDGGLGITKLAGLIPSVQARRLHRIAQSSDDTMKCFMEKEKMEQLHKKLWIQAGGDRENIPSIWEAPPSSEPPNNVSTNSEWEAPTQKDKFPKPCNWRKNEFKKWTKLASQGRGIVNFERDKISNHWIQYYRRIPHRKLLTALQLRANVYPTREFLARGRQDQYIKACRHCDADNESCAHIIGNCPVTQDARIKRHNYICELLLEEAKKKDWVVFKEPHIRDSNKELYKPDLIFVKDGRALVVDVTVRYEAAKSSLEEAAAEKVRKYKHLETEVRHLTNAKDVTFVGFPLGARGKWHQDNFKLLTELGLSKSRQVKMAETFSTVALFSSVDIVHMFASRARKSMVM

SEQ ID NO: 784 - protein, 1665 aa, synthetic construct
MAPKKKRKVNISGSSCGSPNSADTSSDFKDLWTKLKECHDREVQGLQVKVTKLKQERILDAQRLEEFFTKNQQLREQQKVLHETIKVLEDRLRAGLCDRCAVTEEHMRKKQQEFENIRQQNLKLITELMNERNTLQEENKKLSEQLQQKIENDQQHQAAELECEEDVIPDSPITAFSFSGVNRLRRKENPHVRYIEQTHTKLEHSVCANEMRKVSKSSTHPQHNPNENEILVADTYDQSQSPMAKAHGTSSYTPDKSSFNLATVVAETLGLGVQEESETQGPMSPLGDELYHCLEGNHKKQPFESGSETPGTSESATPEGSPKRKVSSAEGAAKEEPKRRSARLSAKPPAKVEAKPKKAAAKDKSSDKKVQTKGKRGAKGKQAEVANQETKEDLPAENGETKTEESPASDEAGEKEAKSDSGSETPGTSESATPESYEQLAPQPCVGETLHSSLPRDSELFVPEEGSSEKESEDAPKTSPPTPGKHGLEQTGEEKVMVTVPDKNPPCPCCGTRVNSVLNLIEHLKVSHGKRGVCFRCAKCGKENSNYHSVVCHFKKCRGPETEKAPAGEWICEVCNRDFTTKIGLGQHKRLAHPAVRNQERIVASQPKETSNRGAHKRCWTKEEEELLIRLEAQFEGNKNINKLIAEHITTKTAKQISDKRRLLSRKPAEEPREEPGTCHHTRRAAASLRTEPEMSHHAQAEDRDNGPGRRPLPGRAAAGGRTMDEIRRHPDKGNGQQRPTKQKSEEQLQAYYKKTLEERLSAGALNTFPRAFKQVMEGRDIKLVINQTAQDCFGCLESISQIRTATRDKKDTVTREKHPKKPFQKWMKKRAIKKGNYLRFQRLFHLDRGKLAKIILDDIECLSCDIPLSEIYSVFKTRWETTGSFKSLGDFKTYGKADNTAFRELITAKEIEKNVQEMSKGSAPGPDGITLGDVVKMDPEFSRTMEIFNLWLTTGKIPDMVRGCRTVLIPKSSKPDRLKDINNWRPITIGSILLRLFSRIVTARLSKACPLNPRQRGFIRAAGCSENLKLLQTIIWSAKREHRPLGVVFVDIAKAFDTVSHQHIIHALQQREVDPHIVGLVSNMYENISTYITTKRNTHTDKIQIRVGVKQGDPMSPLLFNLAMDPLLCKLEESGKGYHRGQSSITAMAFADDLVLLSDSWENMNTNISILETFCNLTGLKTQGQKCHGFYIKPTKDSYTINDCAAWTINGTPLNMIDPGESEKYLGLQFDPWIGIARSGLSTKLDFWLQRIDQAPLKPLQKTDILKTYTIPRLIYIADHSEVKSALLETLDQKIRTAVKEWLHLPPCTCDAILYSSTRDGGLGITKLAGLIPSVQARRLHRIAQSSDDTMKCFMEKEKMEQLHKKLWIQAGGDRENIPSIWEAPPSSEPPNNVSTNSEWEAPTQKDKFPKPCNWRKNEFKKWTKLASQGRGIVNFERDKISNHWIQYYRRIPHRKLLTALQLRANVYPTREFLARGRQDQYIKACRHCDADNESCAHIIGNCPVTQDARIKRHNYICELLLEEAKKKDWVVFKEPHIRDSNKELYKPDLIFVKDGRALVVDVTVRYEAAKSSLEEAAAEKVRKYKHLETEVRHLTNAKDVTFVGFPLGARGKWHQDNFKLLTELGLSKSRQVKMAETFSTVALFSSVDIVHMFASRARKSMVM

SEQ ID NO: 785 - protein, 277 aa, synthetic construct
ERKTSQREPVTLALRLRPYKAATQQLRSIIRGLKENTTITFLETPAMVVQTARANHVSKITFNSSCLYISDRNEFQRKTINNQVPLVGSFMHLSSNKDLTKLYIQDLSPMYAHISMVATDFNMEFSSACVHNQDVVRENGESFVRADLSHSVVTELIRWVAPYTRAKRTNKKQSAPANTVQMLVHANPPTLKLIICGSGANNELEFVANEHVSFHDVKPVHLMLNTKNFHNALTQCAVTKLSCAIRVLSDHDNIVHLQSKNNSFTVESFVTEEPYSR

SEQ ID NO: 786 - protein, 288 aa, synthetic construct
EPPTLAFRLKAYKAAIQQLRCVVRSLKDNTTVTFLPTPALVVQTVRSQFVGKIVFNSSCLYVTDRTFTPKTINNHVPLVGNLMYMSSNRELTKFIVQDSSDLSARVCMSAPDFNMDFSSACVHSQDIVVRENGNSVARVDFDFNVVAELIKWIGPHIRPKRNSKKQIMPTGTVQITLMPNPPTVKFSLAPNTEVEFTAGNRVAFHEVKNLRATVQARNLYQAFNHCAVTKLTCTLRIMTDHETVVYVGSKNNVFTIENFLSEEPFTRNEVSYERGVLNSNYQANSGSS

SEQ ID NO: 787 - protein, 150 aa, synthetic construct
LLKEGSSNQRVFDWIEANLSEQQIVSNTLVRALMTAVCYSAIIFETPLRVDVAVLKARAKLLQKYLCDEQKELQALYALQALVVTLEQPPNLLRMFFDALYDEDVVKEDAFYSWESSKDPAEQQGKGVALKSVTAFFKWLREAEEESDHN

SEQ ID NO: 788 - protein, 58 aa, synthetic construct
STNPKPQKKNKRNTNRRPQDVKFPGGGQIVGGVYLLPRRGPRLGVRATRKTSERSQPR

SEQ ID NO: 789 - protein, 72 aa, synthetic construct; identical to SEQ ID NO: 588

SEQ ID NO: 790 - protein, 1665 aa, synthetic construct
MAPKKKRKVNISGSSCGSPNSADTSSDFKDLWTKLKECHDREVQGLQVKVTKLKQERILDAQRLEEFFTKNQQLREQQKVLHETIKVLEDRLRAGLCDRCAVTEEHMRKKQQEFENIRQQNLKLITELMNERNTLQEENKKLSEQLQQKIENDQQHQAAELECEEDVIPDSPITAFSFSGVNRLRRKENPHVRYIEQTHTKLEHSVCANEMRKVSKSSTHPQHNPNENEILVADTYDQSQSPMAKAHGTSSYTPDKSSFNLATVVAETLGLGVQEESETQGPMSPLGDELYHCLEGNHKKQPFESGSETPGTSESATPEGSPKRKVSSAEGAAKEEPKRRSARLSAKPPAKVEAKPKKAAAKDKSSDKKVQTKGKRGAKGKQAEVANQETKEDLPAENGETKTEESPASDEAGEKEAKSDSGSETPGTSESATPESYEQLAPQPCVGETLHSSLPRDSELFVPEEGSSEKESEDAPKTSPPTPGKHGLEQTGEEKVMVTVPDKNPPCPCCGTRVNSVLNLIEHLKVSHGKRGVCFRCAKCGKENSNYHSVVCHFKKCRGPETEKAPAGEWICEVCNRDFTTKIGLGQHKRLAHPAVRNQERIVASQPKETSNRGAHKRCWTKEEEELLIRLEAQFEGNKNINKLIAEHITTKTAKQISDKRRLLSRKPAEEPRMEPGTCHHTRRAAASLRTEPEMSHHAQAEDRDNGPGRRPLPGRAAAGGRTMDEIRRHPDKGNGQQRPTKQKSEEQLQAYYKKTLEERLSAGALNTFPRAFKQVMEGRDIKLVINQTAQDCFGCLESISQIRTATRDKKDTVTREKHPKKPFQKWMKKRAIKKGNYLRFQRLFYLDRGKLAKIILDDIECLSCDIPLSEIYSVFKTRWETTGSFKSLGDFKTYGKADNTAFRELITAKEIEKNVQEMSKGSAPGPDGITLGDVVKMDPEFSRTMEIFNLWLTTGKIPDMVRGCRTVLIPKSSKPDRLKDINNWRPITIGSILLRLFSRIVTARLSKACPLNPRQRGFIRAAGCSENLKLLQTIIWSAKREHRPLGVVFVDIAKAFDTVSHQHIIHALQQREVDPHIVGLVSNMYENISTYITTKRNTHTDKIQIRVGVKQGDPMSPLLFNLAMDPLLCKLEESGKGYHRGQSSITAMAFADDLVLLSDSWENMNTNISILETFCNLTGLKTQGQKCHGFYIKPTKKSYTINDCAAWTINGTPLNMIDPGESEKYLGLQFDPWIGIARSGLSTKLDFWLQRIDQAPLKPLQKTDILKTYTIPRLIYIADHSEVKSALLETLDQKIRTAVKEWLHLPPCTCDAILYSSTRDGGLGITKLAGLIPSVQARRLHRIAQSSDDTMKCFMEKEKMEQLHKKLWIQAGGDRENIPSIWEAPPSSEPPNNVSTNSEWEAPTQKDKFPKPCNWRKNEFKKWTKLASQGRGIVNFERDKISNHWIQYYRRIPHRKLLTALQLRANVYPTREFLARGRQDQYIKACRHCDADNESCAHIIGNCPVTQDARIKRHNYICELLLEEAKKKDWVVFKEPHIRDSNKELYKPDLIFVKDGRALVVDVTVRYEAAKSSLEEAAAEKVRKYKHLETEVRHLTNAKDVTFVGFPLGARGKWHQDNFKLLTELGLSKSRQVKMAETFSTVALFSSVDIVHMFASRARKSMVM

SEQ ID NO: 791 - protein, 1390 aa, synthetic construct
MASCPKPGPPVSAGAMSLESGLTTHSVLAIERGPNSLANSGSDFGGGGLGLPLRLLRVSVGTQTSRSDWVDLVSWSHPGPTSKSQQVDLVSLFPKHRVDLLSKNDQVDLVAQFLPSKFPPNLAENDLALLVNLEFYRSDLHVYECVHFAAHWEGLSGLPEVYEQLAPQPCVGETLHSSLPRDSELFVPEEGSSEKESEDAPKTSPPTPGKHGLEQTGEEKVMVTVPDKNPPCPCCGTRVNSVLNLIEHLKVSHGKRGVCFRCAKCGKENSNYHSVVCHFPKCRGPETEKAPAGEWICEVCNRDFTTKIGLGQHKRLAHPAVRNQERIVASQPKETSNRGAHKRCWTKEEEELLIRLEAQFEGNKNINKLIAEHITTKTAKQISDKRRLLSRKPAEEPREEPGTCHHTRRAAASLRTEPEMSHHAQAEDRDNGPGRRPLPGRAAAGGRTMDEIRRHPDKGNGQQRPTKQKSEEQLQAYYKKTLEERLSAGALNTFPRAFKQVMEGRDIKLVINQTAQDCFGCLESISQIRTATRDKKDTVTREKHPKKPFQKWMKDRAIKKGNYLRFQRLFYLDRGKLAKIILDDIECLSCDIPLSEIYSVFKTRWETTGSFKSLGDFKTYGKADNTAFRELITAKEIEKNVQEMSKGSAPGPDGITLGDVVKMDPEFSRTMEIFNLWLTTGKIPDMVRGCRTVLIPKSSKPDRLKDINNWRPITIGSILLRLFSRIVTARLSKACPLNPRQRGFIRAAGCSENLKLLQTIIWSAKREHRPLGVVFVDIAKAFDTVSHQHIIHALQQREVDPHIVGLVSNMYENISTYITTKRNTHTDKIQIRVGVKQGDPMSPLLFNLAMDPLLCKLEESGKGYHRGQSSITAMAFADDLVLLSDSWENMNTNISILETFCNLTGLKTQGQKCHGFYIKPTKDSYTINDCAAWTINGTPLNMIDPGESEKYLGLQFDPWIGIARSGLSTKLDFWLQRIDQAPLKPLQKTDILKTYTIPRLIYIADHSEVKTALLETLDQKIRTAVKEWLHLPPCTCDAILYSSTRDGGLGITKLAGLIPSVQARRLHRIAQSSDDTMKCFMEKEKMEQLHKKLWIQAGGDRENIPSIWEAPPSSEPPNNVSTNSEWEAPTQKDKFPKPCNWRKNEFKKWTKLASQGRGIVNFERDKISNHWIQYYRRIPHRKLLTALQLRANVYPTREFLARGRQDQYIKACRHCDADIESCAHIIGNCPVTQDARIKRANYICELLLEEAKKKDWVVFKEPHIRDSNKELYKPDLIFVKDARALVVDVTVRYEAAKSSLEEAAAEKVRKAKHLETEVRHLTNAKDVTFVGFPLGAAGKWHQDNFKLLTELGLSKSRQVKMAETFSTVALFSSVDIVHMFASRARKSMVM

SEQ ID NO: 792 - protein, 1665 aa, synthetic construct
MAPKKKRKVNISGSSCGSPNSADTSSDFKDLWTKLKECHDREVQGLQVKVTKLKQERILDAQRLEEFFTKNQQLREQQKVLHETIKVLEDRLRAGLCDRCAVTEEHMRKKQQEFENIRQQNLKLITELMNERNTLQEENKKLSEQLQQKIENDQQHQAAELECEEDVIPDSPITAFSFSGVNRLRRKENPHVRYIEQTHTKLEHSVCANEMRKVSKSSTHPQHNPNENEILVADTYDQSQSPMAKAHGTSSYTPDKSSFNLATVVAETLGLGVQEESETQGPMSPLGDELYHCLEGNHKKQPFESGSETPGTSESATPEGSPKRKVSSAEGAAKEEPKRRSARLSAKPPAKVEAKPKKAAAKDKSSDKKVQTKGKRGAKGKQAEVANQETKEDLPAENGETKTEESPASDEAGEKEAKSDSGSETPGTSESATPESYEQLAPQPCVGETLHSSLPRDSELFVPEEGSSEKESEDAPKTSPPTPGKHGLEQTGEEKVMVTVPDKNPPCPCCGTRVNSVLNLIEHLKVSHGKRGVCFRCAKCGKENSNYHSVVCHFKKCRGPETEKAPAGEWICEVCNRDFTTKIGLGQHKRLAHPAVRNQERIVASQPKETSNRGAHKRCWTKEEEELLIRLEAQFEGNKNINKLIAEHITTKTAKQISDKRRLLSRKPAEEPREEPGTCHHTRRAAASLRTEPEMSHHAQAEDRDNGPGRRPLPGRAAAGGRTMDEIRRHPDKGNGQQRPTKQKSEEQLQAYYKKTLEERLSAGALNTFPRAFKQVMEGRDIKLVINQTAQDCFGCLESISQIRTATRDKKDTVTREKHPKKPFQKWMKKRAIKKGNYLRFQRLFYLDRGKLAKIILDDIECLSCDIPLSEIYSVFKTRWETTGSFKSLGDFKTYGKADNTAFRELITAKEIEKNVQEMSKGSAPGPDGITLGDVVKMDPEFSRTMEIFNLWLTTGKIPDMVRGCRTVLIPKSSKPDRLKDINNWRPITIGSILLRLFSRIVTARLSKACPLNPRQRGFIRAAGCSENLKLLQTIIWSAKREHRPLGVVFVDIAKAFDTVSHQHIIHALQQREVDPHIVGLVSNMYENISTYITTKRNTHTDKIQIRVGVKQGDPMSPLLFNLAMDPLLCKLEESGKGYHLGQSSITAMAFADDLVLLSDSWENMNTNISILETFCNLTGLKTQGQKCHGFYIKPTKDSYTINDCAAWTINGTPLNMIDPGESEKYLGLQFDPWIGIARSGLSTKLDFWLQRIDQAPLKPLQKTDILKTYTIPRLIYIADHSEVKSALLETLDQKIRTAVKEWLHLPPCTCDAILYSSTRDGGLGITKLAGLIPSVQARRLHRIAQSSDDTMKCFMEKEKMEQLHKKLWIQAGGDRENIPSIWEAPPSSEPPNNVSTNSEWEAPTQKDKFPKPCNWRKNEFKKWTKLASQGRGIVNFERDKISNHWIQYYRRIPHRKLLTALQLRANVYPTREFLARGRQDQYIKACRHCDADNESCAHIIGNCPVTQDARIKRHNYICELLLEEAKKKDWVVFKEPHIRDSNKELYKPDLIFVKDGRALVVDVTVRYEAAKSSLEEAAAEKVRKYKHLETEVRHLTNAKDVTFVGFPLGARGKWHQDNFKLLTELGLSKSRQVKMAETFSTVALFSSVDIVHMFASRARKSMVM

SEQ ID NO: 793 - protein, 1665 aa, synthetic construct
MAPKKKRKVNISGSSCGSPNSADTSSDFKDLWTKLKECHDREVQGLQVKVTKLKQERILDAQRLEEFFTKNQQLREQQKVLHETIKVLEDRLRAGLCDRCAVTEEHMRKKQQEFENIRQQNLKLITELMNERNTLQEENKKLSEQLQQKIENDQQHQAAELECEEDVIPDSPITAFSFSGVNRLRRKENPHVRYIEQTHTKLEHSVCANEMRKVSKSSTHPQHNPNENEILVADTYDQSQSPMAKAHGTSSYTPDKSSFNLATVVAETLGLGVQEESETQGPMSPLGDELYHCLEGNHKKQPFESGSETPGTSESATPEGSPKRKVSSAEGAAKEEPKRRSARLSAKPPAKVEAKPKKAAAKDKSSDKKVQTKGKRGAKGKQAEVANQETKEDLPAENGETKTEESPASDEAGEKEAKSDSGSETPGTSESATPESYEQLAPQPCVGETLHSSLPRDSELFVPEEGSSEKESEDAPKTSPPTPGKHGLEQTGEEKVMVTVPDKNPPCPCCGTRVNSVLNLIEHLKVSHGKRGVCFRCAKCGKENSNYHSVVCHFKKCRGPETEKAPAGEWICEVCNRDFTTKIGLGQHKRLAHPAVRNQERIVASQPKETSNRGAHKRCWTKEEEELLIRLEAQFEGNKNINKLIAEHITTKTAKQISDKRRLLSRKPAEEPREEPGTCHHTRRAAASLRTEPEMSHHAQAEDRDNGPGRRPLPGRAAAGGRTMDEIRRHPDKGNGQQRPTKQKSEEQLQAYYKKTLEERLSAGALNTFPRAFKQVMEGRDIKLVINQTAQDCFGCLESISQIRTATRDKKDTVTREKHPKKPFQKWMKKRAIKKGNYLRFQRLFYLDRGKLAKIILDDIECLSCDIPLSEIYSVFKTRWETTGSFKSLGDFKTYGKADNTAFRELITAKEIEKNVQEMSKGSAPGPDGITLGDVVKMDPEFSRTMEIFNLWLTTGKIPDMVRGCRTVLIPKSSKPDRLKDINNWRPITIGSILLRLFSRIVTARLSKACPLNPRQRGFIRAAGCSENLKLLQTIIWSAKREHRPLGVVFVDIAKAFDTVSHQHIIHALQQREVDPHIVGLVSNMYENISTYITTKRNTHTDKIQIRVGVKQGDPMSPLLFNLAMDPLLCKLEESGKGYHRGQSSITAMAFADDLVLLSDSWENMNTNISILETFCNLTGLKTQGQKCHGFYIKPTKDSYTINDCAAWTINGTPLNMIDPGESEKYLGLQFDPWIGIARSGLSTKLDQWLQRIDQAPLKPLQKTDILKTYTIPRLIYIADHSEVKSALLETLDQKIRTAVKEWLHLPPCTCDAILYSSTRDGGLGITKLAGLIPSVQARRLHRIAQSSDDTMKCFMEKEKMEQLHKKLWIQAGGDRENIPSIWEAPPSSEPPNNVSTNSEWEAPTQKDKFPKPCNWRKNEFKKWTKLASQGRGIVNFERDKISNHWIQYYRRIPHRKLLTALQLRANVYPTREFLARGRQDQYIKACRHCDADNESCAHIIGNCPVTQDARIKRHNYICELLLEEAKKKDWVVFKEPHIRDSNKELYKPDLIFVKDGRALVVDVTVRYEAAKSSLEEAAAEKVRKYKHLETEVRHLTNAKDVTFVGFPLGARGKWHQDNFKLLTELGLSKSRQVKMAETFSTVALFSSVDIVHMFASRARKSMVM

SEQ ID NO: 794 - protein, 1665 aa, synthetic construct
MAPKKKRKVNISGSSCGSPNSADTSSDFKDLWTKLKECHDREVQGLQVKVTKLKQERILDAQRLEEFFTKNQQLREQQKVLHETIKVLEDRLRAGLCDRCAVTEEHMRKKQQEFENIRQQNLKLITELMNERNTLQEENKKLSEQLQQKIENDQQHQAAELECEEDVIPDSPITAFSFSGVNRLRRKENPHVRYIEQTHTKLEHSVCANEMRKVSKSSTHPQHNPNENEILVADTYDQSQSPMAKAHGTSSYTPDKSSFNLATVVAETLGLGVQEESETQGPMSPLGDELYHCLEGNHKKQPFESGSETPGTSESATPEGSPKRKVSSAEGAAKEEPKRRSARLSAKPPAKVEAKPKKAAAKDKSSDKKVQTKGKRGAKGKQAEVANQETKEDLPAENGETKTEESPASDEAGEKEAKSDSGSETPGTSESATPESYEQLAPQPCVGETLHSSLPRDSELFVPEEGSSEKESEDAPKTSPPTPGKHGLEQTGEEKVMVTVPDKNPPCPCCGTRVNSVLNLIEHLKVSHGKRGVCFRCAKCGKENSNYHSVVCHFKKCRGPETEKAPAGEWICEVCNRDFTTKIGLGQHKRLAHPAVRNQERIVASQPKETSNRGAHKRCWTKEEEELLIRLEAQFEGNKNINKLIAEHITTKTAKQISDKRRLLSRKPAEEPREEPGTCHHTRRAAASLRTEPEMSHHAQAEDRDNGPGRRPLPGRAAAGGRTMDEIRRHPDKGNGQQRPTKQKSEEQLQAYYKKTLEERLSAGALNTFPRAFKQVMEGRDIKLVINQTAQDCFGCLESISQIRTATRDKKDTVTREKQPKKPFQKWMKKRAIKKGNYLRFQRLFYLDRGKLAKIILDDIECLSCDIPLSEIYSVFKTRWETTGSFKSLGDFKTYGKADNTAFRELITAKEIEKNVQEMSKGSAPGPDGITLGDVVKMDPEFSRTMEIFNLWLTTGKIPDMVRGCRTVLIPKSSKPDRLKDINNWRPITIGSILLRLFSRIVTARLSKACPLNPRQRGFIRAAGCSENLKLLQTIIWSAKREHRPLGVVFVDIAKAFDTVSHQHIIHALQQREVDPHIVGLVSNMYENISTYITTKRNTHTDKIQIRVGVKQGDPMSPLLFNLAMDPLLCKLEESGKGYHRGQSSITAMAFADDLVLLSDSWENMNTNISILETFCNLTGLKTQGQKCHGFYIKPTKKSYTINDCAAWTINGTPLNMIDPGESEKYLGLQFDPWIGIARSGLSTKLDFWLQRIDQAPLKPLQKTDILKTYTIPRLIYIADHSEVKSALLETLDQKIRTAVKEWLHLPPCTCDAILYSSTRDGGLGITKLAGLIPSVQARRLHRIAQSSDDTMKCFMEKEKMEQLHKKLWIQAGGDRENIPSIWEAPPSSEPPNNVSTNSEWEAPTQKDKFPKPCNWRKNEFKKWTKLASQGRGIVNFERDKISNHWIQYYRRIPHRKLLTALQLRANVYPTREFLARGRQDQYIKACRHCDADNESCAHIIGNCPVTQDARIKRHNYICELLLEEAKKKDWVVFKEPHIRDSNKELYKPDLIFVKDGRALVVDVTVRYEAAKSSLEEAAAEKVRKYKHLETEVRHLTNAKDVTFVGFPLGARGKWHQDNFKLLTELGLSKSRQVKMAETFSTVALFSSVDIVHMFASRARKSMVM

SEQ ID NO: 795 - protein, 1665 aa, synthetic construct
MAPKKKRKVNISGSSCGSPNSADTSSDFKDLWTKLKECHDREVQGLQVKVTKLKQERILDAQRLEEFFTKNQQLREQQKVLHETIKVLEDRLRAGLCDRCAVTEEHMRKKQQEFENIRQQNLKLITELMNERNTLQEENKKLSEQLQQKIENDQQHQAAELECEEDVIPDSPITAFSFSGVNRLRRKENPHVRYIEQTHTKLEHSVCANEMRKVSKSSTHPQHNPNENEILVADTYDQSQSPMAKAHGTSSYTPDKSSFNLATVVAETLGLGVQEESETQGPMSPLGDELYHCLEGNHKKQPFESGSETPGTSESATPEGSPKRKVSSAEGAAKEEPKRRSARLSAKPPAKVEAKPKKAAAKDKSSDKKVQTKGKRGAKGKQAEVANQETKEDLPAENGETKTEESPASDEAGEKEAKSDSGSETPGTSESATPESYEQLAPQPCVGETLHSSLPRDSELFVPEEGSSEKESEDAPKTSPPTPGKHGLEQTGEEKVMVTVPDKNPPCPCCGTRVNSVLNLIEHLKVSHGKRGVCFRCAKCGKENSNYHSVVCHFKKCRGPETEKAPAGEWICEVCNRDFTTKIGLGQHKRLAHPAVRNQERIVASQPKETSNRGAHKRCWTKEEEELLIRLEAQFEGNKNINKLIAEHITTKTAKQISDKRRLLSRKPAEEPREEPGTCHHTRRAAASLRTEPEMSHHAQAEDRDNGPGRRPLPGRAAAGGRTMDEIRRHPDKGNGQQRPTKQKSEEQLQAYYKKTLEERLSAGALNTFPRAFKQVMEGRDIKLVINQTAQDCFGCLESISQIRTATRDKKDTVTREKHPKKPFQKWMKKRAIKKGNYLRFQRLFYLDRGKLAKIILDDIECLSCDIPLSEIYSVFKTRWETTGSFKSLGDFKTYGKADNTAFRELITAKEIEKNVQEMSKGSAPGPDGITLGDVVKMDPEFSRTMEIFNLWLTSGKIPDMVRGCRTVLIPKSSKPDRLKDINNWRPITIGSILLRLFSRIVTARLSKACPLNPRQRGFIRAAGCSENLKLLQTIIWSAKREHRPLGVVFVDIAKAFDTVSHQHIIHALQQREVDPHIVGLVSNMYENISTYITTKRNTHTDKIQIRVGVKQGDPMSPLLFNLAMDPLLCKLEESGKGYHRGQSSITAMAFADDLVLLSDSWENMNTNISILETFCNLTGLKTQGQKCHGFYIKPTKKSYTINDCAAWTINGTPLNMIDPGESEKYLGLQFDPWIGIARSGLSTKLDFWLQRIDQAPLKPLQKTDILKTYTIPRLIYIADHSEVKSALLETLDQKIRTAVKEWLHLPPCTCDAILYSSTRDGGLGITKLAGLIPSVQARRLHRIAQSSDDTMKCFMEKEKMEQLHKKLWIQAGGDRENIPSIWEAPPSSEPPNNVSTNSEWEAPTQKDKFPKPCNWRKNEFKKWTKLASQGRGIVNFERDKISNHWIQYYRRIPHRKLLTALQLRANVYPTREFLARGRQDQYIKACRHCDADNESCAHIIGNCPVTQDARIKRHNYICELLLEEAKKKDWVVFKEPHIRDSNKELYKPDLIFVKDGRALVVDVTVRYEAAKSSLEEAAAEKVRKYKHLETEVRHLTNAKDVTFVGFPLGARGKWHQDNFKLLTELGLSKSRQVKMAETFSTVALFSSVDIVHMFASRARKSMVM

SEQ ID NO: 796 - protein, 1665 aa, synthetic construct
MAPKKKRKVNISGSSCGSPNSADTSSDFKDLWTKLKECHDREVQGLQVKVTKLKQERILDAQRLEEFFTKNQQLREQQKVLHETIKVLEDRLRAGLCDRCAVTEEHMRKKQQEFENIRQQNLKLITELMNERNTLQEENKKLSEQLQQKIENDQQHQAAELECEEDVIPDSPITAFSFSGVNRLRRKENPHVRYIEQTHTKLEHSVCANEMRKVSKSSTHPQHNPNENEILVADTYDQSQSPMAKAHGTSSYTPDKSSFNLATVVAETLGLGVQEESETQGPMSPLGDELYHCLEGNHKKQPFESGSETPGTSESATPEGSPKRKVSSAEGAAKEEPKRRSARLSAKPPAKVEAKPKKAAAKDKSSDKKVQTKGKRGAKGKQAEVANQETKEDLPAENGETKTEESPASDEAGEKEAKSDSGSETPGTSESATPESYEQLAPQPCVGETLHSSLPRDSELFVPEEGSSEKESEDAPKTSPPTPGKHGLEQTGEEKVMVTVPDKNPPCPCCGTRVNSVLNLIEHLKVSHGKRGVCFRCAKCGKENSNYHSVVCHFKKCRGPETEKAPAGEWICEVCNRDFTTKIGLGQHKRLAHPAVRNQERIVASQPKETSNRGAHKRCWTKEEEELLIRLEAQFEGNKNINKLIAEHITTKTAKQISDKRRLLSRKPAEEPREEPGTCHHTRRAAASLRTEPEMSHHAQAEDRDNGPGRRPLPGRAAAGGRTMDEIRRHPDKGNGQQRPTKQKSEEQLQAYYKKTLEERLSAGALNTFPRAFKQVMEGRDIKLVINQTAQDCFGCLESISQIRTATRDKKDTVTREKHPKKPFQKWMKKRAIKKGNYLRFQRLFYLDRGKLAKIILDDIECLSCDIPLSEIYSVFKARWETTGSFKSLGDFKTYGKADNTAFRELITAKEIEKNVQEMSKGSAPGPDGITLGDVVKMDPEFSRTMEIFNLWLTTGKIPDMVRGCRTVLIPKSSKPDRLKDINNWRPITIGSILLRLFSRIVTARLSKACPLNPRQRGFIRAAGCSENLKLLQTIIWSAKREHRPLGVVFVDIAKAFDTVSHQHIIHALQQREVDPHIVGLVSNMYENISTYITTKRNTHTDKIQIRVGVKQGDPMSPLLFNLAMDPLLCKLEESGKGYHRGQSSITAMAFADDLVLLSDSWENMNTNISILETFCNLTGLKTQGQKCHGFYIKPTKKSYTINDCAAWTINGTPLNMIDPGESEKYLGLQFDPWIGIARSGLSTKLDFWLQRIDQAPLKPLQKTDILKTYTIPRLIYIADHSEVKSALLETLDQKIRTAVKEWLHLPPCTCDAILYSSTRDGGLGITKLAGLIPSVQARRLHRIAQSSDDTMKCFMEKEKMEQLHKKLWIQAGGDRENIPSIWEAPPSSEPPNNVSTNSEWEAPTQKDKFPKPCNWRKNEFKKWTKLASQGRGIVNFERDKISNHWIQYYRRIPHRKLLTALQLRANVYPTREFLARGRQDQYIKACRHCDADNESCAHIIGNCPVTQDARIKRHNYICELLLEEAKKKDWVVFKEPHIRDSNKELYKPDLIFVKDGRALVVDVTVRYEAAKSSLEEAAAEKVRKYKHLETEVRHLTNAKDVTFVGFPLGARGKWHQDNFKLLTELGLSKSRQVKMAETFSTVALFSSVDIVHMFASRARKSMVM

SEQ ID NO: 797 - protein, 1665 aa, synthetic construct
MAPKKKRKVNISGSSCGSPNSADTSSDFKDLWTKLKECHDREVQGLQVKVTKLKQERILDAQRLEEFFTKNQQLREQQKVLHETIKVLEDRLRAGLCDRCAVTEEHMRKKQQEFENIRQQNLKLITELMNERNTLQEENKKLSEQLQQKIENDQQHQAAELECEEDVIPDSPITAFSFSGVNRLRRKENPHVRYIEQTHTKLEHSVCANEMRKVSKSSTHPQHNPNENEILVADTYDQSQSPMAKAHGTSSYTPDKSSFNLATVVAETLGLGVQEESETQGPMSPLGDELYHCLEGNHKKQPFESGSETPGTSESATPEGSPKRKVSSAEGAAKEEPKRRSARLSAKPPAKVEAKPKKAAAKDKSSDKKVQTKGKRGAKGKQAEVANQETKEDLPAENGETKTEESPASDEAGEKEAKSDSGSETPGTSESATPESYEQLAPQPCVGETLHSSLPRDSELFVPEEGSSEKESEDAPKTSPPTPGKHGLEQTGEEKVMVTVPDKNPPCPCCGTRVNSVLNLIEHLKVSHGKRGVCFRCAKCGKENSNYHSVVCHFKKCRGPETEKAPAGEWICEVCNRDFTTKIGLGQHKRLAHPAVRNQERIVASQPKETSNRGAHKRCWTKEEEELLIRLEAQFEGNKNINKLIAEHITTKTAKQISDKRRLLSRKPAEEPREEPGTCHHTRRAAASLRTEPEMSHHAQAEDRDNGPGRRPLPGRAAAGGRTMDEIRRHPDKGNGQQRPTKQKSEEQLQAHYKKTLEERLSAGALNTFPRAFKQVMEGRDIKLVINQTAQDCFGCLESISQIRTATRDKKDTVTREKHPKKPFQKWMKKRAIKKGNYLRFQRLFYLDRGKLAKIILDDIECLSCDIPLSEIYSVFKTRWETTGSFKSLGDFKTYGKADNTAFRELITAKEIEKNVQEMSKGSAPGPDGITLGDVVKMDPEFSRTMEIFNLWLTTGKIPDMVRGCRTVLIPKSSKPDRLKDINNWRPITIGSILLRLFSRIVTARLSKACPLNPRQRGFIRAAGCSENLKLLQTIIWSAKREHRPLGVVFVDIAKAFDTVSHQHIIHALQQREVDPHIVGLVSNMYENISTYITTKRNTHTDKIQIRVGVKQGDPMSPLLFNLAMDPLLCKLEESGKGYHRGQSSITAMAFADDLVLLSDSWENMNTNISILETFCNLTGLKTQGQKCHGFYIKPTKKSYTINDCAAWTINGTPLNMIDPGESEKYLGLQFDPWIGIARSGLSTKLDFWLQRIDQAPLKPLQKTDILKTYTIPRLIYIADHSEVKSALLETLDQKIRTAVKEWLHLPPCTCDAILYSSTRDGGLGITKLAGLIPSVQARRLHRIAQSSDDTMKCFMEKEKMEQLHKKLWIQAGGDRENIPSIWEAPPSSEPPNNVSTNSEWEAPTQKDKFPKPCNWRKNEFKKWTKLASQGRGIVNFERDKISNHWIQYYRRIPHRKLLTALQLRANVYPTREFLARGRQDQYIKACRHCDADNESCAHIIGNCPVTQDARIKRHNYICELLLEEAKKKDWVVFKEPHIRDSNKELYKPDLIFVKDGRALVVDVTVRYEAAKSSLEEAAAEKVRKYKHLETEVRHLTNAKDVTFVGFPLGARGKWHQDNFKLLTELGLSKSRQVKMAETFSTVALFSSVDIVHMFASRARKSMVM

SEQ ID NO: 798 - protein, 1665 aa, synthetic construct
MAPKKKRKVNISGSSCGSPNSADTSSDFKDLWTKLKECHDREVQGLQVKVTKLKQERILDAQRLEEFFTKNQQLREQQKVLHETIKVLEDRLRAGLCDRCAVTEEHMRKKQQEFENIRQQNLKLITELMNERNTLQEENKKLSEQLQQKIENDQQHQAAELECEEDVIPDSPITAFSFSGVNRLRRKENPHVRYIEQTHTKLEHSVCANEMRKVSKSSTHPQHNPNENEILVADTYDQSQSPMAKAHGTSSYTPDKSSFNLATVVAETLGLGVQEESETQGPMSPLGDELYHCLEGNHKKQPFESGSETPGTSESATPEGSPKRKVSSAEGAAKEEPKRRSARLSAKPPAKVEAKPKKAAAKDKSSDKKVQTKGKRGAKGKQAEVANQETKEDLPAENGETKTEESPASDEAGEKEAKSDSGSETPGTSESATPESYEQLAPQPCVGETLHSSLPRDSELFVPEEGSSEKESEDAPKTSPPTPGKHGLEQTGEEKVMVTVPDKNPPCPCCGTRVNSVLNLIEHLKVSHGKRGVCFRCAKCGKENSNYHSVVCHFKKCRGPETEKAPAGEWICEVCNRDFTTKIGLGQHKRLAHPAVRNQERIVASQPKETSNRGAHKRCWTKEEEELLIRLEAQFEGNKNINKLIAEHITTKTAKQISDKRRLLSRKPAEEPREEPGTCHHTRRAAASLRTEPEMSHHAQAEDRDNGPGRRPLPGRAAAGGRTMDEIRRHPDKGNGQQRPTKQKSEEQLQAYYKKTLEERLSAGALNTFPRAFKQVMEGRDIKLVINQTAQDCFGCLESISQIRTATRDKKDTVTREKHPKKPFQKWMKKRAIKKGNYLRFQRLFYLDRGKLAKIILDDIECLSCDIPLSEIYSVFKTRWETTGSFKSLGDFKTYGKADNTAFRELITAKEIEKNVQEMSKGSAPGPDGITLGDVVKMDPEFSRTMEIFNLWLTTGKIPDMVRGCRTVLIPKSSKPDRLKDINNWRPITIGSILLRLFSRIVTARLSKACPLNPRQRGFIRAAGCSENLKLLQTIIWSAKREHRPLGVVFVDIAKAFDTVSHQHIIHALQQREVDPHIVGLVSNMYENISTYITTKRNTHTDKIQIRVGVKQGDPMSPLLFNLAMDPLLCKLEESGKGYHRGQSSITAMAFADDLVLLSDSWENMNTNISILETFCNLTGLKTQGQKCHGFYIKPTKKSYTINDCAAWTINGTPLNMIDPGESEKYLGLQFDPWIGIARSGLSTKLDFWLQRIDQAPLKPLQKTDILKTYTIPRLIYLADHSEVKSALLETLDQKIRTAVKEWLHLPPCTCDAILYSSTRDGGLGITKLAGLIPSVQARRLHRIAQSSDDTMKCFMEKEKMEQLHKKLWIQAGGDRENIPSIWEAPPSSEPPNNVSTNSEWEAPTQKDKFPKPCNWRKNEFKKWTKLASQGRGIVNFERDKISNHWIQYYRRIPHRKLLTALQLRANVYPTREFLARGRQDQYIKACRHCDADNESCAHIIGNCPVTQDARIKRHNYICELLLEEAKKKDWVVFKEPHIRDSNKELYKPDLIFVKDGRALVVDVTVRYEAAKSSLEEAAAEKVRKYKHLETEVRHLTNAKDVTFVGFPLGARGKWHQDNFKLLTELGLSKSRQVKMAETFSTVALFSSVDIVHMFASRARKSMVM

SEQ ID NO: 799 - protein, 1665 aa, synthetic construct
MAPKKKRKVNISGSSCGSPNSADTSSDFKDLWTKLKECHDREVQGLQVKVTKLKQERILDAQRLEEFFTKNQQLREQQKVLHETIKVLEDRLRAGLCDRCAVTEEHMRKKQQEFENIRQQNLKLITELMNERNTLQEENKKLSEQLQQKIENDQQHQAAELECEEDVIPDSPITAFSFSGVNRLRRKENPHVRYIEQTHTKLEHSVCANEMRKVSKSSTHPQHNPNENEILVADTYDQSQSPMAKAHGTSSYTPDKSSFNLATVVAETLGLGVQEESETQGPMSPLGDELYHCLEGNHKKQPFESGSETPGTSESATPEGSPKRKVSSAEGAAKEEPKRRSARLSAKPPAKVEAKPKKAAAKDKSSDKKVQTKGKRGAKGKQAEVANQETKEDLPAENGETKTEESPASDEAGEKEAKSDSGSETPGTSESATPESYEQLAPQPCVGETLHSSLPRDSELFVPEEGSSEKESEDAPKTSPPTPGKHGLEQTGEEKVMVTVPDKNPPCPCCGTRVNSVLNLIEHLKVSHGKRGVCFRCAKCGKENSNYHSVVCHFKKCRGPETEKAPAGEWICEVCNRDFTTKIGLGQHKRLAHPAVRNQERIVASQPKETSNRGAHKRCWTKEEEELLIKLEAQFEGNKNINKLIAEHITTKTAKQISDKRRLLSRKPAEEPREEPGTCHHTRRAAASLRTEPEMSHHAQAEDRDNGPGRRPLPGRAAAGGRTMDEIRRHPDKGNGQQRPTKQKSEEQLQAYYKKTLEERLSAGALNTFPRAFKQVMEGRDIKLVINQTAQDCFGCLESISQIRTATRDKKDTVTREKHPKKPFQKWMKKRAIKKGNYLRFQRLFYLDRGKLAKIILDDIECLSCDIPLSEIYSVFKTRWETTGSFKSLGDFKTYGKADNTAFRELITAKEIEKNVQEMSKGSAPGPDGITLGDVVKMDPEFSRTMEIFNLWLTTGKIPDMVRGCRTVLIPKSSKPDRLKDINNWRPITIGSILLRLFSRIVTARLSKACPLNPRQRGFIRAAGCSENLKLLQTIIWSAKREHRPLGVVFVDIAKAFDTVSHQHIIHALQQREVDPHIVGLVSNMYENISTYITTKRNTHTDKIQIRVGVKQGDPMSPLLFNLAMDPLLCKLEESGKGYHRGQSSITAMAFADDLVLLSDSWENMNTNISILETFCNLTGLKTQGQKCHGFYIKPTKKSYTINDCAAWTINGTPLNMIDPGESEKYLGLQFDPWIGIARSGLSTKLDFWLQRIDQAPLKPLQKTDILKTYTIPRLIYIADHSEVKSALLETLDQKIRTAVKEWLHLPPCTCDAILYSSTRDGGLGITKLAGLIPSVQARRLHRIAQSSDDTMKCFMEKEKMEQLHKKLWIQAGGDRENIPSIWEAPPSSEPPNNVSTNSEWEAPTQKDKFPKPCNWRKNEFKKWTKLASQGRGIVNFERDKISNHWIQYYRRIPHRKLLTALQLRANVYPTREFLARGRQDQYIKACRHCDADNESCAHIIGNCPVTQDARIKRHNYICELLLEEAKKKDWVVFKEPHIRDSNKELYKPDLIFVKDGRALVVDVTVRYEAAKSSLEEAAAEKVRKYKHLETEVRHLTNAKDVTFVGFPLGARGKWHQDNFKLLTELGLSKSRQVKMAETFSTVALFSSVDIVHMFASRARKSMVM

SEQ ID NO: 800 - protein, 1665 aa, synthetic construct
MAPKKKRKVNISGSSCGSPNSADTSSDFKDLWTKLKECHDREVQGLQVKVTKLKQERILDAQRLEEFFTKNQQLREQQKVLHETIKVLEDRLRAGLCDRCAVTEEHMRKKQQEFENIRQQNLKLITELMNERNTLQEENKKLSEQLQQKIENDQQHQAAELECEEDVIPDSPITAFSFSGVNRLRRKENPHVRYIEQTHTKLEHSVCANEMRKVSKSSTHPQHNPNENEILVADTYDQSQSPMAKAHGTSSYTPDKSSFNLATVVAETLGLGVQEESETQGPMSPLGDELYHCLEGNHKKQPFESGSETPGTSESATPEGSPKRKVSSAEGAAKEEPKRRSARLSAKPPAKVEAKPKKAAAKDKSSDKKVQTKGKRGAKGKQAEVANQETKEDLPAENGETKTEESPASDEAGEKEAKSDSGSETPGTSESATPESYEQLAPQPCVGETLHSSLPRDSELFVPEEGSSEKESEDAPKTSPPTPGKHGLEQTGEEKVMVTVPDKNPPCPCCGTRVNSVLNLIEHLKVSHGKRGVCFRCAKCGKENSNYHSVVCHFKKCRGPETEKAPAGEWICEVCGRDFTTKIGLGQHKRLAHPAVRNQERIVASQPKETSNRGAHKRCWTKEEEELLIRLEAQFEGNKNINKLIAEHITTKTAKQISDKRRLLSRKPAEEPREEPGTCHHTRRAAASLRTEPEMSHHAQAEDRDNGPGRRPLPGRAAAGGRTMDEIRRHPDKGNGQQRPTKQKSEEQLQAYYKKTLEERLSAGALNTFPRAFKQVMEGRDIKLVINQTAQDCFGCLESISQIRTATRDKKDTVTREKHPKKPFQKWMKKRAIKKGNYLRFQRLFYLDRGKLAKIILDDIECLSCDIPLSEIYSVFKTRWETTGSFKSLGDFKTYGKADNTAFRELITAKEIEKNVQEMSKGSAPGPDGITLGDVVKMDPEFSRTMEIFNLWLTTGKIPDMVRGCRTVLIPKSSKPDRLKDINNWRPITIGSILLRLFSRIVTARLSKACPLNPRQRGFIRAAGCSENLKLLQTIIWSAKREHRPLGVVFVDIAKAFDTVSHQHIIHALQQREVDPHIVGLVSNMYENISTYITTKRNTHTDKIQIRVGVKQGDPMSPLLFNLAMDPLLCKLEESGKGYHRGQSSITAMAFADDLVLLSDSWENMNTNISILETFCNLTGLKTQGQKCHGFYIKPTKKSYTINDCAAWTINGTPLNMIDPGESEKYLGLQFDPWIGIARSGLSTKLDFWLQRIDQAPLKPLQKTDILKTYTIPRLIYIADHSEVKSALLETLDQKIRTAVKEWLHLPPCTCDAILYSSTRDGGLGITKLAGLIPSVQARRLHRIAQSSDDTMKCFMEKEKMEQLHKKLWIQAGGDRENIPSIWEAPPSSEPPNNVSTNSEWEAPTQKDKFPKPCNWRKNEFKKWTKLASQGRGIVNFERDKISNHWIQYYRRIPHRKLLTALQLRANVYPTREFLARGRQDQYIKACRHCDADNESCAHIIGNCPVTQDARIKRHNYICELLLEEAKKKDWVVFKEPHIRDSNKELYKPDLIFVKDGRALVVDVTVRYEAAKSSLEEAAAEKVRKYKHLETEVRHLTNAKDVTFVGFPLGARGKWHQDNFKLLTELGLSKSRQVKMAETFSTVALFSSVDIVHMFASRARKSMVM

SEQ ID NO: 801 - protein, 1665 aa, synthetic construct
MAPKKKRKVNISGSSCGSPNSADTSSDFKDLWTKLKECHDREVQGLQVKVTKLKQERILDAQRLEEFFTKNQQLREQQKVLHETIKVLEDRLRAGLCDRCAVTEEHMRKKQQEFENIRQQNLKLITELMNERNTLQEENKKLSEQLQQKIENDQQHQAAELECEEDVIPDSPITAFSFSGVNRLRRKENPHVRYIEQTHTKLEHSVCANEMRKVSKSSTHPQHNPNENEILVADTYDQSQSPMAKAHGTSSYTPDKSSFNLATVVAETLGLGVQEESETQGPMSPLGDELYHCLEGNHKKQPFESGSETPGTSESATPEGSPKRKVSSAEGAAKEEPKRRSARLSAKPPAKVEAKPKKAAAKDKSSDKKVQTKGKRGAKGKQAEVANQETKEDLPAENGETKTEESPASDEAGEKEAKSDSGSETPGTSESATPESYEQLAPQPCVGETLHSSLPRDSELFVPEEGSSEKESEDAPKTSPPTPGKHGLEQTGEEKVMVTVPDKNPPCPCCGTRVNSVLNLIEHLKVSHGKRGVCFRCAKCGKENSNYHSVVCHFKKCRGPETEKAPAGEWICEVCNRDFTTKIGLGQHKRLAHPAVRNQERIVASQPKETSNRGAHKRCWTKEEEELLIRLEAQFEGNKNINKLIAEHITTKTAKQISDKRRLLSRKPAEEPREEPGTCHHTRRAAASLRTEPEMSHHAQAEDRDNGPGRRPLPGRAAAGGRTMDEIRRHPDKGNGQQRPTKQKSEEQLQAYYKKTLEERLSAGALNTFPRAFKQVMEGRDIQLVINQTAQDCFGCLESISQIRTATRDKKDTVTREKHPKKPFQKWMKKRAIKKGNYLRFQRLFYLDRGKLAKIILDDIECLSCDIPLSEIYSVFKTRWETTGSFKSLGDFKTYGKADNTAFRELITAKEIEKNVQEMSKGSAPGPDGITLGDVVKMDPEFSRTMEIFNLWLTTGKIPDMVRGCRTVLIPKSSKPDRLKDINNWRPITIGSILLRLFSRIVTARLSKACPLNPRQRGFIRAAGCSENLKLLQTIIWSAKREHRPLGVVFVDIAKAFDTVSHQHIIHALQQREVDPHIVGLVSNMYENISTYITTKRNTHTDKIQIRVGVKQGDPMSPLLFNLAMDPLLCKLEESGKGYHRGQSSITAMAFADDLVLLSDSWENMNTNISILETFCNLTGLKTQGQKCHGFYIKPTKKSYTINDCAAWTINGTPLNMIDPGESEKYLGLQFDPWIGIARSGLSTKLDFWLQRIDQAPLKPLQKTDILKTYTIPRLIYIADHSEVKSALLETLDQKIRTAVKEWLHLPPCTCDAILYSSTRDGGLGITKLAGLIPSVQARRLHRIAQSSDDTMKCFMEKEKMEQLHKKLWIQAGGDRENIPSIWEAPPSSEPPNNVSTNSEWEAPTQKDKFPKPCNWRKNEFKKWTKLASQGRGIVNFERDKISNHWIQYYRRIPHRKLLTALQLRANVYPTREFLARGRQDQYIKACRHCDADNESCAHIIGNCPVTQDARIKRHNYICELLLEEAKKKDWVVFKEPHIRDSNKELYKPDLIFVKDGRALVVDVTVRYEAAKSSLEEAAAEKVRKYKHLETEVRHLTNAKDVTFVGFPLGARGKWHQDNFKLLTELGLSKSRQVKMAETFSTVALFSSVDIVHMFASRARKSMVM

SEQ ID NO: 802 - protein, 1665 aa, synthetic construct
MAPKKKRKVNISGSSCGSPNSADTSSDFKDLWTKLKECHDREVQGLQVKVTKLKQERILDAQRLEEFFTKNQQLREQQKVLHETIKVLEDRLRAGLCDRCAVTEEHMRKKQQEFENIRQQNLKLITELMNERNTLQEENKKLSEQLQQKIENDQQHQAAELECEEDVIPDSPITAFSFSGVNRLRRKENPHVRYIEQTHTKLEHSVCANEMRKVSKSSTHPQHNPNENEILVADTYDQSQSPMAKAHGTSSYTPDKSSFNLATVVAETLGLGVQEESETQGPMSPLGDELYHCLEGNHKKQPFESGSETPGTSESATPEGSPKRKVSSAEGAAKEEPKRRSARLSAKPPAKVEAKPKKAAAKDKSSDKKVQTKGKRGAKGKQAEVANQETKEDLPAENGETKTEESPASDEAGEKEAKSDSGSETPGTSESATPESYEQLAPQPCVGETLHSSLPRDSELFVPEEGSSEKESEDAPKTSPPTPGKHGLEQTPEEKVMVTVPDKNPPCPCCGTRVNSVLNLIEHLKVSHGKRGVCFRCAKCGKENSNYHSVVCHFKKCRGPETEKAPAGEWICEVCNRDFTTKIGLGQHKRLAHPAVRNQERIVASQPKETSNRGAHKRCWTKEEEELLIRLEAQFEGNKNINKLIAEHITTKTAKQISDKRRLLSRKPAEEPREEPGTCHHTRRAAASLRTEPEMSHHAQAEDRDNGPGRRPLPGRAAAGGRTMDEIRRHPDKGNGQQRPTKQKSEEQLQAYYKKTLEERLSAGALNTFPRAFKQVMEGRDIKLVINQTAQDCFGCLESISQIRTATRDKKDTVTREKHPKKPFQKWMKKRAIKKGNYLRFQRLFYLDRGKLAKIILDDIECLSCDIPLSEIYSVFKTRWETTGSFKSLGDFKTYGKADNTAFRELITAKEIEKNVQEMSKGSAPGPDGITLGDVVKMDPEFSRTMEIFNLWLTTGKIPDMVRGCRTVLIPKSSKPDRLKDINNWRPITIGSILLRLFSRIVTARLSKACPLNPRQRGFIRAAGCSENLKLLQTIIWSAKREHRPLGVVFVDIAKAFDTVSHQHIIHALQQREVDPHIVGLVSNMYENISTYITTKRNTHTDKIQIRVGVKQGDPMSPLLFNLAMDPLLCKLEESGKGYHRGQSSITAMAFADDLVLLSDSWENMNTNISILETFCNLTGLKTQGQKCHGFYIKPTKKSYTINDCAAWTINGTPLNMIDPGESEKYLGLQFDPWIGIARSGLSTKLDFWLQRIDQAPLKPLQKTDILKTYTIPRLIYIADHSEVKSALLETLDQKIRTAVKEWLHLPPCTCDAILYSSTRDGGLGITKLAGLIPSVQARRLHRIAQSSDDTMKCFMEKEKMEQLHKKLWIQAGGDRENIPSIWEAPPSSEPPNNVSTNSEWEAPTQKDKFPKPCNWRKNEFKKWTKLASQGRGIVNFERDKISNHWIQYYRRIPHRKLLTALQLRANVYPTREFLARGRQDQYIKACRHCDADNESCAHIIGNCPVTQDARIKRHNYICELLLEEAKKKDWVVFKEPHIRDSNKELYKPDLIFVKDGRALVVDVTVRYEAAKSSLEEAAAEKVRKYKHLETEVRHLTNAKDVTFVGFPLGARGKWHQDNFKLLTELGLSKSRQVKMAETFSTVALFSSVDIVHMFASRARKSMVM

SEQ ID NO: 803 - protein, 1665 aa, synthetic construct
MAPKKKRKVNISGSSCGSPNSADTSSDFKDLWTKLKECHDREVQGLQVKVTKLKQERILDAQRLEEFFTKNQQLREQQKVLHETIKVLEDRLRAGLCDRCAVTEEHMRKKQQEFENIRQQNLKLITELMNERNTLQEENKKLSEQLQQKIENDQQHQAAELECEEDVIPDSPITAFSFSGVNRLRRKENPHVRYIEQTHTKLEHSVCANEMRKVSKSSTHPQHNPNENEILVADTYDQSQSPMAKAHGTSSYTPDKSSFNLATVVAETLGLGVQEESETQGPMSPLGDELYHCLEGNHKKQPFESGSETPGTSESATPEGSPKRKVSSAEGAAKEEPKRRSARLSAKPPAKVEAKPKKAAAKDKSSDKKVQTKGKRGAKGKQAEVANQETKEDLPAENGETKTEESPASDEAGEKEAKSDSGSETPGTSESATPESYEQLAPQPCVGETLHSSLPRDSELFVPEEGSSEKESEDAPKTSPPTPGKHGLEQTGEEKVMVTVPDKNPPCPCCGTRVNSVLNLIEHLKVSHGKRGVCFRCAKCGKENSNYHSVVCHFKKCRGPETEKAPAGEWICEVCNRDFTTKIGLGQHKRLAHPAVRNQERIVASQPKETSNRGAHKRCWTKEEEELLIRLEAQFEGNKNINKLIAEHITTKTAKQISDKRRLLSRKPAEEPREEPGTCHHTRRAAASLRTEPEMSHHAQAEDRDNGPGRRPLPGRAAAGGRTMDEIRRHPDKGNGQQRPTKQKSEEQLQAYYKKTLEERLSAGALNTFPRAFKQVMEGRDIKLVINQTAQDCFGCLESISQIRTATRDKKDTVTREKHPKKPFQKWMKKRAIKKGNYLRFQRLFYLDRGKLAKIILDDIECLSCDIPLSEIYSVFKTRWETTGSFKSLGDFKTYGKADNTAFRELITAKEIEKNVQEMSKGSAPGPDGITLGDVVKMDPEFSRTMEIFNLWLTTGKIPDMVRGCRTVLIPKSSKPDRLKDINNWRPITIGSILLRLFSRIVTARLSKACPLNPRQRGFIRAAGCSENLKLLQTIIWSAKREHRPLGVVFVDIAKAFDTVSHQHIIHALQQREVDPHIVGLVSNMYKNISTYITTKRNTHTDKIQIRVGVKQGDPMSPLLFNLAMDPLLCKLEESGKGYHRGQSSITAMAFADDLVLLSDSWENMNTNISILETFCNLTGLKTQGQKCHGFYIKPTKKSYTINDCAAWTINGTPLNMIDPGESEKYLGLQFDPWIGIARSGLSTKLDFWLQRIDQAPLKPLQKTDILKTYTIPRLIYIADHSEVKSALLETLDQKIRTAVKEWLHLPPCTCDAILYSSTRDGGLGITKLAGLIPSVQARRLHRIAQSSDDTMKCFMEKEKMEQLHKKLWIQAGGDRENIPSIWEAPPSSEPPNNVSTNSEWEAPTQKDKFPKPCNWRKNEFKKWTKLASQGRGIVNFERDKISNHWIQYYRRIPHRKLLTALQLRANVYPTREFLARGRQDQYIKACRHCDADNESCAHIIGNCPVTQDARIKRHNYICELLLEEAKKKDWVVFKEPHIRDSNKELYKPDLIFVKDGRALVVDVTVRYEAAKSSLEEAAAEKVRKYKHLETEVRHLTNAKDVTFVGFPLGARGKWHQDNFKLLTELGLSKSRQVKMAETFSTVALFSSVDIVHMFASRARKSMVM

SEQ ID NO: 804 - protein, 1665 aa, synthetic construct
MAPKKKRKVNISGSSCGSPNSADTSSDFKDLWTKLKECHDREVQGLQVKVTKLKQERILDAQRLEEFFTKNQQLREQQKVLHETIKVLEDRLRAGLCDRCAVTEEHMRKKQQEFENIRQQNLKLITELMNERNTLQEENKKLSEQLQQKIENDQQHQAAELECEEDVIPDSPITAFSFSGVNRLRRKENPHVRYIEQTHTKLEHSVCANEMRKVSKSSTHPQHNPNENEILVADTYDQSQSPMAKAHGTSSYTPDKSSFNLATVVAETLGLGVQEESETQGPMSPLGDELYHCLEGNHKKQPFESGSETPGTSESATPEGSPKRKVSSAEGAAKEEPKRRSARLSAKPPAKVEAKPKKAAAKDKSSDKKVQTKGKRGAKGKQAEVANQETKEDLPAENGETKTEESPASDEAGEKEAKSDSGSETPGTSESATPESYEQLAPQPCVGETLHSSLPRDSELFVPEEGSSEKESEDAPKTSPPTPGKHGLEQTGEEKVMVTVPDKNPPCPCCGTRVNSVLNLIEHLKVSHGKRGVCFRCAKCGKENSNYHSVVCHFKKCRGPETEKAPAGEWICEVCNRDFTTKIGLGQHKRLAHPAVRNQERIVASQPKETSNRGAHKRCWTKEEEELLIRLEAQFEGNKNINKLIAEHITTKTAKQISDKRRLLSRKPAEEPREEPGTCHHTRRAAASLRTEPEMSHHAQAEDRDNGPGRRPLPGRAAAGGRTMDEIRRHPDKGNGQQRPTKQKSEEQLQAYYKKTLEERLSAGALNTFPRAFKQVMEGRDIKLVINQTAQDCFGCLESISQIRTATRDKKDTVTREKHPKKPFQKWMKKRAIKKGNYLRFQRLFYLDRGKLAKIILDDIECLSCDIPLSEIYSVFKTRWETTGSFKSLGDFKTYGKADNTAFRELITAKEIEKNVQEMSKGSAPGPDGITLGDVVKMDPEFSRTMEIFNLWLTTGKIPDMVRGCRTVLIPKSSKPDRLKDINNWRPITIGSILLRLFSRIVTARLSKACPLNPRQRGFIRAAGCSENLKLLQTIIWSAKREHRPLGVVFVDIAKAFDTVSHQHIIHALQQREVDPHIVGLVSNMYENISTYITTKRNTHTDKIQIRVGVKQGDPMSPLLFNLAMDPLLCKLEESGKGYHRGQSSITAMAFADDLVLLSDSWENMNTNISILETFCNLTGLKTQGQKCHGFYIKPTKKSYTINDCAAWTINGTPLNMIDPGESEKYLGLQIDPWIGIARSGLSTKLDFWLQRIDQAPLKPLQKTDILKTYTIPRLIYIADHSEVKSALLETLDQKIRTAVKEWLHLPPCTCDAILYSSTRDGGLGITKLAGLIPSVQARRLHRIAQSSDDTMKCFMEKEKMEQLHKKLWIQAGGDRENIPSIWEAPPSSEPPNNVSTNSEWEAPTQKDKFPKPCNWRKNEFKKWTKLASQGRGIVNFERDKISNHWIQYYRRIPHRKLLTALQLRANVYPTREFLARGRQDQYIKACRHCDADNESCAHIIGNCPVTQDARIKRHNYICELLLEEAKKKDWVVFKEPHIRDSNKELYKPDLIFVKDGRALVVDVTVRYEAAKSSLEEAAAEKVRKYKHLETEVRHLTNAKDVTFVGFPLGARGKWHQDNFKLLTELGLSKSRQVKMAETFSTVALFSSVDIVHMFASRARKSMVM

SEQ ID NO: 805 - protein, 1665 aa, synthetic construct
MAPKKKRKVNISGSSCGSPNSADTSSDFKDLWTKLKECHDREVQGLQVKVTKLKQERILDAQRLEEFFTKNQQLREQQKVLHETIKVLEDRLRAGLCDRCAVTEEHMRKKQQEFENIRQQNLKLITELMNERNTLQEENKKLSEQLQQKIENDQQHQAAELECEEDVIPDSPITAFSFSGVNRLRRKENPHVRYIEQTHTKLEHSVCANEMRKVSKSSTHPQHNPNENEILVADTYDQSQSPMAKAHGTSSYTPDKSSFNLATVVAETLGLGVQEESETQGPMSPLGDELYHCLEGNHKKQPFESGSETPGTSESATPEGSPKRKVSSAEGAAKEEPKRRSARLSAKPPAKVEAKPKKAAAKDKSSDKKVQTKGKRGAKGKQAEVANQETKEDLPAENGETKTEESPASDEAGEKEAKSDSGSETPGTSESATPESYEQLAPQPCVGETLHSSLPRDSELFVPEEGSSEKESEDAPKTSPPTPGKHGLEQTGEEKVMVTVPDKNPPCPCCGTRVNSVLNLIEHLKVSHGKRGVCFRCAKCGKENSNYHSVVCHFKKCRGPETEKAPAGEWICEVCNRDFTTKIGLGQHKRLAHPAVRNQERIVASQPKETSNRGAHKRCWTKEEEELLIRLEAQFEGNKNINKLIAEHITTKTAKQISDKRRLLSRKPAEEPREEPGTCHHTRRAAASLRTEPEMSHHAQAEDRDNGPGRRPLPGRAAAGGRTMDEIRRHPDKGNGQQRPTKQKSEEQLQAYYKKTLEERLSAGALNTFPRAFKQVMEGRDIKLVINQTAQDCFGCLESISQIRTATRDKKDTVTREKHPKKPFQKWMKKRAIKKGNYLRFQRLFYLDRGKLAKIILDDIECLSCDIPLSEIYSVFKTRWETTGSFKSLGDFKTYGKADNTAFRELITAKEIEKNVQEMSKGSAPGPDGITLGDVVKMDPEFSRTMEIFNLWLTTGKIPDMVRGCRTVLIPKSSKPDRLKDINNWRPITIGSILLRLFSRIVTARLSKACPLNPRQRGFIRAAGCSENLKLLQTIIWSAKREHRPLGVVFVDIAKAFDTVSHQHIIHALQQREVDPHIVGLVSNMYENISTYITTKRNTHTDKIQIRVGVKQGDPMSPLLFNLAMDPLLCKLEESGKGYHRGQSSITAMAFADDLVLLSDSWENMNTNISILETFCNLTGLKTQGQKCHGFYIKPTKKSYTINDCAAWTINGTPLNMIDPGESEKYLGLQFDPWIGIARSGLSTKLDFWLQRIDQAPLKPLQKTDILKTYTIPRLIYIADHSEVKSALLETLDQKIRTAVKEWLHLPPCTCDAILYSSTRDGGLGITKLAGLIPSVQARRLHRIAQSSDDTMKCFMEKEKMEQLHKKLWIQAGGDRENIPSIWEAPPSSEPPNNVSTNSEWEAPTQKDKFPKPCNWRKNEFKKWTKLASQGRGIVNFERDKISNHWIQYYRRIPHRKLLTALQLRANVYPTREFLARGRQDQYIKACRHCDADNESCAHIIGNCPVTQDARIKRHNYICELLLEEAKKKGWVVFKEPHIRDSNKELYKPDLIFVKDGRALVVDVTVRYEAAKSSLEEAAAEKVRKYKHLETEVRHLTNAKDVTFVGFPLGARGKWHQDNFKLLTELGLSKSRQVKMAETFSTVALFSSVDIVHMFASRARKSMVM

SEQ ID NO: 806 - protein, 1665 aa, synthetic construct
MAPKKKRKVNISGSSCGSPNSADTSSDFKDLWTKLKECHDREVQGLQVKVTKLKQERILDAQRLEEFFTKNQQLREQQKVLHETIKVLEDRLRAGLCDRCAVTEEHMRKKQQEFENIRQQNLKLITELMNERNTLQEENKKLSEQLQQKIENDQQHQAAELECEEDVIPDSPITAFSFSGVNRLRRKENPHVRYIEQTHTKLEHSVCANEMRKVSKSSTHPQHNPNENEILVADTYDQSQSPMAKAHGTSSYTPDKSSFNLATVVAETLGLGVQEESETQGPMSPLGDELYHCLEGNHKKQPFESGSETPGTSESATPEGSPKRKVSSAEGAAKEEPKRRSARLSAKPPAKVEAKPKKAAAKDKSSDKKVQTKGKRGAKGKQAEVANQETKEDLPAENGETKTEESPASDEAGEKEAKSDSGSETPGTSESATPESYEQLAPQPCVGETLHSSLPRDSELFVPEEGSSEKESEDAPKTSPPTPGKHGLEQTGEEKVMVTVPDKNPPCPCCGTRVNSVLNLIEHLKVSHGKRGVCFRCAKCGKENSNYHSVVCHFKKCRGPETEKAPAGEWICEVCNRDFTTKIGLGQHKRLAHPAVRNQERIVASQPKETSNRGAHKRCWTKEEEELLIRLEAQFEGNKNINKLIAEHITTKTAKQISDKRRLLSRKPAEEPREEPGTCHHTRRAAASLRTEPEMSHHAQAEDRDNGPGRRPLPGRAAAGGRTMDEIRRHPDKGNGQQRPTKQKSEEQLQAYYKKTLEERLSAGALNTFPRAFKQVMEGRDIKLVINQTAQDCFGCLESISQIRTATRDKKDTVTREKHPKKPFQKWMKKRAIKKGNYLRFQRLFYLDRGKLAKIILDDIECLSCDIPLSEIYSVFKTRWETTGSFKSLGDFKTYGKADNTAFRELITAKEIEKNVQEMSKGSAPGPDGITLGDVVKMDPEFSRTMEIFNLWLTTGKIPDMVRGCRTVLIPKSSKPDRLKDINNWRPITIGSILLRLFSRIVTARLSKACPLNPRQRGFIRAAGCSENLKLLQTIIWSAKREHRPLGVVFVDIAKAFDTVSHQHIIHALQQREVDPHIVGLVSNMYENISTYITTKRNTHTDKIQIRVGVKQGDPMSPLLFNLAMDPLLCKLEESGKGYHRGQSSITAMAFADDLVLLSDSWENMNTNISILETFCNLTGLKTQGQKCHGFYIKPTKKSYTINDCAAWTINGTPLNMIDPGESEKYLGLQFDPWIGIARSGLSTKLDFWLQRIDQAPLKPLQKTDILKTYTIPRLIYIADHSEVKSALLETLDQKIRTAVKEWLHLPPCTCDAILYSSTRDGGLGITKLAGLIPSVQARRLHRIAQSSDDTMKCFMEKEKMEQLHKKLWIQAGGDRENIPSIWEAPPSSEPPNNVSTNSEWEAPTQKDKFPKPCNWRKNEFKKWTKLASQGRGIVNFERDKISNHWIQYYRRIPQRKLLTALQLRANVYPTREFLARGRQDQYIKACRHCDADNESCAHIIGNCPVTQDARIKRHNYICELLLEEAKKKDWVVFKEPHIRDSNKELYKPDLIFVKDGRALVVDVTVRYEAAKSSLEEAAAEKVRKYKHLETEVRHLTNAKDVTFVGFPLGARGKWHQDNFKLLTELGLSKSRQVKMAETFSTVALFSSVDIVHMFASRARKSMVM

SEQ ID NO: 807 - protein, 1665 aa, synthetic construct
MAPKKKRKVNISGSSCGSPNSADTSSDFKDLWTKLKECHDREVQGLQVKVTKLKQERILDAQRLEEFFTKNQQLREQQKVLHETIKVLEDRLRAGLCDRCAVTEEHMRKKQQEFENIRQQNLKLITELMNERNTLQEENKKLSEQLQQKIENDQQHQAAELECEEDVIPDSPITAFSFSGVNRLRRKENPHVRYIEQTHTKLEHSVCANEMRKVSKSSTHPQHNPNENEILVADTYDQSQSPMAKAHGTSSYTPDKSSFNLATVVAETLGLGVQEESETQGPMSPLGDELYHCLEGNHKKQPFESGSETPGTSESATPEGSPKRKVSSAEGAAKEEPKRRSARLSAKPPAKVEAKPKKAAAKDKSSDKKVQTKGKRGAKGKQAEVANQETKEDLPAENGETKTEESPASDEAGEKEAKSDSGSETPGTSESATPESYEQLAPQPCVGETLHSSLPRDSELFVPEEGSSEKESEDAPKTSPPTPGKHGLEQTGEEKVMVTVPDKNPPCPCCGTRVNSVLNLIEHLKVSHGKRGVCFRCAKCGKENSNYHSVVCHFKKCRGPETEKAPAGEWICEVCNRDFTTKIGLGQHKRLAHPAVRNQERIVASQPKETSNRGAHKRCWTKEEEELLIRLEAQFEGNKNINKLIAEHITTKTAKQISDKRRLLSRKPAEEPREEPGTCHHTRRAAASLRTEPEMSHHAQAEDRDNGPGRRPLPGRAAAGGRTMDEIRRHPDKGNGQQRPTKQKSEEQLQAYYKKTLEERLSAGALNTFPRAFKQVMEGRDIKLVINQTAQDCFGCLESISQIRTATRDKKDTVTREKHPKKPFQKWMKKRAIKKGNYLRFQRLFYLDRGKLAKIILDDIECLSCDIPLSEIYSVFKTRWETTGSFKSLGDFKTYGKADNTAFRELITAKEIEKNVQEMSKGSAPGPDGITLGDVVKMDPEFSRTMEIFNLWLTTGKIPDMVRGCRTVLIPKSSKPDRLKDINNWRPITIGSILLRLFSRIVTARLSKACPLNPRQRGFIRAAGCSENLKLLQTIIWSAKREHRPLGVVFVDIAKAFDTVSHQHIIHALQQREVDPHIVGLVSNMYENISTYITTKRNTHTDKIQIRVGVKQGDPMSPLLFNLAMDPLLCKLEESGKGYHRGQSSITAMAFADDLVLLSDSWENMNTNISILETFCNLTGLKTQGQKCHGFYIKPTKKSYTINDCAAWTINGTPLNMIDPGESEKYLGLQFDPWIGIARSGLSTKLDFWLQRIDQAPLKPLQKTDILKTYAIPRLIYIADHSEVKSALLETLDQKIRTAVKEWLHLPPCTCDAILYSSTRDGGLGITKLAGLIPSVQARRLHRIAQSSDDTMKCFMEKEKMEQLHKKLWIQAGGDRENIPSIWEAPPSSEPPNNVSTNSEWEAPTQKDKFPKPCNWRKNEFKKWTKLASQGRGIVNFERDKISNHWIQYYRRIPHRKLLTALQLRANVYPTREFLARGRQDQYIKACRHCDADNESCAHIIGNCPVTQDARIKRHNYICELLLEEAKKKDWVVFKEPHIRDSNKELYKPDLIFVKDGRALVVDVTVRYEAAKSSLEEAAAEKVRKYKHLETEVRHLTNAKDVTFVGFPLGARGKWHQDNFKLLTELGLSKSRQVKMAETFSTVALFSSVDIVHMFASRARKSMVM

SEQ ID NO: 808 - protein, 1665 aa, synthetic construct
MAPKKKRKVNISGSSCGSPNSADTSSDFKDLWTKLKECHDREVQGLQVKVTKLKQERILDAQRLEEFFTKNQQLREQQKVLHETIKVLEDRLRAGLCDRCAVTEEHMRKKQQEFENIRQQNLKLITELMNERNTLQEENKKLSEQLQQKIENDQQHQAAELECEEDVIPDSPITAFSFSGVNRLRRKENPHVRYIEQTHTKLEHSVCANEMRKVSKSSTHPQHNPNENEILVADTYDQSQSPMAKAHGTSSYTPDKSSFNLATVVAETLGLGVQEESETQGPMSPLGDELYHCLEGNHKKQPFESGSETPGTSESATPEGSPKRKVSSAEGAAKEEPKRRSARLSAKPPAKVEAKPKKAAAKDKSSDKKVQTKGKRGAKGKQAEVANQETKEDLPAENGETKTEESPASDEAGEKEAKSDSGSETPGTSESATPESYEQLAPQPCVGETLHSSLPRDSELFVPEEGSSEKESEDAPKTSPPTPGKHGLEQTGEEKVMVTVPDKNPPCPCCGTRVNSVLNLIEHLKVSHGKRGVCFRCAKCGKENSNYHSVVCHFKKCRGPETEKAPAGEWICEVCNRDFTTKIGLGQHKRHAHPAVRNQERIVASQPKETSNRGAHKRCWTKEEEELLIRLEAQFEGNKNINKLIAEHITTKTAKQISDKRRLLSRKPAEEPREEPGTCHHTRRAAASLRTEPEMSHHAQAEDRDNGPGRRPLPGRAAAGGRTMDEIRRHPDKGNGQQRPTKQKSEEQLQAYYKKTLEERLSAGALNTFPRAFKQVMEGRDIKLVINQTAQDCFGCLESISQIRTATRDKKDTVTREKHPKKPFQKWMKKRAIKKGNYLRFQRLFYLDRGKLAKIILDDIECLSCDIPLSEIYSVFKTRWETTGSFKSLGDFKTYGKADNTAFRELITAKEIEKNVQEMSKGSAPGPDGITLGDVVKMDPEFSRTMEIFNLWLTTGKIPDMVRGCRTVLIPKSSKPDRLKDINNWRPITIGSILLRLFSRIVTARLSKACPLNPRQRGFIRAAGCSENLKLLQTIIWSAKREHRPLGVVFVDIAKAFDTVSHQHIIHALQQREVDPHIVGLVSNMYENISTYITTKRNTHTDKIQIRVGVKQGDPMSPLLFNLAMDPLLCKLEESGKGYHRGQSSITAMAFADDLVLLSDSWENMNTNISILETFCNLTGLKTQGQKCHGFYIKPTKKSYTINDCAAWTINGTPLNMIDPGESEKYLGLQFDPWIGIARSGLSTKLDFWLQRIDQAPLKPLQKTDILKTYTIPRLIYIADHSEVKSALLETLDQKIRTAVKEWLHLPPCTCDAILYSSTRDGGLGITKLAGLIPSVQARRLHRIAQSSDDTMKCFMEKEKMEQLHKKLWIQAGGDRENIPSIWEAPPSSEPPNNVSTNSEWEAPTQKDKFPKPCNWRKNEFKKWTKLASQGRGIVNFERDKISNHWIQYYRRIPHRKLLTALQLRANVYPTREFLARGRQDQYIKACRHCDADNESCAHIIGNCPVTQDARIKRHNYICELLLEEAKKKDWVVFKEPHIRDSNKELYKPDLIFVKDGRALVVDVTVRYEAAKSSLEEAAAEKVRKYKHLETEVRHLTNAKDVTFVGFPLGARGKWHQDNFKLLTELGLSKSRQVKMAETFSTVALFSSVDIVHMFASRARKSMVM

SEQ ID NO: 809 - protein, 1665 aa, synthetic construct
MAPKKKRKVNISGSSCGSPNSADTSSDFKDLWTKLKECHDREVQGLQVKVTKLKQERILDAQRLEEFFTKNQQLREQQKVLHETIKVLEDRLRAGLCDRCAVTEEHMRKKQQEFENIRQQNLKLITELMNERNTLQEENKKLSEQLQQKIENDQQHQAAELECEEDVIPDSPITAFSFSGVNRLRRKENPHVRYIEQTHTKLEHSVCANEMRKVSKSSTHPQHNPNENEILVADTYDQSQSPMAKAHGTSSYTPDKSSFNLATVVAETLGLGVQEESETQGPMSPLGDELYHCLEGNHKKQPFESGSETPGTSESATPEGSPKRKVSSAEGAAKEEPKRRSARLSAKPPAKVEAKPKKAAAKDKSSDKKVQTKGKRGAKGKQAEVANQETKEDLPAENGETKTEESPASDEAGEKEAKSDSGSETPGTSESATPESYEQLAPQPCVGETLHSSLPRDSELFVPEEGSSEKESEDAPKTSPPTPGKHGLEQTGEEKVMVTVPDKNPPCPCCGTRVNSVLNLIEHLKVSHGKRGVCFRCAKCGKENSNYHSVVCHFKKCRGPETEKAPAGEWICEVCNRDFTTKIGLGQHKRLAHPAVRNQERIVASQPKETSNRGAHKRCWTKEEEELLIRLEAQFEGNKNINKLIAEHITTKTAKQISDKRRLLSRKPAEEPREEPGTCHHTRRAAASLRTEPEMSHHAQAEDRDNGPGRRPLPGRAAAGGRTMDEIRRHPDKGNGQQRPTKQKSEEQLQAYYKKTLEERLSAGALNTFPRAFKQVMEGRDIKLVINQTAQDCFGCLESISQIRTATRDKKDTVTREKHPKKPFQKWMKKRAIKKGNYLRFQRLFYLDRGKLAKIILDDIECLSCDIPLSEIYSVFKTRWETTGSFKSLGDFKTYGKADNTAFRELITAKEIEKNVQEMSKGSAPGPDGITLGDVVKMDPEFSRTMEIFNLWLTTGKIPDMVRGCRTVLIPKSSKPDRLKDINNWRPITIGSILLRLFSRIVTARLSKACPLNPRQRGFIRAAGCSENLKLLQTIIWSAKREHRPLGVVFVDIAKAFDTVSHQHIIHALQQREVDPHIVGLVSNMYENISTYITTKRNTHTDKIQIRVGVKQGDPMSPLLFNLAMDPLLCKLEESGKGYHRGQSSITAMAFADDLVLLSDSWENMNTNISILETFCNLTGLKTQGQKCHGFYIKPTKKSYTINDCAAWTINGTPLNMIDPGESEKYLGLQFDPWIGIARSGLSTKLDFWLQRIDQAPLKPLQKTDILKTYTIPRLIYIADHSEVKSALLETLDQKIRTAVKEWLHLPPCTCDAILYSSTRDGGLGITKLAGLIPSVQARRLHRIAQSSDDTMKCFMEKEKMEQLHKKLWIQAGGDRENIPSIWEAPPSSEPPNNVSTNSEWEAPTQKDKFPKPCNWRKNEFKKWTHLASQGRGIVNFERDKISNHWIQYYRRIPHRKLLTALQLRANVYPTREFLARGRQDQYIKACRHCDADNESCAHIIGNCPVTQDARIKRHNYICELLLEEAKKKDWVVFKEPHIRDSNKELYKPDLIFVKDGRALVVDVTVRYEAAKSSLEEAAAEKVRKYKHLETEVRHLTNAKDVTFVGFPLGARGKWHQDNFKLLTELGLSKSRQVKMAETFSTVALFSSVDIVHMFASRARKSMVM

SEQ ID NO: 810 - protein, 1665 aa, synthetic construct
MAPKKKRKVNISGSSCGSPNSADTSSDFKDLWTKLKECHDREVQGLQVKVTKLKQERILDAQRLEEFFTKNQQLREQQKVLHETIKVLEDRLRAGLCDRCAVTEEHMRKKQQEFENIRQQNLKLITELMNERNTLQEENKKLSEQLQQKIENDQQHQAAELECEEDVIPDSPITAFSFSGVNRLRRKENPHVRYIEQTHTKLEHSVCANEMRKVSKSSTHPQHNPNENEILVADTYDQSQSPMAKAHGTSSYTPDKSSFNLATVVAETLGLGVQEESETQGPMSPLGDELYHCLEGNHKKQPFESGSETPGTSESATPEGSPKRKVSSAEGAAKEEPKRRSARLSAKPPAKVEAKPKKAAAKDKSSDKKVQTKGKRGAKGKQAEVANQETKEDLPAENGETKTEESPASDEAGEKEAKSDSGSETPGTSESATPESYEQLAPQPCVGETLHSSLPRDSELFVPEEGSSGKESEDAPKTSPPTPGKHGLEQTGEEKVMVTVPDKNPPCPCCGTRVNSVLNLIEHLKVSHGKRGVCFRCAKCGKENSNYHSVVCHFKKCRGPETEKAPAGEWICEVCNRDFTTKIGLGQHKRLAHPAVRNQERIVASQPKETSNRGAHKRCWTKEEEELLIRLEAQFEGNKNINKLIAEHITTKTAKQISDKRRLLSRKPAEEPREEPGTCHHTRRAAASLRTEPEMSHHAQAEDRDNGPGRRPLPGRAAAGGRTMDEIRRHPDKGNGQQRPTKQKSEEQLQAYYKKTLEERLSAGALNTFPRAFKQVMEGRDIKLVINQTAQDCFGCLESISQIRTATRDKKDTVTREKHPKKPFQKWMKKRAIKKGNYLRFQRLFYLDRGKLAKIILDDIECLSCDIPLSEIYSVFKTRWETTGSFKSLGDFKTYGKADNTAFRELITAKEIEKNVQEMSKGSAPGPDGITLGDVVKMDPEFSRTMEIFNLWLTTGKIPDMVRGCRTVLIPKSSKPDRLKDINNWRPITIGSILLRLFSRIVTARLSKACPLNPRQRGFIRAAGCSENLKLLQTIIWSAKREHRPLGVVFVDIAKAFDTVSHQHIIHALQQREVDPHIVGLVSNMYENISTYITTKRNTHTDKIQIRVGVKQGDPMSPLLFNLAMDPLLCKLEESGKGYHRGQSSITAMAFADDLVLLSDSWENMNTNISILETFCNLTGLKTQGQKCHGFYIKPTKKSYTINDCAAWTINGTPLNMIDPGESEKYLGLQFDPWIGIARSGLSTKLDFWLQRIDQAPLKPLQKTDILKTYTIPRLIYIADHSEVKSALLETLDQKIRTAVKEWLHLPPCTCDAILYSSTRDGGLGITKLAGLIPSVQARRLHRIAQSSDDTMKCFMEKEKMEQLHKKLWIQAGGDRENIPSIWEAPPSSEPPNNVSTNSEWEAPTQKDKFPKPCNWRKNEFKKWTKLASQGRGIVNFERDKISNHWIQYYRRIPHRKLLTALQLRANVYPTREFLARGRQDQYIKACRHCDADNESCAHIIGNCPVTQDARIKRHNYICELLLEEAKKKDWVVFKEPHIRDSNKELYKPDLIFVKDGRALVVDVTVRYEAAKSSLEEAAAEKVRKYKHLETEVRHLTNAKDVTFVGFPLGARGKWHQDNFKLLTELGLSKSRQVKMAETFSTVALFSSVDIVHMFASRARKSMVM

SEQ ID NO: 811 - protein, 1665 aa, synthetic construct
MAPKKKRKVNISGSSCGSPNSADTSSDFKDLWTKLKECHDREVQGLQVKVTKLKQERILDAQRLEEFFTKNQQLREQQKVLHETIKVLEDRLRAGLCDRCAVTEEHMRKKQQEFENIRQQNLKLITELMNERNTLQEENKKLSEQLQQKIENDQQHQAAELECEEDVIPDSPITAFSFSGVNRLRRKENPHVRYIEQTHTKLEHSVCANEMRKVSKSSTHPQHNPNENEILVADTYDQSQSPMAKAHGTSSYTPDKSSFNLATVVAETLGLGVQEESETQGPMSPLGDELYHCLEGNHKKQPFESGSETPGTSESATPEGSPKRKVSSAEGAAKEEPKRRSARLSAKPPAKVEAKPKKAAAKDKSSDKKVQTKGKRGAKGKQAEVANQETKEDLPAENGETKTEESPASDEAGEKEAKSDSGSETPGTSESATPESYEQLAPQPCVGETLHSSLPRDSELFVPEEGSSEKESEDAPKTSPPTPGKHGLEQTGEEKVMVTVPDKNPPCPCCGTRVNSVLNLIEHLKVSHGKRGVCFRCAKCGKENSNYHSVVCHFKKCRGPETEKAPAGEWICEVCNRDFTTKIGLGQHKRLAHPAVRNQERIVASQPKETSNRGAHKRCWTKEEEELLIRLEAQFEGNKNINKLIAEHITTKTAKQISDKRRLLSRKPAEEPREEPGTCHHTRRAAASGRTEPEMSHHAQAEDRDNGPGRRPLPGRAAAGGRTMDEIRRHPDKGNGQQRPTKQKSEEQLQAYYKKTLEERLSAGALNTFPRAFKQVMEGRDIKLVINQTAQDCFGCLESISQIRTATRDKKDTVTREKHPKKPFQKWMKKRAIKKGNYLRFQRLFYLDRGKLAKIILDDIECLSCDIPLSEIYSVFKTRWETTGSFKSLGDFKTYGKADNTAFRELITAKEIEKNVQEMSKGSAPGPDGITLGDVVKMDPEFSRTMEIFNLWLTTGKIPDMVRGCRTVLIPKSSKPDRLKDINNWRPITIGSILLRLFSRIVTARLSKACPLNPRQRGFIRAAGCSENLKLLQTIIWSAKREHRPLGVVFVDIAKAFDTVSHQHIIHALQQREVDPHIVGLVSNMYENISTYITTKRNTHTDKIQIRVGVKQGDPMSPLLFNLAMDPLLCKLEESGKGYHRGQSSITAMAFADDLVLLSDSWENMNTNISILETFCNLTGLKTQGQKCHGFYIKPTKKSYTINDCAAWTINGTPLNMIDPGESEKYLGLQFDPWIGIARSGLSTKLDFWLQRIDQAPLKPLQKTDILKTYTIPRLIYIADHSEVKSALLETLDQKIRTAVKEWLHLPPCTCDAILYSSTRDGGLGITKLAGLIPSVQARRLHRIAQSSDDTMKCFMEKEKMEQLHKKLWIQAGGDRENIPSIWEAPPSSEPPNNVSTNSEWEAPTQKDKFPKPCNWRKNEFKKWTKLASQGRGIVNFERDKISNHWIQYYRRIPHRKLLTALQLRANVYPTREFLARGRQDQYIKACRHCDADNESCAHIIGNCPVTQDARIKRHNYICELLLEEAKKKDWVVFKEPHIRDSNKELYKPDLIFVKDGRALVVDVTVRYEAAKSSLEEAAAEKVRKYKHLETEVRHLTNAKDVTFVGFPLGARGKWHQDNFKLLTELGLSKSRQVKMAETFSTVALFSSVDIVHMFASRARKSMVM

SEQ ID NO: 812 - protein, 1665 aa, synthetic construct
MAPKKKRKVNISGSSCGSPNSADTSSDFKDLWTKLKECHDREVQGLQVKVTKLKQERILDAQRLEEFFTKNQQLREQQKVLHETIKVLEDRLRAGLCDRCAVTEEHMRKKQQEFENIRQQNLKLITELMNERNTLQEENKKLSEQLQQKIENDQQHQAAELECEEDVIPDSPITAFSFSGVNRLRRKENPHVRYIEQTHTKLEHSVCANEMRKVSKSSTHPQHNPNENEILVADTYDQSQSPMAKAHGTSSYTPDKSSFNLATVVAETLGLGVQEESETQGPMSPLGDELYHCLEGNHKKQPFESGSETPGTSESATPEGSPKRKVSSAEGAAKEEPKRRSARLSAKPPAKVEAKPKKAAAKDKSSDKKVQTKGKRGAKGKQAEVANQETKEDLPAENGETKTEESPASDEAGEKEAKSDSGSETPGTSESATPESYEQLAPQPCVGETLHSSLPRDSELFVPEEGSSEKESEDAPKTSPPTPGKHGLEQTGEEKVMVTVPDKNPPCPCCGTRVNSVLNLIEHLKVSHGKRGVCFRCAKCGKENSNYHSVVCHFKKCRGPETEKAPAGEWICEVCNRDFTTKIGLGQHKRLAHPAVRNQERIVASQPKETSNRGAHKRCWTKEEEELLIRLEAQFEGNKNINKLIAEHITTKTAKQISDKRRLLSRKPAEEPREEPGTCHHTRRAAASLRTEPEMSHHAQAEDRDNGPGRRPLPGRAAAGGRTMDEIRRHPDKGNGQQRPTKQKSEEQLQAYYKKTLEERLSAGALNTFPRAFKQVMEGRDIKLVINQTAQDCFGCLESISQIRTATRDKKDTVTREKHPKKPFQKWMKKRAIKKGNYLRFQRLFYLDSGKLAKIILDDIECLSCDIPLSEIYSVFKTRWETTGSFKSLGDFKTYGKADNTAFRELITAKEIEKNVQEMSKGSAPGPDGITLGDVVKMDPEFSRTMEIFNLWLTTGKIPDMVRGCRTVLIPKSSKPDRLKDINNWRPITIGSILLRLFSRIVTARLSKACPLNPRQRGFIRAAGCSENLKLLQTIIWSAKREHRPLGVVFVDIAKAFDTVSHQHIIHALQQREVDPHIVGLVSNMYENISTYITTKRNTHTDKIQIRVGVKQGDPMSPLLFNLAMDPLLCKLEESGKGYHRGQSSITAMAFADDLVLLSDSWENMNTNISILETFCNLTGLKTQGQKCHGFYIKPTKKSYTINDCAAWTINGTPLNMIDPGESEKYLGLQFDPWIGIARSGLSTKLDFWLQRIDQAPLKPLQKTDILKTYTIPRLIYIADHSEVKSALLETLDQKIRTAVKEWLHLPPCTCDAILYSSTRDGGLGITKLAGLIPSVQARRLHRIAQSSDDTMKCFMEKEKMEQLHKKLWIQAGGDRENIPSIWEAPPSSEPPNNVSTNSEWEAPTQKDKFPKPCNWRKNEFKKWTKLASQGRGIVNFERDKISNHWIQYYRRIPHRKLLTALQLRANVYPTREFLARGRQDQYIKACRHCDADNESCAHIIGNCPVTQDARIKRHNYICELLLEEAKKKDWVVFKEPHIRDSNKELYKPDLIFVKDGRALVVDVTVRYEAAKSSLEEAAAEKVRKYKHLETEVRHLTNAKDVTFVGFPLGARGKWHQDNFKLLTELGLSKSRQVKMAETFSTVALFSSVDIVHMFASRARKSMVM

SEQ ID NO: 813 - protein, 1665 aa, synthetic construct
MAPKKKRKVNISGSSCGSPNSADTSSDFKDLWTKLKECHDREVQGLQVKVTKLKQERILDAQRLEEFFTKNQQLREQQKVLHETIKVLEDRLRAGLCDRCAVTEEHMRKKQQEFENIRQQNLKLITELMNERNTLQEENKKLSEQLQQKIENDQQHQAAELECEEDVIPDSPITAFSFSGVNRLRRKENPHVRYIEQTHTKLEHSVCANEMRKVSKSSTHPQHNPNENEILVADTYDQSQSPMAKAHGTSSYTPDKSSFNLATVVAETLGLGVQEESETQGPMSPLGDELYHCLEGNHKKQPFESGSETPGTSESATPEGSPKRKVSSAEGAAKEEPKRRSARLSAKPPAKVEAKPKKAAAKDKSSDKKVQTKGKRGAKGKQAEVANQETKEDLPAENGETKTEESPASDEAGEKEAKSDSGSETPGTSESATPESYEQLAPQPCVGETLHSSLPRDSELGVPEEGSSEKESEDAPKTSPPTPGKHGLEQTGEEKVMVTVPDKNPPCPCCGTRVNSVLNLIEHLKVSHGKRGVCFRCAKCGKENSNYHSVVCHFKKCRGPETEKAPAGEWICEVCNRDFTTKIGLGQHKRLAHPAVRNQERIVASQPKETSNRGAHKRCWTKEEEELLIRLEAQFEGNKNINKLIAEHITTKTAKQISDKRRLLSRKPAEEPREEPGTCHHTRRAAASLRTEPEMSHHAQAEDRDNGPGRRPLPGRAAAGGRTMDEIRRHPDKGNGQQRPTKQKSEEQLQAYYKKTLEERLSAGALNTFPRAFKQVMEGRDIKLVINQTAQDCFGCLESISQIRTATRDKKDTVTREKHPKKPFQKWMKKRAIKKGNYLRFQRLFYLDRGKLAKIILDDIECLSCDIPLSEIYSVFKTRWETTGSFKSLGDFKTYGKADNTAFRELITAKEIEKNVQEMSKGSAPGPDGITLGDVVKMDPEFSRTMEIFNLWLTTGKIPDMVRGCRTVLIPKSSKPDRLKDINNWRPITIGSILLRLFSRIVTARLSKACPLNPRQRGFIRAAGCSENLKLLQTIIWSAKREHRPLGVVFVDIAKAFDTVSHQHIIHALQQREVDPHIVGLVSNMYENISTYITTKRNTHTDKIQIRVGVKQGDPMSPLLFNLAMDPLLCKLEESGKGYHRGQSSITAMAFADDLVLLSDSWENMNTNISILETFCNLTGLKTQGQKCHGFYIKPTKKSYTINDCAAWTINGTPLNMIDPGESEKYLGLQFDPWIGIARSGLSTKLDFWLQRIDQAPLKPLQKTDILKTYTIPRLIYIADHSEVKSALLETLDQKIRTAVKEWLHLPPCTCDAILYSSTRDGGLGITKLAGLIPSVQARRLHRIAQSSDDTMKCFMEKEKMEQLHKKLWIQAGGDRENIPSIWEAPPSSEPPNNVSTNSEWEAPTQKDKFPKPCNWRKNEFKKWTKLASQGRGIVNFERDKISNHWIQYYRRIPHRKLLTALQLRANVYPTREFLARGRQDQYIKACRHCDADNESCAHIIGNCPVTQDARIKRHNYICELLLEEAKKKDWVVFKEPHIRDSNKELYKPDLIFVKDGRALVVDVTVRYEAAKSSLEEAAAEKVRKYKHLETEVRHLTNAKDVTFVGFPLGARGKWHQDNFKLLTELGLSKSRQVKMAETFSTVALFSSVDIVHMFASRARKSMVM

SEQ ID NO: 814 - protein, 1665 aa, synthetic construct
MAPKKKRKVNISGSSCGSPNSADTSSDFKDLWTKLKECHDREVQGLQVKVTKLKQERILDAQRLEEFFTKNQQLREQQKVLHETIKVLEDRLRAGLCDRCAVTEEHMRKKQQEFENIRQQNLKLITELMNERNTLQEENKKLSEQLQQKIENDQQHQAAELECEEDVIPDSPITAFSFSGVNRLRRKENPHVRYIEQTHTKLEHSVCANEMRKVSKSSTHPQHNPNENEILVADTYDQSQSPMAKAHGTSSYTPDKSSFNLATVVAETLGLGVQEESETQGPMSPLGDELYHCLEGNHKKQPFESGSETPGTSESATPEGSPKRKVSSAEGAAKEEPKRRSARLSAKPPAKVEAKPKKAAAKDKSSDKKVQTKGKRGAKGKQAEVANQETKEDLPAENGETKTEESPASDEAGEKEAKSDSGSETPGTSESATPESYEQLAPQPCVGETLHSSLPRDSELFVPEEGSSEKESEDAPKTSPPTPGKHGLEQTGEEKVMVTVPDKNPPCPCCGTRVNSVLNLIEHLKVSHGKRGVCFRCAKCGKENSNYHSVVCHFKKCRGPETEKAPAGEWICEVCNRDFTTKIGLGQHKRLAHPAVRNQERIVASQPKETSNRGAHKRCWTKEEEELLIRLEAQFEGNKNINKLIAEHITTKTAKQISDKRRLLSRKPAEEPREEPGTCHHTRRAAASLRTEPEMSHHAQAEDRDNGPGRRPLPGRAAAGGRTMDEIRRHPDKGNGQQRPTKQKSEEQLQAYYKKTLEERLSAGALNTFPRAFKQVMEGRDIKLVINQTAQDCFGCLESISQIRTATRDKKDTVTREKHPKKPFQKWMKKRAIKKGNYLRFQRLFYLDRGKLAKIILDDIECLSCDIPLSEIYSVFKTRWETTGSFKSLGDFKTYGKADNTAFRELITAKEIEKNVQEMSKGSAPGPDGITLGDVVKMDPEFSRTMEIFNLWLTTGKIPDMVRGCRTVLIPKSSKPDRLKDINNWRPITIGSILLRLFSRIVTARLSKACPLNPRQRGFIRAAGCSENLKLLQTIIWSAKREHRPLGVVFVDIAKAFDTVSHQHIIHALQQREVDPHIVGLVSNMYENISTYITTKRNTHTDKIQIRVGVKQGDPMSPLLFNLAMDPLLCKLEESGKGYHRGQSSITAMAFADDLVLLSDSWENMNTNISILETFCNLTGLKTQGQKCHGFYIKPTKKSYTINDCAAWTINGTPLNMIDPGESEKYLGLQFDPWIGIARSGLSEKLDFWLQRIDQAPLKPLQKTDILKTYTIPRLIYIADHSEVKSALLETLDQKIRTAVKEWLHLPPCTCDAILYSSTRDGGLGITKLAGLIPSVQARRLHRIAQSSDDTMKCFMEKEKMEQLHKKLWIQAGGDRENIPSIWEAPPSSEPPNNVSTNSEWEAPTQKDKFPKPCNWRKNEFKKWTKLASQGRGIVNFERDKISNHWIQYYRRIPHRKLLTALQLRANVYPTREFLARGRQDQYIKACRHCDADNESCAHIIGNCPVTQDARIKRHNYICELLLEEAKKKDWVVFKEPHIRDSNKELYKPDLIFVKDGRALVVDVTVRYEAAKSSLEEAAAEKVRKYKHLETEVRHLTNAKDVTFVGFPLGARGKWHQDNFKLLTELGLSKSRQVKMAETFSTVALFSSVDIVHMFASRARKSMVM

SEQ ID NO: 815 - protein, 1665 aa, synthetic construct
MAPKKKRKVNISGSSCGSPNSADTSSDFKDLWTKLKECHDREVQGLQVKVTKLKQERILDAQRLEEFFTKNQQLREQQKVLHETIKVLEDRLRAGLCDRCAVTEEHMRKKQQEFENIRQQNLKLITELMNERNTLQEENKKLSEQLQQKIENDQQHQAAELECEEDVIPDSPITAFSFSGVNRLRRKENPHVRYIEQTHTKLEHSVCANEMRKVSKSSTHPQHNPNENEILVADTYDQSQSPMAKAHGTSSYTPDKSSFNLATVVAETLGLGVQEESETQGPMSPLGDELYHCLEGNHKKQPFESGSETPGTSESATPEGSPKRKVSSAEGAAKEEPKRRSARLSAKPPAKVEAKPKKAAAKDKSSDKKVQTKGKRGAKGKQAEVANQETKEDLPAENGETKTEESPASDEAGEKEAKSDSGSETPGTSESATPESYEQLAPQPCVGETLHSSLPRDSELFVPEEGSSEKESEDAPKTSPPTPGKHGLEQTGEEKVMVTVPDKNPPCPCCGTRVNSVLNLIEHLKVSHGKRGVCFRCAKCGKENSNYHSVVCHFKKCRGPETEKAPAGEWICEVCNRDFTTKIGLGQHKRLAHPAVRNQERIVASQPKETSNRGAHKRCWTKEEEELLIRLEAQFEGNKNINKLIAEHITTKTAKQISDKRRLLSRKPAEEPREEPGTCHHTRRAAASLRTEPEMSHHAQAEDRDNQPGRRPLPGRAAAGGRTMDEIRRHPDKGNGQQRPTKQKSEEQLQAYYKKTLEERLSAGALNTFPRAFKQVMEGRDIKLVINQTAQDCFGCLESISQIRTATRDKKDTVTREKHPKKPFQKWMKKRAIKKGNYLRFQRLFYLDRGKLAKIILDDIECLSCDIPLSEIYSVFKTRWETTGSFKSLGDFKTYGKADNTAFRELITAKEIEKNVQEMSKGSAPGPDGITLGDVVKMDPEFSRTMEIFNLWLTTGKIPDMVRGCRTVLIPKSSKPDRLKDINNWRPITIGSILLRLFSRIVTARLSKACPLNPRQRGFIRAAGCSENLKLLQTIIWSAKREHRPLGVVFVDIAKAFDTVSHQHIIHALQQREVDPHIVGLVSNMYENISTYITTKRNTHTDKIQIRVGVKQGDPMSPLLFNLAMDPLLCKLEESGKGYHRGQSSITAMAFADDLVLLSDSWENMNTNISILETFCNLTGLKTQGQKCHGFYIKPTKKSYTINDCAAWTINGTPLNMIDPGESEKYLGLQFDPWIGIARSGLSTKLDFWLQRIDQAPLKPLQKTDILKTYTIPRLIYIADHSEVKSALLETLDQKIRTAVKEWLHLPPCTCDAILYSSTRDGGLGITKLAGLIPSVQARRLHRIAQSSDDTMKCFMEKEKMEQLHKKLWIQAGGDRENIPSIWEAPPSSEPPNNVSTNSEWEAPTQKDKFPKPCNWRKNEFKKWTKLASQGRGIVNFERDKISNHWIQYYRRIPHRKLLTALQLRANVYPTREFLARGRQDQYIKACRHCDADNESCAHIIGNCPVTQDARIKRHNYICELLLEEAKKKDWVVFKEPHIRDSNKELYKPDLIFVKDGRALVVDVTVRYEAAKSSLEEAAAEKVRKYKHLETEVRHLTNAKDVTFVGFPLGARGKWHQDNFKLLTELGLSKSRQVKMAETFSTVALFSSVDIVHMFASRARKSMVM

SEQ ID NO: 816 - protein, 1665 aa, synthetic construct
MAPKKKRKVNISGSSCGSPNSADTSSDFKDLWTKLKECHDREVQGLQVKVTKLKQERILDAQRLEEFFTKNQQLREQQKVLHETIKVLEDRLRAGLCDRCAVTEEHMRKKQQEFENIRQQNLKLITELMNERNTLQEENKKLSEQLQQKIENDQQHQAAELECEEDVIPDSPITAFSFSGVNRLRRKENPHVRYIEQTHTKLEHSVCANEMRKVSKSSTHPQHNPNENEILVADTYDQSQSPMAKAHGTSSYTPDKSSFNLATVVAETLGLGVQEESETQGPMSPLGDELYHCLEGNHKKQPFESGSETPGTSESATPEGSPKRKVSSAEGAAKEEPKRRSARLSAKPPAKVEAKPKKAAAKDKSSDKKVQTKGKRGAKGKQAEVANQETKEDLPAENGETKTEESPASDEAGEKEAKSDSGSETPGTSESATPESYEQLAPQPCVGETLHSSLPRDSELFVPEEGSSEKESEDAPKTSPPTPGKHGLEQTGEEKVMVTVPDKNPPCPCCGTRVNSVLNLIEHLKVSHGKRGVCFRCAKCGKENSNYHSVVCHFKKCRGPETEKAPAGEWICEVCNRDFTTKIGLGQHKRLAHPAVRNQERIVASQPKETSNRGAHKRCWTKEEEELLIRLEAQFEGNKNINKLIAEHITTKTAKQISDKRRLLSRKPAEEPREEPGTCHHTRRAAASLRTEPEMSHHAQAEDRDNGPGRRPLPGRAAAGGRTMDEIRRHPDKGNGQQRPTKQKSEEQLQAYYKKTLEERLSAGALNTFPRAFKQVMEGRDIKLVINQTAQDCFGCLESISQIRTATRDKKDTVTREKHPKKPFQKWMKKRAIKKGNYLRFQRLFYLDRGKLAKIILDDIECLSCDIPLSEIYSVFKTRWETTGSFKSLGDFKTYGKADNTAFRELITAKEIEKNVQEMSKGSAPGPDGITLGDVVKMDPEFSRTMEIFNLWLTTGKIPDMVRGCRTVLIPKSSKPDRLKDINNWRPITIGSILLRLFSRIVTARLSKACPLNPRQRGFIRAAGCSENLKLLQTIIWSAKREHRPLGVVFVDIAKAFDTVSHQHIIHALQQREVDPHIVGLVSNMYENISTYITTKRNTHTDKIQIRVGVKQGDPMSPLLFNLAMDPLLCKLEESGKGYHRGQSSITAMAFADDLVLLSDSWENMNTNISILETFCNLTGLKTQGQKCHGFYIKPTKKSYTINDCAAWTINGTPLNMIDPGESEKYLGLQFDPWIGIARSGLSTKLDFWLQRIDQAPLKRLQKTDILKTYTIPRLIYIADHSEVKSALLETLDQKIRTAVKEWLHLPPCTCDAILYSSTRDGGLGITKLAGLIPSVQARRLHRIAQSSDDTMKCFMEKEKMEQLHKKLWIQAGGDRENIPSIWEAPPSSEPPNNVSTNSEWEAPTQKDKFPKPCNWRKNEFKKWTKLASQGRGIVNFERDKISNHWIQYYRRIPHRKLLTALQLRANVYPTREFLARGRQDQYIKACRHCDADNESCAHIIGNCPVTQDARIKRHNYICELLLEEAKKKDWVVFKEPHIRDSNKELYKPDLIFVKDGRALVVDVTVRYEAAKSSLEEAAAEKVRKYKHLETEVRHLTNAKDVTFVGFPLGARGKWHQDNFKLLTELGLSKSRQVKMAETFSTVALFSSVDIVHMFASRARKSMVM

SEQ ID NO: 817 - protein, 1665 aa, synthetic construct
MAPKKKRKVNISGSSCGSPNSADTSSDFKDLWTKLKECHDREVQGLQVKVTKLKQERILDAQRLEEFFTKNQQLREQQKVLHETIKVLEDRLRAGLCDRCAVTEEHMRKKQQEFENIRQQNLKLITELMNERNTLQEENKKLSEQLQQKIENDQQHQAAELECEEDVIPDSPITAFSFSGVNRLRRKENPHVRYIEQTHTKLEHSVCANEMRKVSKSSTHPQHNPNENEILVADTYDQSQSPMAKAHGTSSYTPDKSSFNLATVVAETLGLGVQEESETQGPMSPLGDELYHCLEGNHKKQPFESGSETPGTSESATPEGSPKRKVSSAEGAAKEEPKRRSARLSAKPPAKVEAKPKKAAAKDKSSDKKVQTKGKRGAKGKQAEVANQETKEDLPAENGETKTEESPASDEAGEKEAKSDSGSETPGTSESATPESYEQLAPQPCVGETLHSSLPRDSELFVPEEGSSEKESEDAPKTSPPTPGKHGLEQTGEEKVMVTVPDKNPPCPCCGTRVNSVLNLIEHLKVSHGKRGVCFRCAKCGKENSNYHSVVCHFKKCRGPETEKAPAGEWICEVCNRDFTTKIGLGQHKRLAHPAVRNQERIVASQPKETSNRGAHKRCWTKEEEELLIRLEAQFEGNKNINKLIAEHITTKTAKQISDKRRLLSRKPAEEPREEPGTCHHTRRAAASLRTEPEMSHHAQAEDRDNGPGRRPLPGRAAAGGRTMDEIRRHPDKGNGQQRPTKQKSEEQLQAYYKKTLEERLSAGALNTFPRAFKQVMEGRDIKLVINQTAQDCFGCLESISQIRTATRDKKDTVTREKHPKKPFQKWMKKRAIKKGNYLRFQRLFYLDRGKLAKIILDDIECLSCQIPLSEIYSVFKTRWETTGSFKSLGDFKTYGKADNTAFRELITAKEIEKNVQEMSKGSAPGPDGITLGDVVKMDPEFSRTMEIFNLWLTTGKIPDMVRGCRTVLIPKSSKPDRLKDINNWRPITIGSILLRLFSRIVTARLSKACPLNPRQRGFIRAAGCSENLKLLQTIIWSAKREHRPLGVVFVDIAKAFDTVSHQHIIHALQQREVDPHIVGLVSNMYENISTYITTKRNTHTDKIQIRVGVKQGDPMSPLLFNLAMDPLLCKLEESGKGYHRGQSSITAMAFADDLVLLSDSWENMNTNISILETFCNLTGLKTQGQKCHGFYIKPTKKSYTINDCAAWTINGTPLNMIDPGESEKYLGLQFDPWIGIARSGLSTKLDFWLQRIDQAPLKPLQKTDILKTYTIPRLIYIADHSEVKSALLETLDQKIRTAVKEWLHLPPCTCDAILYSSTRDGGLGITKLAGLIPSVQARRLHRIAQSSDDTMKCFMEKEKMEQLHKKLWIQAGGDRENIPSIWEAPPSSEPPNNVSTNSEWEAPTQKDKFPKPCNWRKNEFKKWTKLASQGRGIVNFERDKISNHWIQYYRRIPHRKLLTALQLRANVYPTREFLARGRQDQYIKACRHCDADNESCAHIIGNCPVTQDARIKRHNYICELLLEEAKKKDWVVFKEPHIRDSNKELYKPDLIFVKDGRALVVDVTVRYEAAKSSLEEAAAEKVRKYKHLETEVRHLTNAKDVTFVGFPLGARGKWHQDNFKLLTELGLSKSRQVKMAETFSTVALFSSVDIVHMFASRARKSMVM

SEQ ID NO: 818 - protein, 1665 aa, synthetic construct
MAPKKKRKVNISGSSCGSPNSADTSSDFKDLWTKLKECHDREVQGLQVKVTKLKQERILDAQRLEEFFTKNQQLREQQKVLHETIKVLEDRLRAGLCDRCAVTEEHMRKKQQEFENIRQQNLKLITELMNERNTLQEENKKLSEQLQQKIENDQQHQAAELECEEDVIPDSPITAFSFSGVNRLRRKENPHVRYIEQTHTKLEHSVCANEMRKVSKSSTHPQHNPNENEILVADTYDQSQSPMAKAHGTSSYTPDKSSFNLATVVAETLGLGVQEESETQGPMSPLGDELYHCLEGNHKKQPFESGSETPGTSESATPEGSPKRKVSSAEGAAKEEPKRRSARLSAKPPAKVEAKPKKAAAKDKSSDKKVQTKGKRGAKGKQAEVANQETKEDLPAENGETKTEESPASDEAGEKEAKSDSGSETPGTSESATPESYEQLAPQPCVGETLHSSLPRDSELFVPEEGSSEKESEDAPKTSPPTPGKHGLEQTGEEKVMVTVPDKNPPCPCCGTRVNSVLNLIEHLKVSHGKRGVCFRCAKCGKENSNYHSVVCHFKKCRGPETEKAPAGEWICEVCNRDFTTKIGLGQHKRLAHPAVRNQERIVASQPKETSNRGAHKRCWTKEEEELLIRLEAQFEGNKNINKLIAEHITTKTAKQISDKRRLLSRKPAEEPREEPGTCHHTRRAAASLRTEPEMSHHAQAEDRDNGPGRRPLPGRAAAGGRTMDEIRRHPDKGNGQQRPTKQKSEEQLQAYYKKTLEERLSAGALNTFPRAFKQVMEGRDIKLVINQTAQDCFGCLESISQIRTATRDKKDTVTREKHPKKPFQKWRKKRAIKKGNYLRFQRLFYLDRGKLAKIILDDIECLSCDIPLSEIYSVFKTRWETTGSFKSLGDFKTYGKADNTAFRELITAKEIEKNVQEMSKGSAPGPDGITLGDVVKMDPEFSRTMEIFNLWLTTGKIPDMVRGCRTVLIPKSSKPDRLKDINNWRPITIGSILLRLFSRIVTARLSKACPLNPRQRGFIRAAGCSENLKLLQTIIWSAKREHRPLGVVFVDIAKAFDTVSHQHIIHALQQREVDPHIVGLVSNMYENISTYITTKRNTHTDKIQIRVGVKQGDPMSPLLFNLAMDPLLCKLEESGKGYHRGQSSITAMAFADDLVLLSDSWENMNTNISILETFCNLTGLKTQGQKCHGFYIKPTKKSYTINDCAAWTINGTPLNMIDPGESEKYLGLQFDPWIGIARSGLSTKLDFWLQRIDQAPLKPLQKTDILKTYTIPRLIYIADHSEVKSALLETLDQKIRTAVKEWLHLPPCTCDAILYSSTRDGGLGITKLAGLIPSVQARRLHRIAQSSDDTMKCFMEKEKMEQLHKKLWIQAGGDRENIPSIWEAPPSSEPPNNVSTNSEWEAPTQKDKFPKPCNWRKNEFKKWTKLASQGRGIVNFERDKISNHWIQYYRRIPHRKLLTALQLRANVYPTREFLARGRQDQYIKACRHCDADNESCAHIIGNCPVTQDARIKRHNYICELLLEEAKKKDWVVFKEPHIRDSNKELYKPDLIFVKDGRALVVDVTVRYEAAKSSLEEAAAEKVRKYKHLETEVRHLTNAKDVTFVGFPLGARGKWHQDNFKLLTELGLSKSRQVKMAETFSTVALFSSVDIVHMFASRARKSMVM

SEQ ID NO: 819 - protein, 1665 aa, synthetic construct
MAPKKKRKVNISGSSCGSPNSADTSSDFKDLWTKLKECHDREVQGLQVKVTKLKQERILDAQRLEEFFTKNQQLREQQKVLHETIKVLEDRLRAGLCDRCAVTEEHMRKKQQEFENIRQQNLKLITELMNERNTLQEENKKLSEQLQQKIENDQQHQAAELECEEDVIPDSPITAFSFSGVNRLRRKENPHVRYIEQTHTKLEHSVCANEMRKVSKSSTHPQHNPNENEILVADTYDQSQSPMAKAHGTSSYTPDKSSFNLATVVAETLGLGVQEESETQGPMSPLGDELYHCLEGNHKKQPFESGSETPGTSESATPEGSPKRKVSSAEGAAKEEPKRRSARLSAKPPAKVEAKPKKAAAKDKSSDKKVQTKGKRGAKGKQAEVANQETKEDLPAENGETKTEESPASDEAGEKEAKSDSGSETPGTSESATPESYEQLAPQPCVGEKLHSSLPRDSELFVPEEGSSEKESEDAPKTSPPTPGKHGLEQTGEEKVMVTVPDKNPPCPCCGTRVNSVLNLIEHLKVSHGKRGVCFRCAKCGKENSNYHSVVCHFKKCRGPETEKAPAGEWICEVCNRDFTTKIGLGQHKRLAHPAVRNQERIVASQPKETSNRGAHKRCWTKEEEELLIRLEAQFEGNKNINKLIAEHITTKTAKQISDKRRLLSRKPAEEPREEPGTCHHTRRAAASLRTEPEMSHHAQAEDRDNGPGRRPLPGRAAAGGRTMDEIRRHPDKGNGQQRPTKQKSEEQLQAYYKKTLEERLSAGALNTFPRAFKQVMEGRDIKLVINQTAQDCFGCLESISQIRTATRDKKDTVTREKHPKKPFQKWMKKRAIKKGNYLRFQRLFYLDRGKLAKIILDDIECLSCDIPLSEIYSVFKTRWETTGSFKSLGDFKTYGKADNTAFRELITAKEIEKNVQEMSKGSAPGPDGITLGDVVKMDPEFSRTMEIFNLWLTTGKIPDMVRGCRTVLIPKSSKPDRLKDINNWRPITIGSILLRLFSRIVTARLSKACPLNPRQRGFIRAAGCSENLKLLQTIIWSAKREHRPLGVVFVDIAKAFDTVSHQHIIHALQQREVDPHIVGLVSNMYENISTYITTKRNTHTDKIQIRVGVKQGDPMSPLLFNLAMDPLLCKLEESGKGYHRGQSSITAMAFADDLVLLSDSWENMNTNISILETFCNLTGLKTQGQKCHGFYIKPTKKSYTINDCAAWTINGTPLNMIDPGESEKYLGLQFDPWIGIARSGLSTKLDFWLQRIDQAPLKPLQKTDILKTYTIPRLIYIADHSEVKSALLETLDQKIRTAVKEWLHLPPCTCDAILYSSTRDGGLGITKLAGLIPSVQARRLHRIAQSSDDTMKCFMEKEKMEQLHKKLWIQAGGDRENIPSIWEAPPSSEPPNNVSTNSEWEAPTQKDKFPKPCNWRKNEFKKWTKLASQGRGIVNFERDKISNHWIQYYRRIPHRKLLTALQLRANVYPTREFLARGRQDQYIKACRHCDADNESCAHIIGNCPVTQDARIKRHNYICELLLEEAKKKDWVVFKEPHIRDSNKELYKPDLIFVKDGRALVVDVTVRYEAAKSSLEEAAAEKVRKYKHLETEVRHLTNAKDVTFVGFPLGARGKWHQDNFKLLTELGLSKSRQVKMAETFSTVALFSSVDIVHMFASRARKSMVM

SEQ ID NO: 820 - protein, 1665 aa, synthetic construct
MAPKKKRKVNISGSSCGSPNSADTSSDFKDLWTKLKECHDREVQGLQVKVTKLKQERILDAQRLEEFFTKNQQLREQQKVLHETIKVLEDRLRAGLCDRCAVTEEHMRKKQQEFENIRQQNLKLITELMNERNTLQEENKKLSEQLQQKIENDQQHQAAELECEEDVIPDSPITAFSFSGVNRLRRKENPHVRYIEQTHTKLEHSVCANEMRKVSKSSTHPQHNPNENEILVADTYDQSQSPMAKAHGTSSYTPDKSSFNLATVVAETLGLGVQEESETQGPMSPLGDELYHCLEGNHKKQPFESGSETPGTSESATPEGSPKRKVSSAEGAAKEEPKRRSARLSAKPPAKVEAKPKKAAAKDKSSDKKVQTKGKRGAKGKQAEVANQETKEDLPAENGETKTEESPASDEAGEKEAKSDSGSETPGTSESATPESYEQLAPQPCVGETLHSSLPRDSELFVPEEGSSEKESEDAPKTSPPTPGKHGLEQTGEEKVMVTVPDKNPPCPCCGTRVNSVLNLIEHLKVSHGKRGVCFRCAKCGKENSNYHSVVCHFKKCRGPETEKAPAGEWICEVCNRDFTTKIGLGQHKRLAHPAVRNQERIVASQPKETSNRGAHKRCWTKEEEELLIRLEAQFEGNKNINKLIAEHITTKTAKQISDKRRLLSRKPAEEPREEPGTCHHTRRAAASLRTEPEMSHHAQAEDRDNGPGRRPLPGRAAAGGRTMDEIRRHPDKGNGQQRPTKQKSEEQLQAYYKKTLEERLSAGALNTFPRAFKQVMEGRDIKLVINQTAQDCFGCLESISQIRTATRYKKDTVTREKHPKKPFQKWMKKRAIKKGNYLRFQRLFYLDRGKLAKIILDDIECLSCDIPLSEIYSVFKTRWETTGSFKSLGDFKTYGKADNTAFRELITAKEIEKNVQEMSKGSAPGPDGITLGDVVKMDPEFSRTMEIFNLWLTTGKIPDMVRGCRTVLIPKSSKPDRLKDINNWRPITIGSILLRLFSRIVTARLSKACPLNPRQRGFIRAAGCSENLKLLQTIIWSAKREHRPLGVVFVDIAKAFDTVSHQHIIHALQQREVDPHIVGLVSNMYENISTYITTKRNTHTDKIQIRVGVKQGDPMSPLLFNLAMDPLLCKLEESGKGYHRGQSSITAMAFADDLVLLSDSWENMNTNISILETFCNLTGLKTQGQKCHGFYIKPTKKSYTINDCAAWTINGTPLNMIDPGESEKYLGLQFDPWIGIARSGLSTKLDFWLQRIDQAPLKPLQKTDILKTYTIPRLIYIADHSEVKSALLETLDQKIRTAVKEWLHLPPCTCDAILYSSTRDGGLGITKLAGLIPSVQARRLHRIAQSSDDTMKCFMEKEKMEQLHKKLWIQAGGDRENIPSIWEAPPSSEPPNNVSTNSEWEAPTQKDKFPKPCNWRKNEFKKWTKLASQGRGIVNFERDKISNHWIQYYRRIPHRKLLTALQLRANVYPTREFLARGRQDQYIKACRHCDADNESCAHIIGNCPVTQDARIKRHNYICELLLEEAKKKDWVVFKEPHIRDSNKELYKPDLIFVKDGRALVVDVTVRYEAAKSSLEEAAAEKVRKYKHLETEVRHLTNAKDVTFVGFPLGARGKWHQDNFKLLTELGLSKSRQVKMAETFSTVALFSSVDIVHMFASRARKSMVM

SEQ ID NO: 821 - protein, 1665 aa, synthetic construct
MAPKKKRKVNISGSSCGSPNSADTSSDFKDLWTKLKECHDREVQGLQVKVTKLKQERILDAQRLEEFFTKNQQLREQQKVLHETIKVLEDRLRAGLCDRCAVTEEHMRKKQQEFENIRQQNLKLITELMNERNTLQEENKKLSEQLQQKIENDQQHQAAELECEEDVIPDSPITAFSFSGVNRLRRKENPHVRYIEQTHTKLEHSVCANEMRKVSKSSTHPQHNPNENEILVADTYDQSQSPMAKAHGTSSYTPDKSSFNLATVVAETLGLGVQEESETQGPMSPLGDELYHCLEGNHKKQPFESGSETPGTSESATPEGSPKRKVSSAEGAAKEEPKRRSARLSAKPPAKVEAKPKKAAAKDKSSDKKVQTKGKRGAKGKQAEVANQETKEDLPAENGETKTEESPASDEAGEKEAKSDSGSETPGTSESATPESYEQLAPQPCVGETLHSSLPRDSELFVPEEGSSEKESEDAPKTSPPTPGKHGLEQTGEEKVMVTVPDKNPPCPCCGTRVNSVLNLIEHLKVSHGKRGVCFRCAKCGKENSNYHSVVCHFKKCRGPETEKAPAGEWICEVCNRDFTTKIGLGQHKRLAHPAVRNQERIVASQPKETSNRGAHKRCWTKEEEELLIRLEAQFEGNKNINKLIAEHITTKTAKQISDKRRLLSRKPAEEPREEPGTCHHTRRAAASLRTEPEMSHHAQAEDRDNGPGRRPLPGRAAAGGRTMDEIRRHPDKGNGQQRPTKQKSEEQLQAYYKKTLEERLSAGALNTFPRAFKQVMEGRDIKLVINQTAQDCFGCLESISQIRTATRDKKDTVTREKHPKKPFQKWMKKRAIKKGNYLRFQRLFYLDRGKLAKIILDDIECLSCWIPLSEIYSVFKTRWETTGSFKSLGDFKTYGKADNTAFRELITAKEIEKNVQEMSKGSAPGPDGITLGDVVKMDPEFSRTMEIFNLWLTTGKIPDMVRGCRTVLIPKSSKPDRLKDINNWRPITIGSILLRLFSRIVTARLSKACPLNPRQRGFIRAAGCSENLKLLQTIIWSAKREHRPLGVVFVDIAKAFDTVSHQHIIHALQQREVDPHIVGLVSNMYENISTYITTKRNTHTDKIQIRVGVKQGDPMSPLLFNLAMDPLLCKLEESGKGYHRGQSSITAMAFADDLVLLSDSWENMNTNISILETFCNLTGLKTQGQKCHGFYIKPTKKSYTINDCAAWTINGTPLNMIDPGESEKYLGLQFDPWIGIARSGLSTKLDFWLQRIDQAPLKPLQKTDILKTYTIPRLIYIADHSEVKSALLETLDQKIRTAVKEWLHLPPCTCDAILYSSTRDGGLGITKLAGLIPSVQARRLHRIAQSSDDTMKCFMEKEKMEQLHKKLWIQAGGDRENIPSIWEAPPSSEPPNNVSTNSEWEAPTQKDKFPKPCNWRKNEFKKWTKLASQGRGIVNFERDKISNHWIQYYRRIPHRKLLTALQLRANVYPTREFLARGRQDQYIKACRHCDADNESCAHIIGNCPVTQDARIKRHNYICELLLEEAKKKDWVVFKEPHIRDSNKELYKPDLIFVKDGRALVVDVTVRYEAAKSSLEEAAAEKVRKYKHLETEVRHLTNAKDVTFVGFPLGARGKWHQDNFKLLTELGLSKSRQVKMAETFSTVALFSSVDIVHMFASRARKSMVM

SEQ ID NO: 822 - protein, 1665 aa, synthetic construct
MAPKKKRKVNISGSSCGSPNSADTSSDFKDLWTKLKECHDREVQGLQVKVTKLKQERILDAQRLEEFFTKNQQLREQQKVLHETIKVLEDRLRAGLCDRCAVTEEHMRKKQQEFENIRQQNLKLITELMNERNTLQEENKKLSEQLQQKIENDQQHQAAELECEEDVIPDSPITAFSFSGVNRLRRKENPHVRYIEQTHTKLEHSVCANEMRKVSKSSTHPQHNPNENEILVADTYDQSQSPMAKAHGTSSYTPDKSSFNLATVVAETLGLGVQEESETQGPMSPLGDELYHCLEGNHKKQPFESGSETPGTSESATPEGSPKRKVSSAEGAAKEEPKRRSARLSAKPPAKVEAKPKKAAAKDKSSDKKVQTKGKRGAKGKQAEVANQETKEDLPAENGETKTEESPASDEAGEKEAKSDSGSETPGTSESATPESYEQLAPQPCVGETLHSSLPRDSELFVPEEGSSEKESEDAPKTSPPTPGKHGLEQTGEEKVMVTVPDKNPPCPCCGTRVNSVLNLIEHLKVSHGKRGVCFRCAKCGKENSNYHSVVCHFKKCRGPETEKAPAGEWICEVCNRDFTTKIGLGQHKRLAHPAVRNQERIVASQPKETSNRGAHKRCWTKEEEELLIRLEAQFEGNKNINKLIAEHITTKTAKQISDKRRLLSRKPAEEPREEPGTCHHTRRAAASLRTEPEMSHHAQAEDRDNGPGRRPLPGRAAAGGRTMDEIRRHPDKGNGQQRPTKQKSEEQLQAYYKKTLEERLSAGALNTFPRAFKQVMEGRDIKLVINQTAQDCFGCLESISQIRTATRDKKDTVTREKHPKKPFQKWMKKRAIKKGNYLRFQRLFYLDRGKLAKIILDDIECLSCDIPLSEIYSVFKTRWETTGSFKSLGDFKTYGKADNTAFRELITAKEIEKNVQEMSKGSAPGPDGITLGDVVKMDPEFSRTMEIFNLWLTTGKIPDMVRGCRTVLIPKSSKPDRLKDINNWRPITIGSILLRLFSRIVTARLSKACPLNPRQRGFIRAAGCSENLKLLQTIIWSAKREHRPLGVVFVDIAKAFDTVSHQHIIHALQQREVDPHIVGLVSNMYENISTYITTKRNTHTDKIQIRVGVKQGDPMSPLLFNLAMDPLLCKLEESGKGYHRGQSSITAMAFADDLVLLSDSWENMNTNISILETFCNLTGLKTQGQKCHGFYIKPTKKSYTINDCAAWTINGTPLNMIDPGESEKYLGLQFDPWIGIARSGLSTKLQFWLQRIDQAPLKPLQKTDILKTYTIPRLIYIADHSEVKSALLETLDQKIRTAVKEWLHLPPCTCDAILYSSTRDGGLGITKLAGLIPSVQARRLHRIAQSSDDTMKCFMEKEKMEQLHKKLWIQAGGDRENIPSIWEAPPSSEPPNNVSTNSEWEAPTQKDKFPKPCNWRKNEFKKWTKLASQGRGIVNFERDKISNHWIQYYRRIPHRKLLTALQLRANVYPTREFLARGRQDQYIKACRHCDADNESCAHIIGNCPVTQDARIKRHNYICELLLEEAKKKDWVVFKEPHIRDSNKELYKPDLIFVKDGRALVVDVTVRYEAAKSSLEEAAAEKVRKYKHLETEVRHLTNAKDVTFVGFPLGARGKWHQDNFKLLTELGLSKSRQVKMAETFSTVALFSSVDIVHMFASRARKSMVM

SEQ ID NO: 823 - protein, 1665 aa, synthetic construct
MAPKKKRKVNISGSSCGSPNSADTSSDFKDLWTKLKECHDREVQGLQVKVTKLKQERILDAQRLEEFFTKNQQLREQQKVLHETIKVLEDRLRAGLCDRCAVTEEHMRKKQQEFENIRQQNLKLITELMNERNTLQEENKKLSEQLQQKIENDQQHQAAELECEEDVIPDSPITAFSFSGVNRLRRKENPHVRYIEQTHTKLEHSVCANEMRKVSKSSTHPQHNPNENEILVADTYDQSQSPMAKAHGTSSYTPDKSSFNLATVVAETLGLGVQEESETQGPMSPLGDELYHCLEGNHKKQPFESGSETPGTSESATPEGSPKRKVSSAEGAAKEEPKRRSARLSAKPPAKVEAKPKKAAAKDKSSDKKVQTKGKRGAKGKQAEVANQETKEDLPAENGETKTEESPASDEAGEKEAKSDSGSETPGTSESATPESYEQLAPQPCVGETLHSSLPRDSELFVPEEGSSEKESEDAPKTSPPTPGKHGLEQTGEEKVMVTVPDKNPPCPCCGTRVNSVLNLIEHLKVSHGKRGVCFRCAKCGKENSNYHSVVCHFKKCRGPETEKAPAGEWICEVCNRDFTTKIGLGQHKRLAHPAVRNQERIVASQPKETSNRGAHKRCWTKEEEELLIRLEAQFEGNKNINKLIAEHITTKTAKQISDKRRLLSRKPAEEPREEPGTCHHTRRAAASLRTEPEMSHHAQAEDRDNGPGRRPLPGRAAAGGRTMDEIRRHPDKGNGQQRPTKQKSEEQLQAYYKKTLEERLSAGALNTFPRAFKQVMEGRDIKLVINQTAQDCFGCLESISQIRTATRDKKDTVTREKHPKKPFQKWMKKRAIKKGNYLRFQRLFYLDRGKLAKIILDDIECLSCDIPLSEIYSVFKTRWETTGSFKSLGDFKTYGKADNTAFRELITAKEIEKNVQEMSKGSAPGPDGITLGDVVKMDPEFSRTMEIFNLWLTTGKIPDMVRGCRTVLIPKSSKPDRLKDINNWRPITIGSILLRLFSRIVTARLSKACPLNPRQRGFIRAAGCSENLKLLQTIIWSAKREHRPLGVVFVDIAKAFDTVSHQHIIHALQQREVDPHIVGLVSNMYENISTYITTKRNTHTDKIQIRVGVKQGDPMSPLLFNLAMDPLLCKLEESGKGYHRGQSSITAMAFADDLVLLSDSWENMNTNISILETFCNLTGLKTQGQKCHGFYIKPTKKSYTINDCAAWTINGTPLNMIDPGESEKYLGLQFDPWIGIARSGLSTKLDFWRQRIDQAPLKPLQKTDILKTYTIPRLIYIADHSEVKSALLETLDQKIRTAVKEWLHLPPCTCDAILYSSTRDGGLGITKLAGLIPSVQARRLHRIAQSSDDTMKCFMEKEKMEQLHKKLWIQAGGDRENIPSIWEAPPSSEPPNNVSTNSEWEAPTQKDKFPKPCNWRKNEFKKWTKLASQGRGIVNFERDKISNHWIQYYRRIPHRKLLTALQLRANVYPTREFLARGRQDQYIKACRHCDADNESCAHIIGNCPVTQDARIKRHNYICELLLEEAKKKDWVVFKEPHIRDSNKELYKPDLIFVKDGRALVVDVTVRYEAAKSSLEEAAAEKVRKYKHLETEVRHLTNAKDVTFVGFPLGARGKWHQDNFKLLTELGLSKSRQVKMAETFSTVALFSSVDIVHMFASRARKSMVM

SEQ ID NO: 824 - protein, 1665 aa, synthetic construct
MAPKKKRKVNISGSSCGSPNSADTSSDFKDLWTKLKECHDREVQGLQVKVTKLKQERILDAQRLEEFFTKNQQLREQQKVLHETIKVLEDRLRAGLCDRCAVTEEHMRKKQQEFENIRQQNLKLITELMNERNTLQEENKKLSEQLQQKIENDQQHQAAELECEEDVIPDSPITAFSFSGVNRLRRKENPHVRYIEQTHTKLEHSVCANEMRKVSKSSTHPQHNPNENEILVADTYDQSQSPMAKAHGTSSYTPDKSSFNLATVVAETLGLGVQEESETQGPMSPLGDELYHCLEGNHKKQPFESGSETPGTSESATPEGSPKRKVSSAEGAAKEEPKRRSARLSAKPPAKVEAKPKKAAAKDKSSDKKVQTKGKRGAKGKQAEVANQETKEDLPAENGETKTEESPASDEAGEKEAKSDSGSETPGTSESATPESYEQLAPQPCVGETLHSSLPRDSELFVPEEGSSEKESEDAPKTSPPTPGKHGLEQTGEEKVMVTVPDKNPPCPCCGTRVNSVLNLIEHLKVSHGKRGVCFRCAKCGKENSNYHSVVCHFKKCRGPETEKAPAGEWICEVCNRDFTTKIGLGQHKRLAHPAVRNQERIVASQPKETSNRGAHKRCWTKEEEELLIRLEAQFEGNKNINKLIAEHITTKTAKQISDKRRLLSRKPAEEPREEPGTCHHTRRAAASLRTEPEMSHHAQAEDRDNGPGRRPLPGRAAAGGRTMDEIRRHPDKGNGQQRPTKQKSEEQLQAYYKKTLEERLSAGALNTFPRAFKQVMEGRDIKLVINQTAQDCFGCLESISQIRTATRDKKDTVTREKHPKKPFQKWMKKRAIKKGNYLRFQRLFYLDRGKLAKIILDDIEKLSCDIPLSEIYSVFKTRWETTGSFKSLGDFKTYGKADNTAFRELITAKEIEKNVQEMSKGSAPGPDGITLGDVVKMDPEFSRTMEIFNLWLTTGKIPDMVRGCRTVLIPKSSKPDRLKDINNWRPITIGSILLRLFSRIVTARLSKACPLNPRQRGFIRAAGCSENLKLLQTIIWSAKREHRPLGVVFVDIAKAFDTVSHQHIIHALQQREVDPHIVGLVSNMYENISTYITTKRNTHTDKIQIRVGVKQGDPMSPLLFNLAMDPLLCKLEESGKGYHRGQSSITAMAFADDLVLLSDSWENMNTNISILETFCNLTGLKTQGQKCHGFYIKPTKKSYTINDCAAWTINGTPLNMIDPGESEKYLGLQFDPWIGIARSGLSTKLDFWLQRIDQAPLKPLQKTDILKTYTIPRLIYIADHSEVKSALLETLDQKIRTAVKEWLHLPPCTCDAILYSSTRDGGLGITKLAGLIPSVQARRLHRIAQSSDDTMKCFMEKEKMEQLHKKLWIQAGGDRENIPSIWEAPPSSEPPNNVSTNSEWEAPTQKDKFPKPCNWRKNEFKKWTKLASQGRGIVNFERDKISNHWIQYYRRIPHRKLLTALQLRANVYPTREFLARGRQDQYIKACRHCDADNESCAHIIGNCPVTQDARIKRHNYICELLLEEAKKKDWVVFKEPHIRDSNKELYKPDLIFVKDGRALVVDVTVRYEAAKSSLEEAAAEKVRKYKHLETEVRHLTNAKDVTFVGFPLGARGKWHQDNFKLLTELGLSKSRQVKMAETFSTVALFSSVDIVHMFASRARKSMVM

SEQ ID NO: 825 - protein, 1665 aa, synthetic construct
MAPKKKRKVNISGSSCGSPNSADTSSDFKDLWTKLKECHDREVQGLQVKVTKLKQERILDAQRLEEFFTKNQQLREQQKVLHETIKVLEDRLRAGLCDRCAVTEEHMRKKQQEFENIRQQNLKLITELMNERNTLQEENKKLSEQLQQKIENDQQHQAAELECEEDVIPDSPITAFSFSGVNRLRRKENPHVRYIEQTHTKLEHSVCANEMRKVSKSSTHPQHNPNENEILVADTYDQSQSPMAKAHGTSSYTPDKSSFNLATVVAETLGLGVQEESETQGPMSPLGDELYHCLEGNHKKQPFESGSETPGTSESATPEGSPKRKVSSAEGAAKEEPKRRSARLSAKPPAKVEAKPKKAAAKDKSSDKKVQTKGKRGAKGKQAEVANQETKEDLPAENGETKTEESPASDEAGEKEAKSDSGSETPGTSESATPESYEQLAPQPCVGETLHSSLPRDSELFVPEEGSSEKESEDAPKTSPPTPGKHGLEQTGEEKVMVTVPDKNPPCPCCGTRVNSVLNLIEHLKVSHGKRGVCFRCAKCGKENSNYHSVVCHFKKCRGPETEKAPAGEWICEVCNRDFTTKIGLGQHKRLAHPAVRNQERIVASQPKETSNRGAHKRCWTKEEEELLIRLEAQFEGNKNINKLIAEHITTKTAKQISDKRRLLSRKPAEEPREEPGTCHHTRRAAASLRTEPEMSHHAQAEDRDNGPGRRPLPGRAAAGGRTMDEIRRHPDKGNGQQRPTKQKSEEQLQAYYKKTLEERLSAGALNTFPRAFKQVMEGRDIKLVINQTAQDCFGCLESISQIRTATRDKKDTVTREKHPKKPFQKWMKKRAIKKGNYLRFQRLFYLDRGKLAKIILDDIECLSCDIPLSEIYSVFKTRWETTGSFKSLGDFKTYGKADNTAFRELITAKEIEKNVQEMSKGSAPGPDGITLGDVVKMDPEFSRTMEIFNLWLTTGKIPDMVRGCRTVLIPKSSKPDRLKDINNWRPITIGSILLRLFSRIVTARLSKACPLNPRQRGFIRAAGCSENLKLLQTIIWSAKREHRPLGVVFVDIAKAFDTVSHQHIIHALQQREVDPHIVGLVSNMYENISTYITTKRNTHTDKIQIRVGVKQGDPMSPLLFNLAMDPLLCKLEESGKGYHRGQSSITAMAFADDLVLLSDSWENMNTNISILETFCNLTGLKTQGQKCHGFYIKPTKKSYTINDCAAWTINGTPLNMIDPGESEKYLGLQFDPWIGIARSGLSTKLDFWLQRKDQAPLKPLQKTDILKTYTIPRLIYIADHSEVKSALLETLDQKIRTAVKEWLHLPPCTCDAILYSSTRDGGLGITKLAGLIPSVQARRLHRIAQSSDDTMKCFMEKEKMEQLHKKLWIQAGGDRENIPSIWEAPPSSEPPNNVSTNSEWEAPTQKDKFPKPCNWRKNEFKKWTKLASQGRGIVNFERDKISNHWIQYYRRIPHRKLLTALQLRANVYPTREFLARGRQDQYIKACRHCDADNESCAHIIGNCPVTQDARIKRHNYICELLLEEAKKKDWVVFKEPHIRDSNKELYKPDLIFVKDGRALVVDVTVRYEAAKSSLEEAAAEKVRKYKHLETEVRHLTNAKDVTFVGFPLGARGKWHQDNFKLLTELGLSKSRQVKMAETFSTVALFSSVDIVHMFASRARKSMVM

SEQ ID NO: 826 - protein, 1665 aa, synthetic construct
MAPKKKRKVNISGSSCGSPNSADTSSDFKDLWTKLKECHDREVQGLQVKVTKLKQERILDAQRLEEFFTKNQQLREQQKVLHETIKVLEDRLRAGLCDRCAVTEEHMRKKQQEFENIRQQNLKLITELMNERNTLQEENKKLSEQLQQKIENDQQHQAAELECEEDVIPDSPITAFSFSGVNRLRRKENPHVRYIEQTHTKLEHSVCANEMRKVSKSSTHPQHNPNENEILVADTYDQSQSPMAKAHGTSSYTPDKSSFNLATVVAETLGLGVQEESETQGPMSPLGDELYHCLEGNHKKQPFESGSETPGTSESATPEGSPKRKVSSAEGAAKEEPKRRSARLSAKPPAKVEAKPKKAAAKDKSSDKKVQTKGKRGAKGKQAEVANQETKEDLPAENGETKTEESPASDEAGEKEAKSDSGSETPGTSESATPESYEQLAPQPCVGETLHSSLPRDSELFVPEEGSSEKESEDAPKTSPPTPGKHGLEQTGEEKVMVTVPDKNPPCPCCGTRVNSVLNLIEHLKVSHGKRGVCFRCAKCGKENSNYHSVVCHFKKCRGPETEKAPAGEWICEVCNRDFTTKIGLGQHKRLAHPAVRNQERIVASQPKETSNRGAHKRCWTKEEEELLIRLEAQFEGNKNINKLIAEHITTKTAKQISDKRRLLSRKPAEEPREEPGTCHHTRRAAASLRTEPEMSHHAQAEDRDNGPGRRPLPGRAAAGGRTMDEIRRHPDKGNGQQRPTKQKSEEQLQAYYKKTLEERLSAGALNTFPRAFKQVMEGRDIKLVINQTAQDCFGCLESISQIRTATRDKKDTVTREKHPKKPFQKWMKKRAIKKGNYLRFQRLFYLDRGKLAKIILDDIECLSCRIPLSEIYSVFKTRWETTGSFKSLGDFKTYGKADNTAFRELITAKEIEKNVQEMSKGSAPGPDGITLGDVVKMDPEFSRTMEIFNLWLTTGKIPDMVRGCRTVLIPKSSKPDRLKDINNWRPITIGSILLRLFSRIVTARLSKACPLNPRQRGFIRAAGCSENLKLLQTIIWSAKREHRPLGVVFVDIAKAFDTVSHQHIIHALQQREVDPHIVGLVSNMYENISTYITTKRNTHTDKIQIRVGVKQGDPMSPLLFNLAMDPLLCKLEESGKGYHRGQSSITAMAFADDLVLLSDSWENMNTNISILETFCNLTGLKTQGQKCHGFYIKPTKKSYTINDCAAWTINGTPLNMIDPGESEKYLGLQFDPWIGIARSGLSTKLDFWLQRIDQAPLKPLQKTDILKTYTIPRLIYIADHSEVKSALLETLDQKIRTAVKEWLHLPPCTCDAILYSSTRDGGLGITKLAGLIPSVQARRLHRIAQSSDDTMKCFMEKEKMEQLHKKLWIQAGGDRENIPSIWEAPPSSEPPNNVSTNSEWEAPTQKDKFPKPCNWRKNEFKKWTKLASQGRGIVNFERDKISNHWIQYYRRIPHRKLLTALQLRANVYPTREFLARGRQDQYIKACRHCDADNESCAHIIGNCPVTQDARIKRHNYICELLLEEAKKKDWVVFKEPHIRDSNKELYKPDLIFVKDGRALVVDVTVRYEAAKSSLEEAAAEKVRKYKHLETEVRHLTNAKDVTFVGFPLGARGKWHQDNFKLLTELGLSKSRQVKMAETFSTVALFSSVDIVHMFASRARKSMVM

SEQ ID NO: 827 - protein, 1665 aa, synthetic construct
MAPKKKRKVNISGSSCGSPNSADTSSDFKDLWTKLKECHDREVQGLQVKVTKLKQERILDAQRLEEFFTKNQQLREQQKVLHETIKVLEDRLRAGLCDRCAVTEEHMRKKQQEFENIRQQNLKLITELMNERNTLQEENKKLSEQLQQKIENDQQHQAAELECEEDVIPDSPITAFSFSGVNRLRRKENPHVRYIEQTHTKLEHSVCANEMRKVSKSSTHPQHNPNENEILVADTYDQSQSPMAKAHGTSSYTPDKSSFNLATVVAETLGLGVQEESETQGPMSPLGDELYHCLEGNHKKQPFESGSETPGTSESATPEGSPKRKVSSAEGAAKEEPKRRSARLSAKPPAKVEAKPKKAAAKDKSSDKKVQTKGKRGAKGKQAEVANQETKEDLPAENGETKTEESPASDEAGEKEAKSDSGSETPGTSESATPESYEQLAPQPCVGETLHSSLPRRSELFVPEEGSSEKESEDAPKTSPPTPGKHGLEQTGEEKVMVTVPDKNPPCPCCGTRVNSVLNLIEHLKVSHGKRGVCFRCAKCGKENSNYHSVVCHFKKCRGPETEKAPAGEWICEVCNRDFTTKIGLGQHKRLAHPAVRNQERIVASQPKETSNRGAHKRCWTKEEEELLIRLEAQFEGNKNINKLIAEHITTKTAKQISDKRRLLSRKPAEEPREEPGTCHHTRRAAASLRTEPEMSHHAQAEDRDNGPGRRPLPGRAAAGGRTMDEIRRHPDKGNGQQRPTKQKSEEQLQAYYKKTLEERLSAGALNTFPRAFKQVMEGRDIKLVINQTAQDCFGCLESISQIRTATRDKKDTVTREKHPKKPFQKWMKKRAIKKGNYLRFQRLFYLDRGKLAKIILDDIECLSCDIPLSEIYSVFKTRWETTGSFKSLGDFKTYGKADNTAFRELITAKEIEKNVQEMSKGSAPGPDGITLGDVVKMDPEFSRTMEIFNLWLTTGKIPDMVRGCRTVLIPKSSKPDRLKDINNWRPITIGSILLRLFSRIVTARLSKACPLNPRQRGFIRAAGCSENLKLLQTIIWSAKREHRPLGVVFVDIAKAFDTVSHQHIIHALQQREVDPHIVGLVSNMYENISTYITTKRNTHTDKIQIRVGVKQGDPMSPLLFNLAMDPLLCKLEESGKGYHRGQSSITAMAFADDLVLLSDSWENMNTNISILETFCNLTGLKTQGQKCHGFYIKPTKKSYTINDCAAWTINGTPLNMIDPGESEKYLGLQFDPWIGIARSGLSTKLDFWLQRIDQAPLKPLQKTDILKTYTIPRLIYIADHSEVKSALLETLDQKIRTAVKEWLHLPPCTCDAILYSSTRDGGLGITKLAGLIPSVQARRLHRIAQSSDDTMKCFMEKEKMEQLHKKLWIQAGGDRENIPSIWEAPPSSEPPNNVSTNSEWEAPTQKDKFPKPCNWRKNEFKKWTKLASQGRGIVNFERDKISNHWIQYYRRIPHRKLLTALQLRANVYPTREFLARGRQDQYIKACRHCDADNESCAHIIGNCPVTQDARIKRHNYICELLLEEAKKKDWVVFKEPHIRDSNKELYKPDLIFVKDGRALVVDVTVRYEAAKSSLEEAAAEKVRKYKHLETEVRHLTNAKDVTFVGFPLGARGKWHQDNFKLLTELGLSKSRQVKMAETFSTVALFSSVDIVHMFASRARKSMVM

SEQ ID NO: 828 - skipped

SEQ ID NO: 829 - protein, 1665 aa, synthetic construct
MAPKKKRKVNISGSSCGSPNSADTSSDFKDLWTKLKECHDREVQGLQVKVTKLKQERILDAQRLEEFFTKNQQLREQQKVLHETIKVLEDRLRAGLCDRCAVTEEHMRKKQQEFENIRQQNLKLITELMNERNTLQEENKKLSEQLQQKIENDQQHQAAELECEEDVIPDSPITAFSFSGVNRLRRKENPHVRYIEQTHTKLEHSVCANEMRKVSKSSTHPQHNPNENEILVADTYDQSQSPMAKAHGTSSYTPDKSSFNLATVVAETLGLGVQEESETQGPMSPLGDELYHCLEGNHKKQPFESGSETPGTSESATPEGSPKRKVSSAEGAAKEEPKRRSARLSAKPPAKVEAKPKKAAAKDKSSDKKVQTKGKRGAKGKQAEVANQETKEDLPAENGETKTEESPASDEAGEKEAKSDSGSETPGTSESATPESYEQLAPQPCVGETLHSSLPRDSELFVPEEGSSEKESEDAPKTSPPTPGKHGLEQTGEEKVMVTVPDKNPPCPCCGTRVNSVLNLIEHLKVSHGKRGVCFRCAKCGKENSNYHSVVCHFKKCRGPETEKAPAGEWICEVCNRDFTTKIGLGQHKRLAHPAVRNQERIVASQPKETSNRGAHKRCWTKEEEELLIRLEAQFEGNKNINKLIAEHITTKTAKQISDKRRLLSRKPAEEPREEPGTCHHTRRAAASLRTEPEMSHHAQAEDRDNGPGRRPLPGRAAAGGRTMDEIRRHPDKGNGQQRPTKQKSEEQLQAYYKKTLEERLSAGALNTFPRAFKQVMEGRDIKLVINQTAQDCFGCLESISQIRTATRDKKDTVTREKHPKKPFQKWMKKRAIKKGNYLRFQRLFYLDRGKLAKIILDDIECLSCDIPLSEIYSVFKTRWETTGSFKSLGDFKTYGKADNTAFRELITAKEIEKNVQEMSKGSAPGPDGITLGDVVKMDPEFSRTMEIFNLWLTTGKIPDMVRGCRTVLIPKSSKPDRLKDINNWRPITIGSILLRLFSRIVTARLSKACPLNPRQRGFIRAAGCSENLKLLQTIIWSAKREHRPLGVVFVDIAKAFDTVSHQHIIHALQQREVDPHIVGLVSNMYENISTYITTKRNTHTDKIQIRVGVKQGDPMSPLLFNLAMDPLLCKLEESGKGYHRGQSSITAMAFADDLVLLSDSWENMNTNISILETFCNLTGLKTQGQKCHGFYIKPTKKSYTINDCAAWTINGTPLNMIDPGESEKYLGLQFDPWIGIARSGLSTKLDFWLQRIDQAPLKKLQKTDILKTYTIPRLIYIADHSEVKSALLETLDQKIRTAVKEWLHLPPCTCDAILYSSTRDGGLGITKLAGLIPSVQARRLHRIAQSSDDTMKCFMEKEKMEQLHKKLWIQAGGDRENIPSIWEAPPSSEPPNNVSTNSEWEAPTQKDKFPKPCNWRKNEFKKWTKLASQGRGIVNFERDKISNHWIQYYRRIPHRKLLTALQLRANVYPTREFLARGRQDQYIKACRHCDADNESCAHIIGNCPVTQDARIKRHNYICELLLEEAKKKDWVVFKEPHIRDSNKELYKPDLIFVKDGRALVVDVTVRYEAAKSSLEEAAAEKVRKYKHLETEVRHLTNAKDVTFVGFPLGARGKWHQDNFKLLTELGLSKSRQVKMAETFSTVALFSSVDIVHMFASRARKSMVM

SEQ ID NO: 830 - protein, 1665 aa, synthetic construct
MAPKKKRKVNISGSSCGSPNSADTSSDFKDLWTKLKECHDREVQGLQVKVTKLKQERILDAQRLEEFFTKNQQLREQQKVLHETIKVLEDRLRAGLCDRCAVTEEHMRKKQQEFENIRQQNLKLITELMNERNTLQEENKKLSEQLQQKIENDQQHQAAELECEEDVIPDSPITAFSFSGVNRLRRKENPHVRYIEQTHTKLEHSVCANEMRKVSKSSTHPQHNPNENEILVADTYDQSQSPMAKAHGTSSYTPDKSSFNLATVVAETLGLGVQEESETQGPMSPLGDELYHCLEGNHKKQPFESGSETPGTSESATPEGSPKRKVSSAEGAAKEEPKRRSARLSAKPPAKVEAKPKKAAAKDKSSDKKVQTKGKRGAKGKQAEVANQETKEDLPAENGETKTEESPASDEAGEKEAKSDSGSETPGTSESATPESYEQLAPQPCVRETLHSSLPRDSELFVPEEGSSEKESEDAPKTSPPTPGKHGLEQTGEEKVMVTVPDKNPPCPCCGTRVNSVLNLIEHLKVSHGKRGVCFRCAKCGKENSNYHSVVCHFKKCRGPETEKAPAGEWICEVCNRDFTTKIGLGQHKRLAHPAVRNQERIVASQPKETSNRGAHKRCWTKEEEELLIRLEAQFEGNKNINKLIAEHITTKTAKQISDKRRLLSRKPAEEPREEPGTCHHTRRAAASLRTEPEMSHHAQAEDRDNGPGRRPLPGRAAAGGRTMDEIRRHPDKGNGQQRPTKQKSEEQLQAYYKKTLEERLSAGALNTFPRAFKQVMEGRDIKLVINQTAQDCFGCLESISQIRTATRDKKDTVTREKHPKKPFQKWMKKRAIKKGNYLRFQRLFYLDRGKLAKIILDDIECLSCDIPLSEIYSVFKTRWETTGSFKSLGDFKTYGKADNTAFRELITAKEIEKNVQEMSKGSAPGPDGITLGDVVKMDPEFSRTMEIFNLWLTTGKIPDMVRGCRTVLIPKSSKPDRLKDINNWRPITIGSILLRLFSRIVTARLSKACPLNPRQRGFIRAAGCSENLKLLQTIIWSAKREHRPLGVVFVDIAKAFDTVSHQHIIHALQQREVDPHIVGLVSNMYENISTYITTKRNTHTDKIQIRVGVKQGDPMSPLLFNLAMDPLLCKLEESGKGYHRGQSSITAMAFADDLVLLSDSWENMNTNISILETFCNLTGLKTQGQKCHGFYIKPTKKSYTINDCAAWTINGTPLNMIDPGESEKYLGLQFDPWIGIARSGLSTKLDFWLQRIDQAPLKPLQKTDILKTYTIPRLIYIADHSEVKSALLETLDQKIRTAVKEWLHLPPCTCDAILYSSTRDGGLGITKLAGLIPSVQARRLHRIAQSSDDTMKCFMEKEKMEQLHKKLWIQAGGDRENIPSIWEAPPSSEPPNNVSTNSEWEAPTQKDKFPKPCNWRKNEFKKWTKLASQGRGIVNFERDKISNHWIQYYRRIPHRKLLTALQLRANVYPTREFLARGRQDQYIKACRHCDADNESCAHIIGNCPVTQDARIKRHNYICELLLEEAKKKDWVVFKEPHIRDSNKELYKPDLIFVKDGRALVVDVTVRYEAAKSSLEEAAAEKVRKYKHLETEVRHLTNAKDVTFVGFPLGARGKWHQDNFKLLTELGLSKSRQVKMAETFSTVALFSSVDIVHMFASRARKSMVM

SEQ ID NO: 831 - protein, 1665 aa, synthetic construct
MAPKKKRKVNISGSSCGSPNSADTSSDFKDLWTKLKECHDREVQGLQVKVTKLKQERILDAQRLEEFFTKNQQLREQQKVLHETIKVLEDRLRAGLCDRCAVTEEHMRKKQQEFENIRQQNLKLITELMNERNTLQEENKKLSEQLQQKIENDQQHQAAELECEEDVIPDSPITAFSFSGVNRLRRKENPHVRYIEQTHTKLEHSVCANEMRKVSKSSTHPQHNPNENEILVADTYDQSQSPMAKAHGTSSYTPDKSSFNLATVVAETLGLGVQEESETQGPMSPLGDELYHCLEGNHKKQPFESGSETPGTSESATPEGSPKRKVSSAEGAAKEEPKRRSARLSAKPPAKVEAKPKKAAAKDKSSDKKVQTKGKRGAKGKQAEVANQETKEDLPAENGETKTEESPASDEAGEKEAKSDSGSETPGTSESATPESYEQLAPQPCVGETLHSRLPRDSELFVPEEGSSEKESEDAPKTSPPTPGKHGLEQTGEEKVMVTVPDKNPPCPCCGTRVNSVLNLIEHLKVSHGKRGVCFRCAKCGKENSNYHSVVCHFKKCRGPETEKAPAGEWICEVCNRDFTTKIGLGQHKRLAHPAVRNQERIVASQPKETSNRGAHKRCWTKEEEELLIRLEAQFEGNKNINKLIAEHITTKTAKQISDKRRLLSRKPAEEPREEPGTCHHTRRAAASLRTEPEMSHHAQAEDRDNGPGRRPLPGRAAAGGRTMDEIRRHPDKGNGQQRPTKQKSEEQLQAYYKKTLEERLSAGALNTFPRAFKQVMEGRDIKLVINQTAQDCFGCLESISQIRTATRDKKDTVTREKHPKKPFQKWMKKRAIKKGNYLRFQRLFYLDRGKLAKIILDDIECLSCDIPLSEIYSVFKTRWETTGSFKSLGDFKTYGKADNTAFRELITAKEIEKNVQEMSKGSAPGPDGITLGDVVKMDPEFSRTMEIFNLWLTTGKIPDMVRGCRTVLIPKSSKPDRLKDINNWRPITIGSILLRLFSRIVTARLSKACPLNPRQRGFIRAAGCSENLKLLQTIIWSAKREHRPLGVVFVDIAKAFDTVSHQHIIHALQQREVDPHIVGLVSNMYENISTYITTKRNTHTDKIQIRVGVKQGDPMSPLLFNLAMDPLLCKLEESGKGYHRGQSSITAMAFADDLVLLSDSWENMNTNISILETFCNLTGLKTQGQKCHGFYIKPTKKSYTINDCAAWTINGTPLNMIDPGESEKYLGLQFDPWIGIARSGLSTKLDFWLQRIDQAPLKPLQKTDILKTYTIPRLIYIADHSEVKSALLETLDQKIRTAVKEWLHLPPCTCDAILYSSTRDGGLGITKLAGLIPSVQARRLHRIAQSSDDTMKCFMEKEKMEQLHKKLWIQAGGDRENIPSIWEAPPSSEPPNNVSTNSEWEAPTQKDKFPKPCNWRKNEFKKWTKLASQGRGIVNFERDKISNHWIQYYRRIPHRKLLTALQLRANVYPTREFLARGRQDQYIKACRHCDADNESCAHIIGNCPVTQDARIKRHNYICELLLEEAKKKDWVVFKEPHIRDSNKELYKPDLIFVKDGRALVVDVTVRYEAAKSSLEEAAAEKVRKYKHLETEVRHLTNAKDVTFVGFPLGARGKWHQDNFKLLTELGLSKSRQVKMAETFSTVALFSSVDIVHMFASRARKSMVM

SEQ ID NO: 832 - protein, 1665 aa, synthetic construct
MAPKKKRKVNISGSSCGSPNSADTSSDFKDLWTKLKECHDREVQGLQVKVTKLKQERILDAQRLEEFFTKNQQLREQQKVLHETIKVLEDRLRAGLCDRCAVTEEHMRKKQQEFENIRQQNLKLITELMNERNTLQEENKKLSEQLQQKIENDQQHQAAELECEEDVIPDSPITAFSFSGVNRLRRKENPHVRYIEQTHTKLEHSVCANEMRKVSKSSTHPQHNPNENEILVADTYDQSQSPMAKAHGTSSYTPDKSSFNLATVVAETLGLGVQEESETQGPMSPLGDELYHCLEGNHKKQPFESGSETPGTSESATPEGSPKRKVSSAEGAAKEEPKRRSARLSAKPPAKVEAKPKKAAAKDKSSDKKVQTKGKRGAKGKQAEVANQETKEDLPAENGETKTEESPASDEAGEKEAKSDSGSETPGTSESATPESYEQLAPQPCVKETLHSSLPRDSELFVPEEGSSEKESEDAPKTSPPTPGKHGLEQTGEEKVMVTVPDKNPPCPCCGTRVNSVLNLIEHLKVSHGKRGVCFRCAKCGKENSNYHSVVCHFKKCRGPETEKAPAGEWICEVCNRDFTTKIGLGQHKRLAHPAVRNQERIVASQPKETSNRGAHKRCWTKEEEELLIRLEAQFEGNKNINKLIAEHITTKTAKQISDKRRLLSRKPAEEPREEPGTCHHTRRAAASLRTEPEMSHHAQAEDRDNGPGRRPLPGRAAAGGRTMDEIRRHPDKGNGQQRPTKQKSEEQLQAYYKKTLEERLSAGALNTFPRAFKQVMEGRDIKLVINQTAQDCFGCLESISQIRTATRDKKDTVTREKHPKKPFQKWMKKRAIKKGNYLRFQRLFYLDRGKLAKIILDDIECLSCDIPLSEIYSVFKTRWETTGSFKSLGDFKTYGKADNTAFRELITAKEIEKNVQEMSKGSAPGPDGITLGDVVKMDPEFSRTMEIFNLWLTTGKIPDMVRGCRTVLIPKSSKPDRLKDINNWRPITIGSILLRLFSRIVTARLSKACPLNPRQRGFIRAAGCSENLKLLQTIIWSAKREHRPLGVVFVDIAKAFDTVSHQHIIHALQQREVDPHIVGLVSNMYENISTYITTKRNTHTDKIQIRVGVKQGDPMSPLLFNLAMDPLLCKLEESGKGYHRGQSSITAMAFADDLVLLSDSWENMNTNISILETFCNLTGLKTQGQKCHGFYIKPTKKSYTINDCAAWTINGTPLNMIDPGESEKYLGLQFDPWIGIARSGLSTKLDFWLQRIDQAPLKPLQKTDILKTYTIPRLIYIADHSEVKSALLETLDQKIRTAVKEWLHLPPCTCDAILYSSTRDGGLGITKLAGLIPSVQARRLHRIAQSSDDTMKCFMEKEKMEQLHKKLWIQAGGDRENIPSIWEAPPSSEPPNNVSTNSEWEAPTQKDKFPKPCNWRKNEFKKWTKLASQGRGIVNFERDKISNHWIQYYRRIPHRKLLTALQLRANVYPTREFLARGRQDQYIKACRHCDADNESCAHIIGNCPVTQDARIKRHNYICELLLEEAKKKDWVVFKEPHIRDSNKELYKPDLIFVKDGRALVVDVTVRYEAAKSSLEEAAAEKVRKYKHLETEVRHLTNAKDVTFVGFPLGARGKWHQDNFKLLTELGLSKSRQVKMAETFSTVALFSSVDIVHMFASRARKSMVM

SEQ ID NO: 833 - protein, 1665 aa, synthetic construct
MAPKKKRKVNISGSSCGSPNSADTSSDFKDLWTKLKECHDREVQGLQVKVTKLKQERILDAQRLEEFFTKNQQLREQQKVLHETIKVLEDRLRAGLCDRCAVTEEHMRKKQQEFENIRQQNLKLITELMNERNTLQEENKKLSEQLQQKIENDQQHQAAELECEEDVIPDSPITAFSFSGVNRLRRKENPHVRYIEQTHTKLEHSVCANEMRKVSKSSTHPQHNPNENEILVADTYDQSQSPMAKAHGTSSYTPDKSSFNLATVVAETLGLGVQEESETQGPMSPLGDELYHCLEGNHKKQPFESGSETPGTSESATPEGSPKRKVSSAEGAAKEEPKRRSARLSAKPPAKVEAKPKKAAAKDKSSDKKVQTKGKRGAKGKQAEVANQETKEDLPAENGETKTEESPASDEAGEKEAKSDSGSETPGTSESATPESYEQLAPQPCVGETLHWSLPRDSELFVPEEGSSEKESEDAPKTSPPTPGKHGLEQTGEEKVMVTVPDKNPPCPCCGTRVNSVLNLIEHLKVSHGKRGVCFRCAKCGKENSNYHSVVCHFKKCRGPETEKAPAGEWICEVCNRDFTTKIGLGQHKRLAHPAVRNQERIVASQPKETSNRGAHKRCWTKEEEELLIRLEAQFEGNKNINKLIAEHITTKTAKQISDKRRLLSRKPAEEPREEPGTCHHTRRAAASLRTEPEMSHHAQAEDRDNGPGRRPLPGRAAAGGRTMDEIRRHPDKGNGQQRPTKQKSEEQLQAYYKKTLEERLSAGALNTFPRAFKQVMEGRDIKLVINQTAQDCFGCLESISQIRTATRDKKDTVTREKHPKKPFQKWMKKRAIKKGNYLRFQRLFYLDRGKLAKIILDDIECLSCDIPLSEIYSVFKTRWETTGSFKSLGDFKTYGKADNTAFRELITAKEIEKNVQEMSKGSAPGPDGITLGDVVKMDPEFSRTMEIFNLWLTTGKIPDMVRGCRTVLIPKSSKPDRLKDINNWRPITIGSILLRLFSRIVTARLSKACPLNPRQRGFIRAAGCSENLKLLQTIIWSAKREHRPLGVVFVDIAKAFDTVSHQHIIHALQQREVDPHIVGLVSNMYENISTYITTKRNTHTDKIQIRVGVKQGDPMSPLLFNLAMDPLLCKLEESGKGYHRGQSSITAMAFADDLVLLSDSWENMNTNISILETFCNLTGLKTQGQKCHGFYIKPTKKSYTINDCAAWTINGTPLNMIDPGESEKYLGLQFDPWIGIARSGLSTKLDFWLQRIDQAPLKPLQKTDILKTYTIPRLIYIADHSEVKSALLETLDQKIRTAVKEWLHLPPCTCDAILYSSTRDGGLGITKLAGLIPSVQARRLHRIAQSSDDTMKCFMEKEKMEQLHKKLWIQAGGDRENIPSIWEAPPSSEPPNNVSTNSEWEAPTQKDKFPKPCNWRKNEFKKWTKLASQGRGIVNFERDKISNHWIQYYRRIPHRKLLTALQLRANVYPTREFLARGRQDQYIKACRHCDADNESCAHIIGNCPVTQDARIKRHNYICELLLEEAKKKDWVVFKEPHIRDSNKELYKPDLIFVKDGRALVVDVTVRYEAAKSSLEEAAAEKVRKYKHLETEVRHLTNAKDVTFVGFPLGARGKWHQDNFKLLTELGLSKSRQVKMAETFSTVALFSSVDIVHMFASRARKSMVM

SEQ ID NO: 834 - protein, 1665 aa, synthetic construct
MAPKKKRKVNISGSSCGSPNSADTSSDFKDLWTKLKECHDREVQGLQVKVTKLKQERILDAQRLEEFFTKNQQLREQQKVLHETIKVLEDRLRAGLCDRCAVTEEHMRKKQQEFENIRQQNLKLITELMNERNTLQEENKKLSEQLQQKIENDQQHQAAELECEEDVIPDSPITAFSFSGVNRLRRKENPHVRYIEQTHTKLEHSVCANEMRKVSKSSTHPQHNPNENEILVADTYDQSQSPMAKAHGTSSYTPDKSSFNLATVVAETLGLGVQEESETQGPMSPLGDELYHCLEGNHKKQPFESGSETPGTSESATPEGSPKRKVSSAEGAAKEEPKRRSARLSAKPPAKVEAKPKKAAAKDKSSDKKVQTKGKRGAKGKQAEVANQETKEDLPAENGETKTEESPASDEAGEKEAKSDSGSETPGTSESATPESYEQLAPQPCVGETLHSSLPRDSELFVPEEGSSEKESEDAPKTSPPTPGKHGLEQTGEEKVMVTVPDKNPPCPCCGTRVNSVLNLIEHLKVSHGKRGVCFRCAKCGKENSNYHSVVCHFKKCRGPETEKAPAGEWICEVCNRDFTTKIGLGQHKRLAHPAVRNQERIVASQPKETSNRGAHKRCWTKEEEELLIRLEAQFEGNKNINKLIAEHITTKTAKQISDKRRLLSRKPAEEPREEPGTCHHTRRAAASLRTEPEMSHHAQAEDRDNGPGRRPLPGRAAAGGRTMDEIRRHPDKGNGQQRPTKQKSEEQLQAYYKKTLEERLSAGALNTFPRAFKQVMEGRDIKLVINQTAQDCFGCLESISQIRTATRDKKDTVTREKRPKKPFQKWMKKRAIKKGNYLRFQRLFYLDRGKLAKIILDDIECLSCDIPLSEIYSVFKTRWETTGSFKSLGDFKTYGKADNTAFRELITAKEIEKNVQEMSKGSAPGPDGITLGDVVKMDPEFSRTMEIFNLWLTTGKIPDMVRGCRTVLIPKSSKPDRLKDINNWRPITIGSILLRLFSRIVTARLSKACPLNPRQRGFIRAAGCSENLKLLQTIIWSAKREHRPLGVVFVDIAKAFDTVSHQHIIHALQQREVDPHIVGLVSNMYENISTYITTKRNTHTDKIQIRVGVKQGDPMSPLLFNLAMDPLLCKLEESGKGYHRGQSSITAMAFADDLVLLSDSWENMNTNISILETFCNLTGLKTQGQKCHGFYIKPTKKSYTINDCAAWTINGTPLNMIDPGESEKYLGLQFDPWIGIARSGLSTKLDFWLQRIDQAPLKPLQKTDILKTYTIPRLIYIADHSEVKSALLETLDQKIRTAVKEWLHLPPCTCDAILYSSTRDGGLGITKLAGLIPSVQARRLHRIAQSSDDTMKCFMEKEKMEQLHKKLWIQAGGDRENIPSIWEAPPSSEPPNNVSTNSEWEAPTQKDKFPKPCNWRKNEFKKWTKLASQGRGIVNFERDKISNHWIQYYRRIPHRKLLTALQLRANVYPTREFLARGRQDQYIKACRHCDADNESCAHIIGNCPVTQDARIKRHNYICELLLEEAKKKDWVVFKEPHIRDSNKELYKPDLIFVKDGRALVVDVTVRYEAAKSSLEEAAAEKVRKYKHLETEVRHLTNAKDVTFVGFPLGARGKWHQDNFKLLTELGLSKSRQVKMAETFSTVALFSSVDIVHMFASRARKSMVM

SEQ ID NO: 835 - protein, 1665 aa, synthetic construct
MAPKKKRKVNISGSSCGSPNSADTSSDFKDLWTKLKECHDREVQGLQVKVTKLKQERILDAQRLEEFFTKNQQLREQQKVLHETIKVLEDRLRAGLCDRCAVTEEHMRKKQQEFENIRQQNLKLITELMNERNTLQEENKKLSEQLQQKIENDQQHQAAELECEEDVIPDSPITAFSFSGVNRLRRKENPHVRYIEQTHTKLEHSVCANEMRKVSKSSTHPQHNPNENEILVADTYDQSQSPMAKAHGTSSYTPDKSSFNLATVVAETLGLGVQEESETQGPMSPLGDELYHCLEGNHKKQPFESGSETPGTSESATPEGSPKRKVSSAEGAAKEEPKRRSARLSAKPPAKVEAKPKKAAAKDKSSDKKVQTKGKRGAKGKQAEVANQETKEDLPAENGETKTEESPASDEAGEKEAKSDSGSETPGTSESATPESYEQLAPQPCVGETLHSSLPRDSELFVPEEGSSEKESEDAPKTSPPTPGKHGLEQTGEEKVMVTVPDKNPPCPCCGTRVNSVLNLIEHLKVSHGKRGVCFRCAKCGKENSNYHSVVCHFKKCRGPETEKAPAGEWICEVCNRDFTTKIGLGQHKRLAHPAVRNQERIVASQPKETSNRGAHKRCWTKEEEELLIRLEAQFEGNKNINKLIAEHITTKTAKQISDKRRLLSRKPAEEPREEPGTCHHTRRAAASLRTEPEMSHHAQAEDRDNGPGRRPLPGRAAAGGRTMDEIRRHPDKGNGQQRPTKQKSEEQLQAYYKKTLEERLSAGALNTFPRAFKQVMEGRDIKLVINQTAQDCFGCLESISQIRTATRDKKDTVTREKHPKKPFQKWMKKRAIKKGNYLRFQRLFYLDRHKLAKIILDDIECLSCDIPLSEIYSVFKTRWETTGSFKSLGDFKTYGKADNTAFRELITAKEIEKNVQEMSKGSAPGPDGITLGDVVKMDPEFSRTMEIFNLWLTTGKIPDMVRGCRTVLIPKSSKPDRLKDINNWRPITIGSILLRLFSRIVTARLSKACPLNPRQRGFIRAAGCSENLKLLQTIIWSAKREHRPLGVVFVDIAKAFDTVSHQHIIHALQQREVDPHIVGLVSNMYENISTYITTKRNTHTDKIQIRVGVKQGDPMSPLLFNLAMDPLLCKLEESGKGYHRGQSSITAMAFADDLVLLSDSWENMNTNISILETFCNLTGLKTQGQKCHGFYIKPTKKSYTINDCAAWTINGTPLNMIDPGESEKYLGLQFDPWIGIARSGLSTKLDFWLQRIDQAPLKPLQKTDILKTYTIPRLIYIADHSEVKSALLETLDQKIRTAVKEWLHLPPCTCDAILYSSTRDGGLGITKLAGLIPSVQARRLHRIAQSSDDTMKCFMEKEKMEQLHKKLWIQAGGDRENIPSIWEAPPSSEPPNNVSTNSEWEAPTQKDKFPKPCNWRKNEFKKWTKLASQGRGIVNFERDKISNHWIQYYRRIPHRKLLTALQLRANVYPTREFLARGRQDQYIKACRHCDADNESCAHIIGNCPVTQDARIKRHNYICELLLEEAKKKDWVVFKEPHIRDSNKELYKPDLIFVKDGRALVVDVTVRYEAAKSSLEEAAAEKVRKYKHLETEVRHLTNAKDVTFVGFPLGARGKWHQDNFKLLTELGLSKSRQVKMAETFSTVALFSSVDIVHMFASRARKSMVM

SEQ ID NO: 836 - protein, 1665 aa, synthetic construct
MAPKKKRKVNISGSSCGSPNSADTSSDFKDLWTKLKECHDREVQGLQVKVTKLKQERILDAQRLEEFFTKNQQLREQQKVLHETIKVLEDRLRAGLCDRCAVTEEHMRKKQQEFENIRQQNLKLITELMNERNTLQEENKKLSEQLQQKIENDQQHQAAELECEEDVIPDSPITAFSFSGVNRLRRKENPHVRYIEQTHTKLEHSVCANEMRKVSKSSTHPQHNPNENEILVADTYDQSQSPMAKAHGTSSYTPDKSSFNLATVVAETLGLGVQEESETQGPMSPLGDELYHCLEGNHKKQPFESGSETPGTSESATPEGSPKRKVSSAEGAAKEEPKRRSARLSAKPPAKVEAKPKKAAAKDKSSDKKVQTKGKRGAKGKQAEVANQETKEDLPAENGETKTEESPASDEAGEKEAKSDSGSETPGTSESATPESYEQLAPQPCVGETLHSSLPRDSELFVPEEGSSEKESEDAPKTSPPTPGKHGLEQTGEEKVMVTVPDKNPPCPCCGTRVNSVLNLIEHLKVSHGKRGVCFRCAKCGKENSNYHSVVCHFKKCRGPETEKAPAGEWICEVCNRDFTTKIGLGQHKRLAHPAVRNQERIVASQPKETSNRGAHKRCWTKEEEELLIRLEAQFEGNKNINKLIAEHITTKTAKQISDKRRLLSRKPAEEPREEPGTCHHTRRAAASLRTEPEMSHHAQAEDRDNGPGRRPLPGRAAAGGRTMDEIRRHPDKGNGQQRPTKQKSEEQLQAYYKKTLEERLSAGALNTFPRAFKQVMEGRDIKLVINQTAQDCFGCLESISQIRTATRDKKDTVTREKHPKKPFQKWMKKRAIKKGNYLRFQRLFYLDRGKLAKIILDDIECLSCDIPLSEIYSVFKTRWETTGSFKSLGDFKTYGKADNTAFRELITAKEIEKNVQEMSKGSAPGPDGITLGDVVKMDPEFSRTMEIFNLWLTTGKIPDMVRGCRTVLIPKSSKPDRLKDINNWRPITIGSILLRLFSRIVTARLSKACPLNPRQRGFIRAAGCSENLKLLQTIIWSAKREHRPLGVVFVDIAKAFDTVSHQHIIHALQQREVDPHIVGLVSNMYENISTYITTKRNTHTDKIQIRVGVKQGDPMSPLLFNLAMDPLLCKLEESGKGYHRGQSSITAMAFADDLVLLSDSWENMNTNISILETFCNLTGLKTQGQKCHGFYIKPTKKSYTINDCAAWTINGTPLNMIDPGESEKYLGLQFDPWIGIARSGLSTKLDFWLQRIDQAPLKPLQKTDILKTYTIPRLIYIADHSEVKSALLETLDQKIRTAVKEWLHLPPCTCDAILYSSTRDGGLGITKLAGLIPSVQARRLHRIAQSSDDTMKCFMEKEKMEQLHKKLWIQAGGDRENIPSIWEAPPSSEPPNNVSTNSEWEAPTQKDKTPKPCNWRKNEFKKWTKLASQGRGIVNFERDKISNHWIQYYRRIPHRKLLTALQLRANVYPTREFLARGRQDQYIKACRHCDADNESCAHIIGNCPVTQDARIKRHNYICELLLEEAKKKDWVVFKEPHIRDSNKELYKPDLIFVKDGRALVVDVTVRYEAAKSSLEEAAAEKVRKYKHLETEVRHLTNAKDVTFVGFPLGARGKWHQDNFKLLTELGLSKSRQVKMAETFSTVALFSSVDIVHMFASRARKSMVM

SEQ ID NO: 837 - protein, 1665 aa, synthetic construct
MAPKKKRKVNISGSSCGSPNSADTSSDFKDLWTKLKECHDREVQGLQVKVTKLKQERILDAQRLEEFFTKNQQLREQQKVLHETIKVLEDRLRAGLCDRCAVTEEHMRKKQQEFENIRQQNLKLITELMNERNTLQEENKKLSEQLQQKIENDQQHQAAELECEEDVIPDSPITAFSFSGVNRLRRKENPHVRYIEQTHTKLEHSVCANEMRKVSKSSTHPQHNPNENEILVADTYDQSQSPMAKAHGTSSYTPDKSSFNLATVVAETLGLGVQEESETQGPMSPLGDELYHCLEGNHKKQPFESGSETPGTSESATPEGSPKRKVSSAEGAAKEEPKRRSARLSAKPPAKVEAKPKKAAAKDKSSDKKVQTKGKRGAKGKQAEVANQETKEDLPAENGETKTEESPASDEAGEKEAKSDSGSETPGTSESATPESYEQLAPQPCVGETLHSSLPRDSELFVPEEGSSEKESEDAPKTSPPTPGKHGLEQTGEEKVMVTVPDKNPPCPCCGTRVNSVLNLIEHLKVSHGKRGVCFRCAKCGKENSNYHSVVCHFKKCRGPETEKAPAGEWICEVCNRDFTTKIGLGQHKRLAHPAVRNQERIVASQPKETSNRGAHKRCWTKEEEELLIRLEAQFEGNKNINKLIAEHITTKTAKQISDKRRLLSRKPAEEPREEPGTCHHTRRAAASLRTEPEMSHHAQAEDRDNGPGRRPLPGRAAAGGRTMDEIRRHPDKGNGQQRPTKQKSEEQLQAYYKKTLEERLSAGALNTFPRAFKQVMEGRDIKLVINQTAQDCFGCLESISQIRTATRDKKDTVTREKHPKKPFQKWMKKRAIKKGNYLRFQRLFYLDRGMLAKIILDDIECLSCDIPLSEIYSVFKTRWETTGSFKSLGDFKTYGKADNTAFRELITAKEIEKNVQEMSKGSAPGPDGITLGDVVKMDPEFSRTMEIFNLWLTTGKIPDMVRGCRTVLIPKSSKPDRLKDINNWRPITIGSILLRLFSRIVTARLSKACPLNPRQRGFIRAAGCSENLKLLQTIIWSAKREHRPLGVVFVDIAKAFDTVSHQHIIHALQQREVDPHIVGLVSNMYENISTYITTKRNTHTDKIQIRVGVKQGDPMSPLLFNLAMDPLLCKLEESGKGYHRGQSSITAMAFADDLVLLSDSWENMNTNISILETFCNLTGLKTQGQKCHGFYIKPTKKSYTINDCAAWTINGTPLNMIDPGESEKYLGLQFDPWIGIARSGLSTKLDFWLQRIDQAPLKPLQKTDILKTYTIPRLIYIADHSEVKSALLETLDQKIRTAVKEWLHLPPCTCDAILYSSTRDGGLGITKLAGLIPSVQARRLHRIAQSSDDTMKCFMEKEKMEQLHKKLWIQAGGDRENIPSIWEAPPSSEPPNNVSTNSEWEAPTQKDKFPKPCNWRKNEFKKWTKLASQGRGIVNFERDKISNHWIQYYRRIPHRKLLTALQLRANVYPTREFLARGRQDQYIKACRHCDADNESCAHIIGNCPVTQDARIKRHNYICELLLEEAKKKDWVVFKEPHIRDSNKELYKPDLIFVKDGRALVVDVTVRYEAAKSSLEEAAAEKVRKYKHLETEVRHLTNAKDVTFVGFPLGARGKWHQDNFKLLTELGLSKSRQVKMAETFSTVALFSSVDIVHMFASRARKSMVM

SEQ ID NO: 838 - protein, 1665 aa, synthetic construct
MAPKKKRKVNISGSSCGSPNSADTSSDFKDLWTKLKECHDREVQGLQVKVTKLKQERILDAQRLEEFFTKNQQLREQQKVLHETIKVLEDRLRAGLCDRCAVTEEHMRKKQQEFENIRQQNLKLITELMNERNTLQEENKKLSEQLQQKIENDQQHQAAELECEEDVIPDSPITAFSFSGVNRLRRKENPHVRYIEQTHTKLEHSVCANEMRKVSKSSTHPQHNPNENEILVADTYDQSQSPMAKAHGTSSYTPDKSSFNLATVVAETLGLGVQEESETQGPMSPLGDELYHCLEGNHKKQPFESGSETPGTSESATPEGSPKRKVSSAEGAAKEEPKRRSARLSAKPPAKVEAKPKKAAAKDKSSDKKVQTKGKRGAKGKQAEVANQETKEDLPAENGETKTEESPASDEAGEKEAKSDSGSETPGTSESATPESYEQLAPQPCVGETLHSSLPRDSELFVPEEGSSEKESEDAPKTSPPTPGKHGLEQTGEEKVMVTVPDKNPPCPCCGTRVNSVLNLIEHLKVSHGKRGVCFRCAKCGKENSNYHSVVCHFKKCRGPETEKAPAGEWICEVCNRDFTTKIGLGQHKRLAHPAVRNQERIVASQPKETSNRGAHKRCWTKEEEELLIRLEAQFEGNKNINKLIAEHITTKTAKQISDKRRLLSRKPAEEPREEPGTCHHTRRAAASLRTEPEMSHHAQAEDRDNGPGRRPLPGRAAAGGRTMDEIRRHPDKGNGQQRPTKQKSEEQLQAYYKKTLEERLSAGALNTFPRAFKQVMEGRDIKLVINQTAQDCFGCLESISQIRTATRDKKDTVTREKHPKKPFQKWMKKRAIKKGNYLRFQRLFYLDRGKLAKIILDDIECLSCDIPLSEIYSVFKTRWETTGSFKSLGDFKTYGKADNTAFRELITAKEIEKNVQEMSKGSAPGPDGITLGDVVKMDPEFSRTMEIFNLWLTTGKIPDMVRGCRTVLIPKSSKPDRLKDINNWRPITIGSILLRLFSRIVTARLSKACPLNPRQRGFIRAAGCSENLKLLQTIIWSAKREHRPLGVVFVDIAKAWDTVSHQHIIHALQQREVDPHIVGLVSNMYENISTYITTKRNTHTDKIQIRVGVKQGDPMSPLLFNLAMDPLLCKLEESGKGYHRGQSSITAMAFADDLVLLSDSWENMNTNISILETFCNLTGLKTQGQKCHGFYIKPTKKSYTINDCAAWTINGTPLNMIDPGESEKYLGLQFDPWIGIARSGLSTKLDFWLQRIDQAPLKPLQKTDILKTYTIPRLIYIADHSEVKSALLETLDQKIRTAVKEWLHLPPCTCDAILYSSTRDGGLGITKLAGLIPSVQARRLHRIAQSSDDTMKCFMEKEKMEQLHKKLWIQAGGDRENIPSIWEAPPSSEPPNNVSTNSEWEAPTQKDKFPKPCNWRKNEFKKWTKLASQGRGIVNFERDKISNHWIQYYRRIPHRKLLTALQLRANVYPTREFLARGRQDQYIKACRHCDADNESCAHIIGNCPVTQDARIKRHNYICELLLEEAKKKDWVVFKEPHIRDSNKELYKPDLIFVKDGRALVVDVTVRYEAAKSSLEEAAAEKVRKYKHLETEVRHLTNAKDVTFVGFPLGARGKWHQDNFKLLTELGLSKSRQVKMAETFSTVALFSSVDIVHMFASRARKSMVM

SEQ ID NO: 839 - protein, 1665 aa, synthetic construct
MAPKKKRKVNISGSSCGSPNSADTSSDFKDLWTKLKECHDREVQGLQVKVTKLKQERILDAQRLEEFFTKNQQLREQQKVLHETIKVLEDRLRAGLCDRCAVTEEHMRKKQQEFENIRQQNLKLITELMNERNTLQEENKKLSEQLQQKIENDQQHQAAELECEEDVIPDSPITAFSFSGVNRLRRKENPHVRYIEQTHTKLEHSVCANEMRKVSKSSTHPQHNPNENEILVADTYDQSQSPMAKAHGTSSYTPDKSSFNLATVVAETLGLGVQEESETQGPMSPLGDELYHCLEGNHKKQPFESGSETPGTSESATPEGSPKRKVSSAEGAAKEEPKRRSARLSAKPPAKVEAKPKKAAAKDKSSDKKVQTKGKRGAKGKQAEVANQETKEDLPAENGETKTEESPASDEAGEKEAKSDSGSETPGTSESATPESYEQLAPQPCVGETLHSSLPRDSELFVPEEGSSEKESEDAPKTSPPTPGKHGLEQTGEEKVMVTVPDKNPPCPCCGTRVNSVLNLIEHLKVSHGKRGVCFRCAKCGKENSNYHSVVCHFKKCRGPETEKAPAGEWICEVCNRDFTTKIGLGQHKRLAHPAVRNQERIVASQPKETSNRGAHKRCWTKEEEELLIRLEAQFEGNKNINKLIAEHITTKTAKQISDKRRLLSRKPAEEPREEPGTCHHTRRAAASLRTEPEMSHHAQAEDRDNGPGRRPLPGRAAAGGRTMDEIRRHPDKGNGQQRPTKQKSEEQLQAYYKKTLEERLSAGALNTFPRAFKQVMEGRDIKLVINQTAQDCFGCLESISQIRTATRDKKDTVTREKHPKKPFQKWMKKRAIKKGNYLRFQRLFYLDRGKLAKIILDDIECLSCDIPLSEIYSVFKTRWETTGSFKSLGDFKTYGKADNTAFRELITAKEIEKNVQEMSKGSAPGPDGITLGDVVKMDPEFSRTMEIFNLWLTTGKIPDMVRGCRTVLIPKSSKPDRLKDINNWRPITIGSILLRLFSRIVTARLSKACPLNPRQRGFIRAAGCSENLKLLQTIIWSAKREHRPLGVVFVDIAKAFDTVSHQHIIHALQQREVDPHIVGLVSNMYENISTYITTKRNTHTDKIQIRVGVKQGDPMSPLLFNLAMDPLLCKLEESGKGYHRGQSSITAMAFADDLVLLSDSWENMNTNISILETFCNLTGLKTQGQKCHGFYIKPTKKSYTINDCAAWTINGTPLNMIDPGESEKYLGLQFDPWIGIARSGLSTKLDFWLQRIDQAPLKPLQKTDILKTYTIPRLIYIADHSEVKSALLETLDQKIRTAVKEWLHLPPCTCDAILYSSTRDGGLGITKLAGLIPSVQARRLHRIAQSSDDTMKCFMEKEKMEQLHKKLWIQAGGDRENIPSIWEAPPSSEPPNNVSTNSEWEAPTQKDKFPKPCRWRKNEFKKWTKLASQGRGIVNFERDKISNHWIQYYRRIPHRKLLTALQLRANVYPTREFLARGRQDQYIKACRHCDADNESCAHIIGNCPVTQDARIKRHNYICELLLEEAKKKDWVVFKEPHIRDSNKELYKPDLIFVKDGRALVVDVTVRYEAAKSSLEEAAAEKVRKYKHLETEVRHLTNAKDVTFVGFPLGARGKWHQDNFKLLTELGLSKSRQVKMAETFSTVALFSSVDIVHMFASRARKSMVM

SEQ ID NO: 840 - protein, 1665 aa, synthetic construct
MAPKKKRKVNISGSSCGSPNSADTSSDFKDLWTKLKECHDREVQGLQVKVTKLKQERILDAQRLEEFFTKNQQLREQQKVLHETIKVLEDRLRAGLCDRCAVTEEHMRKKQQEFENIRQQNLKLITELMNERNTLQEENKKLSEQLQQKIENDQQHQAAELECEEDVIPDSPITAFSFSGVNRLRRKENPHVRYIEQTHTKLEHSVCANEMRKVSKSSTHPQHNPNENEILVADTYDQSQSPMAKAHGTSSYTPDKSSFNLATVVAETLGLGVQEESETQGPMSPLGDELYHCLEGNHKKQPFESGSETPGTSESATPEGSPKRKVSSAEGAAKEEPKRRSARLSAKPPAKVEAKPKKAAAKDKSSDKKVQTKGKRGAKGKQAEVANQETKEDLPAENGETKTEESPASDEAGEKEAKSDSGSETPGTSESATPESYEQLAPQPCVGETLHSSLPRDSELFVPEEGSSEKESEDAPKTSPPTPGKHGLEQTGEEKVMVTVPDKNPPCPCCGTRVNSVLNLIEHLKVSHGKRGVCFRCAKCGKENSNYHSVVCHFKKCRGPETEKAPAGEWICEVCNRDFTTKIGLGQHKRLAHPAVRNQERIVASQPKETSNRGAHKRCWTKEEEELLIRLEAQFEGNKNINKLIAEHITTKTAKQISDKRRLLSRKPAEEPREEPGTCHHTRRAAASLRTEPEMSHHAQAEDRDNGPGRRPLPGRAAAGGRTMDEIRRHPDKGNGQQRPTKQKSEEQLQAYYKKTLEERLSAGALNTFPRAFKQVMEGRDIKLVINQTAQDCFGCLESISQIRTATRDKKDTVTREKHPKKPFQKWMKKRAIKKGNYLRFQRLFYLDRGKLAKIILDDIECLSCDIPLSEIYSVFKTRWETTGSFKSLGDFKTYGKADNTAFRELITAKEIEKNVQEMSKGSAPGPDGITLGDVVKMDPEFSRTMEIFNLWLTTGKIPDMVRGCRTVLIPKSSKPDRLKDINNWRPITIGSILLRLFSRIVTARLSKACPLNPRQRGFIRAAGCSENLKLLQTIIWSAKREHRPLGVVFVDIAKAFDTVSHQHIIHALQQREVDPHIVGLVSNMYENISTYITTKRNTHTDKIQIRVGVKQGDPMSPLLFNLAMDPLLCKLEESGKGYHRGQSSITAMAFADDLVLLSDSWENMNTNISILETFCNLTGLKTQGQKCHGFYIKPTKKSYTINDCAAWTINGTPLNMIDPGESEKYLGLQFDPWIGIARSGLSTKLDFWLQRIDQAPLKPLQKTDILKTYTIPRLIYIADHSEVKSALLETLDQKIRTAVKEWLHLPPCTCDAILYSSTRDGGLGITKLAGLIPSVQARRLHRIAQSSDDTMKCFMEKEKMEQLHKKLWIQAGGDRENIPSIWEAPPSSEPPNNVSTNSEWEAPTQKRKFPKPCNWRKNEFKKWTKLASQGRGIVNFERDKISNHWIQYYRRIPHRKLLTALQLRANVYPTREFLARGRQDQYIKACRHCDADNESCAHIIGNCPVTQDARIKRHNYICELLLEEAKKKDWVVFKEPHIRDSNKELYKPDLIFVKDGRALVVDVTVRYEAAKSSLEEAAAEKVRKYKHLETEVRHLTNAKDVTFVGFPLGARGKWHQDNFKLLTELGLSKSRQVKMAETFSTVALFSSVDIVHMFASRARKSMVM

SEQ ID NO: 841 - protein, 1665 aa, synthetic construct
MAPKKKRKVNISGSSCGSPNSADTSSDFKDLWTKLKECHDREVQGLQVKVTKLKQERILDAQRLEEFFTKNQQLREQQKVLHETIKVLEDRLRAGLCDRCAVTEEHMRKKQQEFENIRQQNLKLITELMNERNTLQEENKKLSEQLQQKIENDQQHQAAELECEEDVIPDSPITAFSFSGVNRLRRKENPHVRYIEQTHTKLEHSVCANEMRKVSKSSTHPQHNPNENEILVADTYDQSQSPMAKAHGTSSYTPDKSSFNLATVVAETLGLGVQEESETQGPMSPLGDELYHCLEGNHKKQPFESGSETPGTSESATPEGSPKRKVSSAEGAAKEEPKRRSARLSAKPPAKVEAKPKKAAAKDKSSDKKVQTKGKRGAKGKQAEVANQETKEDLPAENGETKTEESPASDEAGEKEAKSDSGSETPGTSESATPESYEQLAPQPCVGETLHSSLPRDSELFVPEEGSSEKESEDAPKTSPPTPGKHGLEQTGEEKVMVTVPDKNPPCPCCGTRVNSVLNLIEHLKVSHGKRGVCFRCAKCGKENSNYHSVVCHFKKCRGPETEKAPAGEWICEVCNRDFTTKIGLGQHKRLAHPAVRNQERIVASQPKETSNRGAHKRCWTKEEEELLIRLEAQFEGNKNINKLIAEHITTKTAKQISDKRRLLSRKPAEEPREEPGTCHHTRRAAASLRTEPEMSHHAQAEDRDNGPGRRPLPGRAAAGGRTMDEIRRHPDKGNGQQRPTKQKSEEQLQAYYKKTLEERLSAGALNTFPRAFKQVMEGRDIKLVINQTAQDCFGCLESISQIRTATRDKKDTVTREKHPKKPFQKWMKKRAIKKGNYLRFQRLFYLDRGKLAKIILRDIECLSCDIPLSEIYSVFKTRWETTGSFKSLGDFKTYGKADNTAFRELITAKEIEKNVQEMSKGSAPGPDGITLGDVVKMDPEFSRTMEIFNLWLTTGKIPDMVRGCRTVLIPKSSKPDRLKDINNWRPITIGSILLRLFSRIVTARLSKACPLNPRQRGFIRAAGCSENLKLLQTIIWSAKREHRPLGVVFVDIAKAFDTVSHQHIIHALQQREVDPHIVGLVSNMYENISTYITTKRNTHTDKIQIRVGVKQGDPMSPLLFNLAMDPLLCKLEESGKGYHRGQSSITAMAFADDLVLLSDSWENMNTNISILETFCNLTGLKTQGQKCHGFYIKPTKKSYTINDCAAWTINGTPLNMIDPGESEKYLGLQFDPWIGIARSGLSTKLDFWLQRIDQAPLKPLQKTDILKTYTIPRLIYIADHSEVKSALLETLDQKIRTAVKEWLHLPPCTCDAILYSSTRDGGLGITKLAGLIPSVQARRLHRIAQSSDDTMKCFMEKEKMEQLHKKLWIQAGGDRENIPSIWEAPPSSEPPNNVSTNSEWEAPTQKDKFPKPCNWRKNEFKKWTKLASQGRGIVNFERDKISNHWIQYYRRIPHRKLLTALQLRANVYPTREFLARGRQDQYIKACRHCDADNESCAHIIGNCPVTQDARIKRHNYICELLLEEAKKKDWVVFKEPHIRDSNKELYKPDLIFVKDGRALVVDVTVRYEAAKSSLEEAAAEKVRKYKHLETEVRHLTNAKDVTFVGFPLGARGKWHQDNFKLLTELGLSKSRQVKMAETFSTVALFSSVDIVHMFASRARKSMVM

SEQ ID NO: 842 - protein, 1665 aa, synthetic construct
MAPKKKRKVNISGSSCGSPNSADTSSDFKDLWTKLKECHDREVQGLQVKVTKLKQERILDAQRLEEFFTKNQQLREQQKVLHETIKVLEDRLRAGLCDRCAVTEEHMRKKQQEFENIRQQNLKLITELMNERNTLQEENKKLSEQLQQKIENDQQHQAAELECEEDVIPDSPITAFSFSGVNRLRRKENPHVRYIEQTHTKLEHSVCANEMRKVSKSSTHPQHNPNENEILVADTYDQSQSPMAKAHGTSSYTPDKSSFNLATVVAETLGLGVQEESETQGPMSPLGDELYHCLEGNHKKQPFESGSETPGTSESATPEGSPKRKVSSAEGAAKEEPKRRSARLSAKPPAKVEAKPKKAAAKDKSSDKKVQTKGKRGAKGKQAEVANQETKEDLPAENGETKTEESPASDEAGEKEAKSDSGSETPGTSESATPESYEQLAPQPCVGETLHSSLPRDSELFVPEEGSSEKESEDAPKTSPPTPGKHGLEQTGEEKVMVTVPDKNPPCPCCGTRVNSVLNLIEHLKVSHGKRGVCFRCAKCGKENSNYHSVVCHFKKCRGPETEKAPAGEWICEVCNRDFTTKIGLGQHKRLAHPAVRNQERIVASQPKETSNRGAHKRCWTKEEEELLIRLEAQFEGNKNINKLIAEHITTKTAKQISDKRRLLSRKPAEEPREEPGTCHHTRRAAASLRTEPEMSHHAQAEDRDNGPGRRPLPGRAAAGGRTMDEIRRHPDKGNGQQRPTKQKSEEQLQAYYKKTLEERLSAGALNTFPRAFKQVMEGRDIKLVINQTAQDCFGCLESISQIRTATRDKKDTVTREKHPKKPFQKWMKKRAIKKGNYLRFQRLFYLDRGKLAKIILDDIECLSCDIPLSEIYSVFKTRWETTGSFKSLGDFKTYGKADNTAFRELITAKEIEKNVQERSKGSAPGPDGITLGDVVKMDPEFSRTMEIFNLWLTTGKIPDMVRGCRTVLIPKSSKPDRLKDINNWRPITIGSILLRLFSRIVTARLSKACPLNPRQRGFIRAAGCSENLKLLQTIIWSAKREHRPLGVVFVDIAKAFDTVSHQHIIHALQQREVDPHIVGLVSNMYENISTYITTKRNTHTDKIQIRVGVKQGDPMSPLLFNLAMDPLLCKLEESGKGYHRGQSSITAMAFADDLVLLSDSWENMNTNISILETFCNLTGLKTQGQKCHGFYIKPTKKSYTINDCAAWTINGTPLNMIDPGESEKYLGLQFDPWIGIARSGLSTKLDFWLQRIDQAPLKPLQKTDILKTYTIPRLIYIADHSEVKSALLETLDQKIRTAVKEWLHLPPCTCDAILYSSTRDGGLGITKLAGLIPSVQARRLHRIAQSSDDTMKCFMEKEKMEQLHKKLWIQAGGDRENIPSIWEAPPSSEPPNNVSTNSEWEAPTQKDKFPKPCNWRKNEFKKWTKLASQGRGIVNFERDKISNHWIQYYRRIPHRKLLTALQLRANVYPTREFLARGRQDQYIKACRHCDADNESCAHIIGNCPVTQDARIKRHNYICELLLEEAKKKDWVVFKEPHIRDSNKELYKPDLIFVKDGRALVVDVTVRYEAAKSSLEEAAAEKVRKYKHLETEVRHLTNAKDVTFVGFPLGARGKWHQDNFKLLTELGLSKSRQVKMAETFSTVALFSSVDIVHMFASRARKSMVM

SEQ ID NO: 843 - protein, 1665 aa, synthetic construct
MAPKKKRKVNISGSSCGSPNSADTSSDFKDLWTKLKECHDREVQGLQVKVTKLKQERILDAQRLEEFFTKNQQLREQQKVLHETIKVLEDRLRAGLCDRCAVTEEHMRKKQQEFENIRQQNLKLITELMNERNTLQEENKKLSEQLQQKIENDQQHQAAELECEEDVIPDSPITAFSFSGVNRLRRKENPHVRYIEQTHTKLEHSVCANEMRKVSKSSTHPQHNPNENEILVADTYDQSQSPMAKAHGTSSYTPDKSSFNLATVVAETLGLGVQEESETQGPMSPLGDELYHCLEGNHKKQPFESGSETPGTSESATPEGSPKRKVSSAEGAAKEEPKRRSARLSAKPPAKVEAKPKKAAAKDKSSDKKVQTKGKRGAKGKQAEVANQETKEDLPAENGETKTEESPASDEAGEKEAKSDSGSETPGTSESATPESYEQLAPQPCVGETLHSSLPRDSELFVPEEGSSEKESEDAPKTSPPTPGKHGLEQTGEEKVMVTVPDKNPPCPCCGTRVNSVLNLIEHLKVSHGKRGVCFRCAKCGKENSNYHSVVCHFKKCRGPETEKAPAGEWICEVCNRDFTTKIGLGQHKRLAHPAVRNQERIVASQPKETSNRGAHKRCWTKEEEELLIRLEAQFEGNKNINKLIAEHITTKTAKQISDKRRLLSRKPAEEPREEPGTCHHTRRAAASLRTEPEMSHHAQAEDRDNGPGRRPLPGRAAAGGRTMDEIRRHPDKGNGQQRPTKQKSEEQLQAYYKKTLEERLSAGALNTFPRAFKQVMEGRDIKLVINQTAQDCFGCLESISQIRTATRDKKDTVTREKHPKKPFQKWMKKRAIKKGNYLRFQRLFYLDRGKLAKIILDDIECLSCDIPLSEIYSVFKTRWETTGSFKSLGDFKTYGKADNTAFRELITAKEIEKNVQEMSKGSRPGPDGITLGDVVKMDPEFSRTMEIFNLWLTTGKIPDMVRGCRTVLIPKSSKPDRLKDINNWRPITIGSILLRLFSRIVTARLSKACPLNPRQRGFIRAAGCSENLKLLQTIIWSAKREHRPLGVVFVDIAKAFDTVSHQHIIHALQQREVDPHIVGLVSNMYENISTYITTKRNTHTDKIQIRVGVKQGDPMSPLLFNLAMDPLLCKLEESGKGYHRGQSSITAMAFADDLVLLSDSWENMNTNISILETFCNLTGLKTQGQKCHGFYIKPTKKSYTINDCAAWTINGTPLNMIDPGESEKYLGLQFDPWIGIARSGLSTKLDFWLQRIDQAPLKPLQKTDILKTYTIPRLIYIADHSEVKSALLETLDQKIRTAVKEWLHLPPCTCDAILYSSTRDGGLGITKLAGLIPSVQARRLHRIAQSSDDTMKCFMEKEKMEQLHKKLWIQAGGDRENIPSIWEAPPSSEPPNNVSTNSEWEAPTQKDKFPKPCNWRKNEFKKWTKLASQGRGIVNFERDKISNHWIQYYRRIPHRKLLTALQLRANVYPTREFLARGRQDQYIKACRHCDADNESCAHIIGNCPVTQDARIKRHNYICELLLEEAKKKDWVVFKEPHIRDSNKELYKPDLIFVKDGRALVVDVTVRYEAAKSSLEEAAAEKVRKYKHLETEVRHLTNAKDVTFVGFPLGARGKWHQDNFKLLTELGLSKSRQVKMAETFSTVALFSSVDIVHMFASRARKSMVM

SEQ ID NO: 844 - protein, 1665 aa, synthetic construct
MAPKKKRKVNISGSSCGSPNSADTSSDFKDLWTKLKECHDREVQGLQVKVTKLKQERILDAQRLEEFFTKNQQLREQQKVLHETIKVLEDRLRAGLCDRCAVTEEHMRKKQQEFENIRQQNLKLITELMNERNTLQEENKKLSEQLQQKIENDQQHQAAELECEEDVIPDSPITAFSFSGVNRLRRKENPHVRYIEQTHTKLEHSVCANEMRKVSKSSTHPQHNPNENEILVADTYDQSQSPMAKAHGTSSYTPDKSSFNLATVVAETLGLGVQEESETQGPMSPLGDELYHCLEGNHKKQPFESGSETPGTSESATPEGSPKRKVSSAEGAAKEEPKRRSARLSAKPPAKVEAKPKKAAAKDKSSDKKVQTKGKRGAKGKQAEVANQETKEDLPAENGETKTEESPASDEAGEKEAKSDSGSETPGTSESATPESYEQLAPQPCVGETLHSSLPRDSELFVPEEGSSEKESEDAPKTSPPTPGKHGLEQTGEEKVMVTVPDKNPPCPCCGTRVNSVLNLIEHLKVSHGKRGVCFRCAKCGKENSNYHSVVCHFKKCRGPETEKAPAGEWICEVCNRDFTTKIGLGQHKRLAHPAVRNQERIVASQPKETSNRGAHKRCWTKEEEELLIRLEAQFEGNKNINKLIAEHITTKTAKQISDKRRLLSRKPAEEPREEPGTCHHTRRAAASLRTEPEMSHHAQAEDRDNGPGRRPLPGRAAAGGRTMDEIRRHPDKGNGQQRPTKQKSEEQLQAYYKKTLEERLSAGALNTFPRAFKQVMEGRDIKLVINQTAQDCFGCLESISQIRTATRDKKDTVTREKHPKKPFQKWMKKRAIKKGNYLRFQRLFYLDRGKLAKIILDDIECLSCDIPLSEIYSVFKTRWETTGSFKSLGDFKTYGKADNTAFRELITAKEIEKNVQEMSKGSAPGPDGITLGDVVKMDPEFSRTMEIFNLWLTTGKIPDMVRGCRTVLIPKSSKPDRLKDINNWRPITIGSILLRLFSRIVTARLSKACPLNPRQRGFIRAAGCSENLKLLQTIIWSAKREHRPLGVVFVDIAKAFDTVSHQHIIHALQQREVDPHIVGLVSNMYENISTYITTKRNTHTDKIQIRVGVKQGDPMSPLLFNLAMDPLLCKLEESGKGYHRGQSSITAMAFADDLVLLSDSWENMNTNISILETFCNLTGLKTQGQKCHGFYIKPTKKSYTINDCAAWTINGTPLNMIDPGESEKYLGLQFDPWIGIARSGLSTKLDFWLQRIDQAPLKPLQKTDILKTYTIPRLIYIADHSEVKSALLETLDQKIRTAVKEWLHLPPCTCDAILYSSTRDGGLGITKLAGLIPSVQARRLHRIAQSSDDTMKCFMEKEKMEQLHKKLWIQAGGDRENIPSIWEAPPSSEPPNNVSTNSRWEAPTQKDKFPKPCNWRKNEFKKWTKLASQGRGIVNFERDKISNHWIQYYRRIPHRKLLTALQLRANVYPTREFLARGRQDQYIKACRHCDADNESCAHIIGNCPVTQDARIKRHNYICELLLEEAKKKDWVVFKEPHIRDSNKELYKPDLIFVKDGRALVVDVTVRYEAAKSSLEEAAAEKVRKYKHLETEVRHLTNAKDVTFVGFPLGARGKWHQDNFKLLTELGLSKSRQVKMAETFSTVALFSSVDIVHMFASRARKSMVM

SEQ ID NO: 845 - protein, 1665 aa, synthetic construct
MAPKKKRKVNISGSSCGSPNSADTSSDFKDLWTKLKECHDREVQGLQVKVTKLKQERILDAQRLEEFFTKNQQLREQQKVLHETIKVLEDRLRAGLCDRCAVTEEHMRKKQQEFENIRQQNLKLITELMNERNTLQEENKKLSEQLQQKIENDQQHQAAELECEEDVIPDSPITAFSFSGVNRLRRKENPHVRYIEQTHTKLEHSVCANEMRKVSKSSTHPQHNPNENEILVADTYDQSQSPMAKAHGTSSYTPDKSSFNLATVVAETLGLGVQEESETQGPMSPLGDELYHCLEGNHKKQPFESGSETPGTSESATPEGSPKRKVSSAEGAAKEEPKRRSARLSAKPPAKVEAKPKKAAAKDKSSDKKVQTKGKRGAKGKQAEVANQETKEDLPAENGETKTEESPASDEAGEKEAKSDSGSETPGTSESATPESYEQLAPQPCVGETLHSSLPRDSELFVPEEGSSEKESEDAPKTSPPTPGKHGLEQTGEEKVMVTVPDKNPPCPCCGTRVNSVLNLIEHLKVSHGKRGVCFRCAKCGKENSNYHSVVCHFKKCRGPETEKAPAGEWICEVCNRDFTTKIGLGQHKRLAHPAVRNQERIVASQPKETSNRGAHKRCWTKEEEELLIRLEAQFEGNKNINKLIAEHITTKTAKQISDKRRLLSRKPAEEPREEPGTCHHTRRAAASLRTEPEMSHHAQAEDRDNGPGRRPLPGRAAAGGRTMDEIRRHPDKGNGQQRPTKQKSEEQLQAYYKKTLEERLSAGALNTFPRAFKQVMEGRDIKLVINQTAQDCFGCLESISQIRTATRDKKDTVTREKHPKKPFQKWMKKRAIKKGNYLRFQRLFYLDRGKLAKIILDDIECLSCDIPLSEIYSVFKTRWETTGSFKSLGDFKTYGKADNTAFRELITAKEIEKNVQEMSKGSAPGPDGITLGDVVKMDPEFSRTMEIFNLWLTTGKIPDMVRGCRTVLIPKSSKPDRLKDINNWRPITIGSILLRLFSRIVTARLSKACPLNPRQRGFIRAAGCSENLKLLQTIIWSAKREHRPLGVVFVDIAKAFDTVSHQHIIHALQQREVDPHIVGLVSNMYENISTYITTKRNTHTDKIQIRVGVKQGDPMSRLLFNLAMDPLLCKLEESGKGYHRGQSSITAMAFADDLVLLSDSWENMNTNISILETFCNLTGLKTQGQKCHGFYIKPTKKSYTINDCAAWTINGTPLNMIDPGESEKYLGLQFDPWIGIARSGLSTKLDFWLQRIDQAPLKPLQKTDILKTYTIPRLIYIADHSEVKSALLETLDQKIRTAVKEWLHLPPCTCDAILYSSTRDGGLGITKLAGLIPSVQARRLHRIAQSSDDTMKCFMEKEKMEQLHKKLWIQAGGDRENIPSIWEAPPSSEPPNNVSTNSEWEAPTQKDKFPKPCNWRKNEFKKWTKLASQGRGIVNFERDKISNHWIQYYRRIPHRKLLTALQLRANVYPTREFLARGRQDQYIKACRHCDADNESCAHIIGNCPVTQDARIKRHNYICELLLEEAKKKDWVVFKEPHIRDSNKELYKPDLIFVKDGRALVVDVTVRYEAAKSSLEEAAAEKVRKYKHLETEVRHLTNAKDVTFVGFPLGARGKWHQDNFKLLTELGLSKSRQVKMAETFSTVALFSSVDIVHMFASRARKSMVM

SEQ ID NO: 846 - protein, 1665 aa, synthetic construct
MAPKKKRKVNISGSSCGSPNSADTSSDFKDLWTKLKECHDREVQGLQVKVTKLKQERILDAQRLEEFFTKNQQLREQQKVLHETIKVLEDRLRAGLCDRCAVTEEHMRKKQQEFENIRQQNLKLITELMNERNTLQEENKKLSEQLQQKIENDQQHQAAELECEEDVIPDSPITAFSFSGVNRLRRKENPHVRYIEQTHTKLEHSVCANEMRKVSKSSTHPQHNPNENEILVADTYDQSQSPMAKAHGTSSYTPDKSSFNLATVVAETLGLGVQEESETQGPMSPLGDELYHCLEGNHKKQPFESGSETPGTSESATPEGSPKRKVSSAEGAAKEEPKRRSARLSAKPPAKVEAKPKKAAAKDKSSDKKVQTKGKRGAKGKQAEVANQETKEDLPAENGETKTEESPASDEAGEKEAKSDSGSETPGTSESATPESYEQLAPQPCVGETLHSSLPRDSELFVPEEGSSEKESEDAPKTSPPTPGKHGLEQTGEEKVMVTVPDKNPPCPCCGTRVNSVLNLIEHLKVSHGKRGVCFRCAKCGKENSNYHSVVCHFKKCRGPETEKAPAGEWICEVCNRDFTTKIGLGQHKRLAHPAVRNQERIVASQPKETSNRGAHKRCWTKEEEELLIRLEAQFEGNKNINKLIAEHITTKTAKQISDKRRLLSRKPAEEPREEPGTCHHTRRAAASLRTEPEMSHHAQAEDRDNGPGRRPLPGRAAAGGRTMDEIRRHPDKGNGQQRPTKQKSEEQLQAYYKKTLEERLSAGALNTFPRAFKQVMEGRDIKLVINQTAQDCFGCLESISQIRTATRDKKDTVTREKHPKKPFQKWMKKRAIKKGNYLRFQRLFYLDRGKLAKIILDDIECLSCDIPLSEIYSVFKTRWETTGSFKSLGDFKTYGKADNTAFRELITAKEIEKNVQEMSKGSAPGPDGITLGDVVKMDPEFSRTMEIFNLWLTTGKIPDMVRGCRTVLIPKSSKPDRLKDINNWRPITIGSILLRLFSRIVTARLSKACPLNPRQRGFIRAAGCSENLKLLQTIIWSAKREHRPLGVVFVDIAKAFDTVSHQHIIHALQQREVDPHIVGLVSNMYENISTYITTKRNTHTDKIQIRVGVKQGDPMSPLLFNLAMDPLLCKLEESGKGYHRGQSSITAMAFADDLVLLSDSWENMNTNISILETFCNLTGLKTQGQKCHGFYIKPTKKSYTINDCAAWTINGTPLNMIDPGESEKYLGLQFDPWIGIARSGLSTKLDFWLQRIDQAPLKPLQKTDILKTYTIPRLIYIADHSEVKSALLETLDQKIRTAVKEWLHLPPCTCDAILYSSTRDGGLGITKLAGLIPSVQARRLHRIAQSSDDTMKCFMEKEKMEQLHKKLWIQAGGDRENIPSIWEAPPSSEPPNNVSTNSEWEAPTQKDKYPKPCNWRKNEFKKWTKLASQGRGIVNFERDKISNHWIQYYRRIPHRKLLTALQLRANVYPTREFLARGRQDQYIKACRHCDADNESCAHIIGNCPVTQDARIKRHNYICELLLEEAKKKDWVVFKEPHIRDSNKELYKPDLIFVKDGRALVVDVTVRYEAAKSSLEEAAAEKVRKYKHLETEVRHLTNAKDVTFVGFPLGARGKWHQDNFKLLTELGLSKSRQVKMAETFSTVALFSSVDIVHMFASRARKSMVM

SEQ ID NO: 847 - protein, 1665 aa, synthetic construct
MAPKKKRKVNISGSSCGSPNSADTSSDFKDLWTKLKECHDREVQGLQVKVTKLKQERILDAQRLEEFFTKNQQLREQQKVLHETIKVLEDRLRAGLCDRCAVTEEHMRKKQQEFENIRQQNLKLITELMNERNTLQEENKKLSEQLQQKIENDQQHQAAELECEEDVIPDSPITAFSFSGVNRLRRKENPHVRYIEQTHTKLEHSVCANEMRKVSKSSTHPQHNPNENEILVADTYDQSQSPMAKAHGTSSYTPDKSSFNLATVVAETLGLGVQEESETQGPMSPLGDELYHCLEGNHKKQPFESGSETPGTSESATPEGSPKRKVSSAEGAAKEEPKRRSARLSAKPPAKVEAKPKKAAAKDKSSDKKVQTKGKRGAKGKQAEVANQETKEDLPAENGETKTEESPASDEAGEKEAKSDSGSETPGTSESATPESYEQLAPQPCVGETLHSSLPRDSELFVPEEGSSEKESEDAPKTSPPTPGKHGLEQTGEEKVMVTVPDKNPPCPCCGTRVNSVLNLIEHLKVSHGKRGVCFRCAKCGKENSNYHSVVCHFKKCRGPETEKAPAGEWICEVCNRDFTTKIGLGQHKRLAHPAVRNQERIVASQPKETSNRGAHKRCWTKEEEELLIRLEAQFEGNKNINKLIAEHITTKTAKQISDKRRLLSRKPAEEPREEPGTCHHTRRAAASLRTEPEMSHHAQAEDRDNGPGRRPLPGRAAAGGRTMDEIRRHPDKGNGQQRPTKQKSEEQLQAYYKKTLEERLSAGALNTFPRAFKQVMEGRDIKLVINQTAQDCFGCLESISQIRTATRDKKDTVTREKHPKKPFQKWMKKRAIKKGNYLRFQRLFYLDRGKLAKIILDDIECLSCDIPLSEIYSVFKTRWETTGSFKSLGDFKTYGKADNTAFRELITAKEIEKNVQEMSKGSAPGPDGITLGDVVKMDPEFSRTMEIFNLWLTTGKIPDMVRGCRTVLIPKSSKPDRLKDINNWRPITIGSILLRLFSRIVTARLSKACPLNPRQRGFIRAAGKSENLKLLQTIIWSAKREHRPLGVVFVDIAKAFDTVSHQHIIHALQQREVDPHIVGLVSNMYENISTYITTKRNTHTDKIQIRVGVKQGDPMSPLLFNLAMDPLLCKLEESGKGYHRGQSSITAMAFADDLVLLSDSWENMNTNISILETFCNLTGLKTQGQKCHGFYIKPTKKSYTINDCAAWTINGTPLNMIDPGESEKYLGLQFDPWIGIARSGLSTKLDFWLQRIDQAPLKPLQKTDILKTYTIPRLIYIADHSEVKSALLETLDQKIRTAVKEWLHLPPCTCDAILYSSTRDGGLGITKLAGLIPSVQARRLHRIAQSSDDTMKCFMEKEKMEQLHKKLWIQAGGDRENIPSIWEAPPSSEPPNNVSTNSEWEAPTQKDKFPKPCNWRKNEFKKWTKLASQGRGIVNFERDKISNHWIQYYRRIPHRKLLTALQLRANVYPTREFLARGRQDQYIKACRHCDADNESCAHIIGNCPVTQDARIKRHNYICELLLEEAKKKDWVVFKEPHIRDSNKELYKPDLIFVKDGRALVVDVTVRYEAAKSSLEEAAAEKVRKYKHLETEVRHLTNAKDVTFVGFPLGARGKWHQDNFKLLTELGLSKSRQVKMAETFSTVALFSSVDIVHMFASRARKSMVM

SEQ ID NO: 848 - protein, 1665 aa, synthetic construct
MAPKKKRKVNISGSSCGSPNSADTSSDFKDLWTKLKECHDREVQGLQVKVTKLKQERILDAQRLEEFFTKNQQLREQQKVLHETIKVLEDRLRAGLCDRCAVTEEHMRKKQQEFENIRQQNLKLITELMNERNTLQEENKKLSEQLQQKIENDQQHQAAELECEEDVIPDSPITAFSFSGVNRLRRKENPHVRYIEQTHTKLEHSVCANEMRKVSKSSTHPQHNPNENEILVADTYDQSQSPMAKAHGTSSYTPDKSSFNLATVVAETLGLGVQEESETQGPMSPLGDELYHCLEGNHKKQPFESGSETPGTSESATPEGSPKRKVSSAEGAAKEEPKRRSARLSAKPPAKVEAKPKKAAAKDKSSDKKVQTKGKRGAKGKQAEVANQETKEDLPAENGETKTEESPASDEAGEKEAKSDSGSETPGTSESATPESYEQLAPQPCVGETLHSSLPRDSELFVPEEGSSEKESEDAPKTSPPTPGKHGLEQTGEEKVMVTVPDKNPPCPCCGTRVNSVLNLIEHLKVSHGKRGVCFRCAKCGKENSNYHSVVCHFKKCRGPETEKAPAGEWICEVCNRDFTTKIGLGQHKRLAHPAVRNQERIVASQPKETSNRGAHKRCWTKEEEELLIRLEAQFEGNKNINKLIAEHITTKTAKQISDKRRLLSRKPAEEPREEPGTCHHTRRAAASLRTEPEMSHHAQAEDRDNGPGRRPLPGRAAAGGRTMDEIRRHPDKGNGQQRPTKQKSEEQLQAYYKKTLEERLSAGALNTFPRAFKQVMEGRDIKLVINQTAQDCFGCLESISQIRTATRDKKDTVTREKHPKKPFQKWMKKRAIKKGNYLRFQRLFYLDRGKLAKIILDDIECLSCDIPLSEIYSVFKTRWETTGSFKSLGDFKTYGKADNTAFRELITAKEIEKNVQEMSKGSAPGPDGITLGDVVKMDPEFSRTMEIFNLWLTTGKIPDMVRGCRTVLIPKSSKPDRLKDINNWRPITIGSILLRLFSRIVTARLSKACPLNPRQRGFIRAAGCSENLKLLQTIIWSAKREHRPLGVVFVDIAKAFDTVSHQHIIHALQQREVDPHIVGLVSNMYENISTYITTKRNTHTDKIQIRVGVKQGDPMSPLLFNLAMDPLLCKLEESGKGYHRGQSSITAMAFADDLVLLSDSWENMNTNISILETFCNLTGLKTQGQKCHGFYIKPTKKSYTINDCAAWTINGTPLNMIDPGESEKYLGLQFDPWIGIARSGLSTKLDFWLQRIDQAPLKPLQKTDILKTYTIPRLIYIADHSEVKSALLETLDQKIRTAVKEWLHLPPCTCDAILYSSTRDGGLGITKLAGLIPSVQARRLHRIAQSSDDTMKCFMEKEKMEQLHKKLWIQAGGDRENIPSIWEAPPSSEPPNNVSTNSEWEAPTQKDKRPKPCNWRKNEFKKWTKLASQGRGIVNFERDKISNHWIQYYRRIPHRKLLTALQLRANVYPTREFLARGRQDQYIKACRHCDADNESCAHIIGNCPVTQDARIKRHNYICELLLEEAKKKDWVVFKEPHIRDSNKELYKPDLIFVKDGRALVVDVTVRYEAAKSSLEEAAAEKVRKYKHLETEVRHLTNAKDVTFVGFPLGARGKWHQDNFKLLTELGLSKSRQVKMAETFSTVALFSSVDIVHMFASRARKSMVM

SEQ ID NO: 849 - protein, 1665 aa, synthetic construct
MAPKKKRKVNISGSSCGSPNSADTSSDFKDLWTKLKECHDREVQGLQVKVTKLKQERILDAQRLEEFFTKNQQLREQQKVLHETIKVLEDRLRAGLCDRCAVTEEHMRKKQQEFENIRQQNLKLITELMNERNTLQEENKKLSEQLQQKIENDQQHQAAELECEEDVIPDSPITAFSFSGVNRLRRKENPHVRYIEQTHTKLEHSVCANEMRKVSKSSTHPQHNPNENEILVADTYDQSQSPMAKAHGTSSYTPDKSSFNLATVVAETLGLGVQEESETQGPMSPLGDELYHCLEGNHKKQPFESGSETPGTSESATPEGSPKRKVSSAEGAAKEEPKRRSARLSAKPPAKVEAKPKKAAAKDKSSDKKVQTKGKRGAKGKQAEVANQETKEDLPAENGETKTEESPASDEAGEKEAKSDSGSETPGTSESATPESYEQLAPQPCVGETLHSSLPRDSELFVPEEGSSEKESEDAPKTSPPTPGKHGLEQTGEEKVMVTVPDKNPPCPCCGTRVNSVLNLIEHLKVSHGKRGVCFRCAKCGKENSNYHSVVCHFKKCRGPETEKAPAGEWICEVCNRDFTTKIGLGQHKRLAHPAVRNQERIVASQPKETSNRGAHKRCWTKEEEELLIRLEAQFEGNKNINKLIAEHITTKTAKQISDKRRLLSRKPAEEPREEPGTCHHTRRAAASLRTEPEMSHHAQAEDRDNGPGRRPLPGRAAAGGRTMDEIRRHPDKGNGQQRPTKQKSEEQLQAYYKKTLEERLSAGALNTFPRAFKQVMEGRDIKLVINQTAQDCFGCLESISQIRTATRDKKDTVTREKHPKKPFQKWMKKRAIKKGNYLRFQRLFYLDRGKLAKIILDDIECLSCDIPLSEIYSVFKTRWETTGSFKSLGDFKTYGKADNTAFRELITAKEIEKNVQEMSKGSAPGPDGITLGDVVKMDPEFSRTMEIFNLWLTTGKIPDMVRGCRTVLIPKSSKPDRLKDINNWRPITIGSILLRLFSRIVTARLSKACPLNPRQRGFIRAAGCSENLKLLQTIIWSAKREHRPLGVVFVDIAKAFDTVSHQHIIHALQQREVDPHIVGLVSNMYENISTYITTKRNTHTDKIQIRVGVKQGDPMSPLLFNLAMDPLLCKLEESGKGYHRGQSSITAMAFADDLVLLSDSWENMNTNISILETFCNLTGLKTQGQKCHGFYIKPTKKSYTINDCAAWTINGTPLNMIDPGESEKYLGLQFDPWIGIARSGLSTKLDFWLQRIDQAPLKPLQKTDILKTYTIPRLIYIADHSEVKSALLETLDQKIRTAVKEWLHLPPCTCDAILYSSTRDGGLGITKLAGRIPSVQARRLHRIAQSSDDTMKCFMEKEKMEQLHKKLWIQAGGDRENIPSIWEAPPSSEPPNNVSTNSEWEAPTQKDKFPKPCNWRKNEFKKWTKLASQGRGIVNFERDKISNHWIQYYRRIPHRKLLTALQLRANVYPTREFLARGRQDQYIKACRHCDADNESCAHIIGNCPVTQDARIKRHNYICELLLEEAKKKDWVVFKEPHIRDSNKELYKPDLIFVKDGRALVVDVTVRYEAAKSSLEEAAAEKVRKYKHLETEVRHLTNAKDVTFVGFPLGARGKWHQDNFKLLTELGLSKSRQVKMAETFSTVALFSSVDIVHMFASRARKSMVM

SEQ ID NO: 850 - protein, 1665 aa, synthetic construct
MAPKKKRKVNISGSSCGSPNSADTSSDFKDLWTKLKECHDREVQGLQVKVTKLKQERILDAQRLEEFFTKNQQLREQQKVLHETIKVLEDRLRAGLCDRCAVTEEHMRKKQQEFENIRQQNLKLITELMNERNTLQEENKKLSEQLQQKIENDQQHQAAELECEEDVIPDSPITAFSFSGVNRLRRKENPHVRYIEQTHTKLEHSVCANEMRKVSKSSTHPQHNPNENEILVADTYDQSQSPMAKAHGTSSYTPDKSSFNLATVVAETLGLGVQEESETQGPMSPLGDELYHCLEGNHKKQPFESGSETPGTSESATPEGSPKRKVSSAEGAAKEEPKRRSARLSAKPPAKVEAKPKKAAAKDKSSDKKVQTKGKRGAKGKQAEVANQETKEDLPAENGETKTEESPASDEAGEKEAKSDSGSETPGTSESATPESYEQLAPQPCVGETLHSSLPRDSELFVPEEGSSEKESEDAPKTSPPTPGKHGLEQTGEEKVMVTVPDKNPPCPCCGTRVNSVLNLIEHLKVSHGKRGVCFRCAKCGKENSNYHSVVCHFKKCRGPETEKAPAGEWICEVCNRDFTTKIGLGQHKRLAHPAVRNQERIVASQPKETSNRGAHKRCWTKEEEELLIRLEAQFEGNKNINKLIAEHITTKTAKQISDKRRLLSRKPAEEPREEPGTCHHTRRAAASLRTEPEMSHHAQAEDRDNGPGRRPLPGRAAAGGRTMDEIRRHPDKGNGQQRPTKQKSEEQLQAYYKKTLEERLSAGALNTFPRAFKQVMEGRDIKLVINQTAQDCFGCLESISQIRTATRDKKDTVTREKHPKKPFQKWMKKRAIKKGNYLRFQRLFYLDRGKLAKIILDDIECLSCDIPLSEIYSVFKTRWETTGSFKSLGDFKTYGKADNTAFRELITAKEIEKNVQEMSKGSAPGPDGITLGDVVKMDPEFSRTMEIFNLWLTTGKIPDMVRGCRTVLIPKSSKPDRLKDINNWRPITIGSILLRLFSRIVTARLSKACPLNPRQRGFIRAAGCSENLKLLQTIIWSAKREHRPLGVVFVDIAKAFDTVSHQHIIHALQQREVDPHIVGLVSNMYENISTYITTKRNTHTDKIQIRVGVKQGDPMSPLLFNLAMDPLLCKLEESGKGYHRGQSSITAMAFADDLVLLSDSWENMNTNISILETFCNLTGLKTQGQKCHGFYIKPTKKSYTINDCAAWTINGTPLNMIDPGESEKYLGLQFDPWIGIARSGLSTKLDFWLQRIDQAPLKPLQKTDILKTYTIPRLIYIADKSEVKSALLETLDQKIRTAVKEWLHLPPCTCDAILYSSTRDGGLGITKLAGLIPSVQARRLHRIAQSSDDTMKCFMEKEKMEQLHKKLWIQAGGDRENIPSIWEAPPSSEPPNNVSTNSEWEAPTQKDKFPKPCNWRKNEFKKWTKLASQGRGIVNFERDKISNHWIQYYRRIPHRKLLTALQLRANVYPTREFLARGRQDQYIKACRHCDADNESCAHIIGNCPVTQDARIKRHNYICELLLEEAKKKDWVVFKEPHIRDSNKELYKPDLIFVKDGRALVVDVTVRYEAAKSSLEEAAAEKVRKYKHLETEVRHLTNAKDVTFVGFPLGARGKWHQDNFKLLTELGLSKSRQVKMAETFSTVALFSSVDIVHMFASRARKSMVM

SEQ ID NO: 851 - protein, 1665 aa, synthetic construct
MAPKKKRKVNISGSSCGSPNSADTSSDFKDLWTKLKECHDREVQGLQVKVTKLKQERILDAQRLEEFFTKNQQLREQQKVLHETIKVLEDRLRAGLCDRCAVTEEHMRKKQQEFENIRQQNLKLITELMNERNTLQEENKKLSEQLQQKIENDQQHQAAELECEEDVIPDSPITAFSFSGVNRLRRKENPHVRYIEQTHTKLEHSVCANEMRKVSKSSTHPQHNPNENEILVADTYDQSQSPMAKAHGTSSYTPDKSSFNLATVVAETLGLGVQEESETQGPMSPLGDELYHCLEGNHKKQPFESGSETPGTSESATPEGSPKRKVSSAEGAAKEEPKRRSARLSAKPPAKVEAKPKKAAAKDKSSDKKVQTKGKRGAKGKQAEVANQETKEDLPAENGETKTEESPASDEAGEKEAKSDSGSETPGTSESATPESYEQLAPQPCVGETLHSSLPRDSELFVPEEGSSEKESEDAPKTSPPTPGKHGLEQTGEEKVMVTVPDKNPPCPCCGTRVNSVLNLIEHLKVSHGKRGVCFRCAKCGKENSNYHSVVCHFKKCRGPETEKAPAGEWICEVCNRDFTTKIGLGQHKRLAHPAVRNQERIVASQPKETSNRGAHKRCWTKEEEELLIRLEAQFEGNKNINKLIAEHITTKTAKQISDKRRLLSRKPAEEPREEPGTCHHTRRAAASLRTEPEMSHHAQAEDRDNGPGRRPLPGRAAAGGRTMDEIRRHPDKGNGQQRPTKQKSEEQLQAYYKKTLEERLSAGALNTFPRAFKQVMEGRDIKLVINQTAQDCFGCLESISQIRTATRDKKDTVTREKHPKKPFQKWMKKRAIKKGNYLRFQRLFYLDRGKLAKIIKDDIECLSCDIPLSEIYSVFKTRWETTGSFKSLGDFKTYGKADNTAFRELITAKEIEKNVQEMSKGSAPGPDGITLGDVVKMDPEFSRTMEIFNLWLTTGKIPDMVRGCRTVLIPKSSKPDRLKDINNWRPITIGSILLRLFSRIVTARLSKACPLNPRQRGFIRAAGCSENLKLLQTIIWSAKREHRPLGVVFVDIAKAFDTVSHQHIIHALQQREVDPHIVGLVSNMYENISTYITTKRNTHTDKIQIRVGVKQGDPMSPLLFNLAMDPLLCKLEESGKGYHRGQSSITAMAFADDLVLLSDSWENMNTNISILETFCNLTGLKTQGQKCHGFYIKPTKKSYTINDCAAWTINGTPLNMIDPGESEKYLGLQFDPWIGIARSGLSTKLDFWLQRIDQAPLKPLQKTDILKTYTIPRLIYIADHSEVKSALLETLDQKIRTAVKEWLHLPPCTCDAILYSSTRDGGLGITKLAGLIPSVQARRLHRIAQSSDDTMKCFMEKEKMEQLHKKLWIQAGGDRENIPSIWEAPPSSEPPNNVSTNSEWEAPTQKDKFPKPCNWRKNEFKKWTKLASQGRGIVNFERDKISNHWIQYYRRIPHRKLLTALQLRANVYPTREFLARGRQDQYIKACRHCDADNESCAHIIGNCPVTQDARIKRHNYICELLLEEAKKKDWVVFKEPHIRDSNKELYKPDLIFVKDGRALVVDVTVRYEAAKSSLEEAAAEKVRKYKHLETEVRHLTNAKDVTFVGFPLGARGKWHQDNFKLLTELGLSKSRQVKMAETFSTVALFSSVDIVHMFASRARKSMVM

SEQ ID NO: 852 - protein, 1665 aa, synthetic construct
MAPKKKRKVNISGSSCGSPNSADTSSDFKDLWTKLKECHDREVQGLQVKVTKLKQERILDAQRLEEFFTKNQQLREQQKVLHETIKVLEDRLRAGLCDRCAVTEEHMRKKQQEFENIRQQNLKLITELMNERNTLQEENKKLSEQLQQKIENDQQHQAAELECEEDVIPDSPITAFSFSGVNRLRRKENPHVRYIEQTHTKLEHSVCANEMRKVSKSSTHPQHNPNENEILVADTYDQSQSPMAKAHGTSSYTPDKSSFNLATVVAETLGLGVQEESETQGPMSPLGDELYHCLEGNHKKQPFESGSETPGTSESATPEGSPKRKVSSAEGAAKEEPKRRSARLSAKPPAKVEAKPKKAAAKDKSSDKKVQTKGKRGAKGKQAEVANQETKEDLPAENGETKTEESPASDEAGEKEAKSDSGSETPGTSESATPESYEQLAPQPCVGETLHSSLPRDSELFVPEEGSSEKESEDAPKTSPPTPGKHGLEQTGEEKVMVTVPDKNPPCPCCGTRVNSVLNLIEHLKVSHGKRGVCFRCAKCGKENSNYHSVVCHFKKCRGPETEKAPAGEWICEVCNRDFTTKIGLGQHKRLAHPAVRNQERIVASQPKETSNRGAHKRCWTKEEEELLIRLEAQFEGNKNINKLIAEHITTKTAKQISDKRRLLSRKPAEEPREEPGTCHHTRRAAASLRTEPEMSHHAQAEDRDNGPGRRPLPGRAAAGGRTMDEIRRHPDKGNGQQRPTKQKSEEQLQAYYKKTLEERLSAGALNTFPRAFKQVMEGRDIKLVINQTAQDCFGCLESISQIRTATRDKKDTVTREKHPKKPFQKWMKKRAIKKGNYLRFQRLFYLDRGKLAKIILDDIECLSCDIPLSEIYSVFKTRWETTGSFKSLGDFKTYGKADNTAFRELITAKEIEKNVQEMSKGSAPGPDGITLGDVVKMDPEFSRTMEIFNLWLTTGKIPDMVRGCRTVLIPKSSKPDRLKDINNWRPITIGSILLRLFSRIVTARLSKACPLNPRQRGFIRAAGCSENLKLLQTIIWSAKREHRPLGVVFVDIAKAFDTVSHQHIIHALQQREVDPHIVGLVSNMYENISTYITTKRNTHTDKIQIRVGVKQGDPMSPLLFNLAMDPLLCKLEESGKGYHRGQSSITAMARADDLVLLSDSWENMNTNISILETFCNLTGLKTQGQKCHGFYIKPTKKSYTINDCAAWTINGTPLNMIDPGESEKYLGLQFDPWIGIARSGLSTKLDFWLQRIDQAPLKPLQKTDILKTYTIPRLIYIADHSEVKSALLETLDQKIRTAVKEWLHLPPCTCDAILYSSTRDGGLGITKLAGLIPSVQARRLHRIAQSSDDTMKCFMEKEKMEQLHKKLWIQAGGDRENIPSIWEAPPSSEPPNNVSTNSEWEAPTQKDKFPKPCNWRKNEFKKWTKLASQGRGIVNFERDKISNHWIQYYRRIPHRKLLTALQLRANVYPTREFLARGRQDQYIKACRHCDADNESCAHIIGNCPVTQDARIKRHNYICELLLEEAKKKDWVVFKEPHIRDSNKELYKPDLIFVKDGRALVVDVTVRYEAAKSSLEEAAAEKVRKYKHLETEVRHLTNAKDVTFVGFPLGARGKWHQDNFKLLTELGLSKSRQVKMAETFSTVALFSSVDIVHMFASRARKSMVM

SEQ ID NO: 853 - protein, 1665 aa, synthetic construct
MAPKKKRKVNISGSSCGSPNSADTSSDFKDLWTKLKECHDREVQGLQVKVTKLKQERILDAQRLEEFFTKNQQLREQQKVLHETIKVLEDRLRAGLCDRCAVTEEHMRKKQQEFENIRQQNLKLITELMNERNTLQEENKKLSEQLQQKIENDQQHQAAELECEEDVIPDSPITAFSFSGVNRLRRKENPHVRYIEQTHTKLEHSVCANEMRKVSKSSTHPQHNPNENEILVADTYDQSQSPMAKAHGTSSYTPDKSSFNLATVVAETLGLGVQEESETQGPMSPLGDELYHCLEGNHKKQPFESGSETPGTSESATPEGSPKRKVSSAEGAAKEEPKRRSARLSAKPPAKVEAKPKKAAAKDKSSDKKVQTKGKRGAKGKQAEVANQETKEDLPAENGETKTEESPASDEAGEKEAKSDSGSETPGTSESATPESYEQLAPQPCVGETLHSSLPRDSELFVPEEGSSEKESEDAPKTSPPTPGKHGLEQTGEEKVMVTVPDKNPPCPCCGTRVNSVLNLIEHLKVSHGKRGVCFRCAKCGKENSNYHSVVCHFKKCRGPETEKAPAGEWICEVCNRDFTTKIGLGQHKRLAHPAVRNQERIVASQPKETSNRGAHKRCWTKEEEELLIRLEAQFEGNKNINKLIAEHITTKTAKQISDKRRLLSRKPAEEPREEPGTCHHTRRAAASLRTEPEMSHHAQAEDRDNGPGRRPLPGRAAAGGRTMDEIRRHPDKGNGQQRPTKQKSEEQLQAYYKKTLEERLSAGALNTFPRAFKQVMEGRDIKLVINQTAQDCFGCLESISQIRTATRDKKDTVTREKHPKKPFQKWMKKRAIKKGNYLRFQRLFYLDRGKLAKIILDDIECLSCDIPLSEIYSVFKTRWETTGSFKSLGDFKTYGKADNTAFRELITAKEIEKNVQEMSKGSAPGPDGITLGDVVKMDPEFSRTMEIFNLWLTTGKIPDMVRGCRTVLIPKSSKPDRLKDINNWRPITIGSILLRLFSRIVKARLSKACPLNPRQRGFIRAAGCSENLKLLQTIIWSAKREHRPLGVVFVDIAKAFDTVSHQHIIHALQQREVDPHIVGLVSNMYENISTYITTKRNTHTDKIQIRVGVKQGDPMSPLLFNLAMDPLLCKLEESGKGYHRGQSSITAMAFADDLVLLSDSWENMNTNISILETFCNLTGLKTQGQKCHGFYIKPTKKSYTINDCAAWTINGTPLNMIDPGESEKYLGLQFDPWIGIARSGLSTKLDFWLQRIDQAPLKPLQKTDILKTYTIPRLIYIADHSEVKSALLETLDQKIRTAVKEWLHLPPCTCDAILYSSTRDGGLGITKLAGLIPSVQARRLHRIAQSSDDTMKCFMEKEKMEQLHKKLWIQAGGDRENIPSIWEAPPSSEPPNNVSTNSEWEAPTQKDKFPKPCNWRKNEFKKWTKLASQGRGIVNFERDKISNHWIQYYRRIPHRKLLTALQLRANVYPTREFLARGRQDQYIKACRHCDADNESCAHIIGNCPVTQDARIKRHNYICELLLEEAKKKDWVVFKEPHIRDSNKELYKPDLIFVKDGRALVVDVTVRYEAAKSSLEEAAAEKVRKYKHLETEVRHLTNAKDVTFVGFPLGARGKWHQDNFKLLTELGLSKSRQVKMAETFSTVALFSSVDIVHMFASRARKSMVM

SEQ ID NO: 854 - protein, 1665 aa, synthetic construct
MAPKKKRKVNISGSSCGSPNSADTSSDFKDLWTKLKECHDREVQGLQVKVTKLKQERILDAQRLEEFFTKNQQLREQQKVLHETIKVLEDRLRAGLCDRCAVTEEHMRKKQQEFENIRQQNLKLITELMNERNTLQEENKKLSEQLQQKIENDQQHQAAELECEEDVIPDSPITAFSFSGVNRLRRKENPHVRYIEQTHTKLEHSVCANEMRKVSKSSTHPQHNPNENEILVADTYDQSQSPMAKAHGTSSYTPDKSSFNLATVVAETLGLGVQEESETQGPMSPLGDELYHCLEGNHKKQPFESGSETPGTSESATPEGSPKRKVSSAEGAAKEEPKRRSARLSAKPPAKVEAKPKKAAAKDKSSDKKVQTKGKRGAKGKQAEVANQETKEDLPAENGETKTEESPASDEAGEKEAKSDSGSETPGTSESATPESYEQLAPQPCVGETLHSSLPRDSELFVPEEGSSEKESEDAPKTSPPTPGKHGLEQTGEEKVMVTVPDKNPPCPCCGTRVNSVLNLIEHLKVSHGKRGVCFRCAKCGKENSNYHSVVCHFKKCRGPETEKAPAGEWICEVCNRDFTTKIGLGQHKRLAHPAVRNQERIVASQPKETSNRGAHKRCWTKEEEELLIRLEAQFEGNKNINKLIAEHITTKTAKQISDKRRLLSRKPAEEPREEPGTCHHTRRAAASLRTEPEMSHHAQAEDRDNGPGRRPLPGRAAAGGRTMDEIRRHPDKGNGQQRPTKQKSEEQLQAYYKKTLEERLSAGALNTFPRAFKQVMEGRDIKLVINQTAQDCFGCLESISQIRTATRDKKDTVTREKHPKKPFQKWMKKRAIKKGNYLRFQRLFYLDRGKLAKIILDDIECLSCDIPLSEIYSVFKTRWETTGSFKSLGDFKTYGKADNTAFRELITAKEIEKNVQEMSKGSAPGPDGITLGDVVKMDPEFSRTMEIFNLWLTTGKIPDMVRGCRTVLIPKSSKPDRLKDINNWRPITIGSILLRLFSRIVTARLSKACPLNPRQRGFIRAAGCSENLKLLQTIIWSAKREHRPLGVVFVDIAKAFDTVSHQHIIHALQQREVDPHIVGLVSNMYENISTYITTKRNTHTDKIQIRVGVKQGDPMSPLLFNLAMDPLLCKLEESGKGYHRGQSSITAMAFADDLVLLSDSWENMNTNISILETFCNLTGLKTQGQKCHGFYIKPTKKSYTINDCAAWTINGTPLNMIDPGESEKYLGLQFDPWIGIARSGLSTKLDFWLQRIDQAPLKPLQKTDILKTYTIPRLIYIADHSEVKSALLETLDQKIRTAVKEWLHLPPCTCDAILYSSTRDGGLGITKLAGLIPSVQARRLHRIAQSSDDTMKCFMEKEKMEQLHKKLWIQAGGDRENIPSIWEAPPSSEKPNNVSTNSEWEAPTQKDKFPKPCNWRKNEFKKWTKLASQGRGIVNFERDKISNHWIQYYRRIPHRKLLTALQLRANVYPTREFLARGRQDQYIKACRHCDADNESCAHIIGNCPVTQDARIKRHNYICELLLEEAKKKDWVVFKEPHIRDSNKELYKPDLIFVKDGRALVVDVTVRYEAAKSSLEEAAAEKVRKYKHLETEVRHLTNAKDVTFVGFPLGARGKWHQDNFKLLTELGLSKSRQVKMAETFSTVALFSSVDIVHMFASRARKSMVM

SEQ ID NO: 855 - protein, 1665 aa, synthetic construct
MAPKKKRKVNISGSSCGSPNSADTSSDFKDLWTKLKECHDREVQGLQVKVTKLKQERILDAQRLEEFFTKNQQLREQQKVLHETIKVLEDRLRAGLCDRCAVTEEHMRKKQQEFENIRQQNLKLITELMNERNTLQEENKKLSEQLQQKIENDQQHQAAELECEEDVIPDSPITAFSFSGVNRLRRKENPHVRYIEQTHTKLEHSVCANEMRKVSKSSTHPQHNPNENEILVADTYDQSQSPMAKAHGTSSYTPDKSSFNLATVVAETLGLGVQEESETQGPMSPLGDELYHCLEGNHKKQPFESGSETPGTSESATPEGSPKRKVSSAEGAAKEEPKRRSARLSAKPPAKVEAKPKKAAAKDKSSDKKVQTKGKRGAKGKQAEVANQETKEDLPAENGETKTEESPASDEAGEKEAKSDSGSETPGTSESATPESYEQLAPQPCVGETLHSSLPRDSELFVPEEGSSEKESEDAPKTSPPTPGKHGLEQTGEEKVMVTVPDKNPPCPCCGTRVNSVKNLIEHLKVSHGKRGVCFRCAKCGKENSNYHSVVCHFKKCRGPETEKAPAGEWICEVCNRDFTTKIGLGQHKRLAHPAVRNQERIVASQPKETSNRGAHKRCWTKEEEELLIRLEAQFEGNKNINKLIAEHITTKTAKQISDKRRLLSRKPAEEPREEPGTCHHTRRAAASLRTEPEMSHHAQAEDRDNGPGRRPLPGRAAAGGRTMDEIRRHPDKGNGQQRPTKQKSEEQLQAYYKKTLEERLSAGALNTFPRAFKQVMEGRDIKLVINQTAQDCFGCLESISQIRTATRDKKDTVTREKHPKKPFQKWMKKRAIKKGNYLRFQRLFYLDRGKLAKIILDDIECLSCDIPLSEIYSVFKTRWETTGSFKSLGDFKTYGKADNTAFRELITAKEIEKNVQEMSKGSAPGPDGITLGDVVKMDPEFSRTMEIFNLWLTTGKIPDMVRGCRTVLIPKSSKPDRLKDINNWRPITIGSILLRLFSRIVTARLSKACPLNPRQRGFIRAAGCSENLKLLQTIIWSAKREHRPLGVVFVDIAKAFDTVSHQHIIHALQQREVDPHIVGLVSNMYENISTYITTKRNTHTDKIQIRVGVKQGDPMSPLLFNLAMDPLLCKLEESGKGYHRGQSSITAMAFADDLVLLSDSWENMNTNISILETFCNLTGLKTQGQKCHGFYIKPTKKSYTINDCAAWTINGTPLNMIDPGESEKYLGLQFDPWIGIARSGLSTKLDFWLQRIDQAPLKPLQKTDILKTYTIPRLIYIADHSEVKSALLETLDQKIRTAVKEWLHLPPCTCDAILYSSTRDGGLGITKLAGLIPSVQARRLHRIAQSSDDTMKCFMEKEKMEQLHKKLWIQAGGDRENIPSIWEAPPSSEPPNNVSTNSEWEAPTQKDKFPKPCNWRKNEFKKWTKLASQGRGIVNFERDKISNHWIQYYRRIPHRKLLTALQLRANVYPTREFLARGRQDQYIKACRHCDADNESCAHIIGNCPVTQDARIKRHNYICELLLEEAKKKDWVVFKEPHIRDSNKELYKPDLIFVKDGRALVVDVTVRYEAAKSSLEEAAAEKVRKYKHLETEVRHLTNAKDVTFVGFPLGARGKWHQDNFKLLTELGLSKSRQVKMAETFSTVALFSSVDIVHMFASRARKSMVM

SEQ ID NO: 856 - protein, 1665 aa, synthetic construct
MAPKKKRKVNISGSSCGSPNSADTSSDFKDLWTKLKECHDREVQGLQVKVTKLKQERILDAQRLEEFFTKNQQLREQQKVLHETIKVLEDRLRAGLCDRCAVTEEHMRKKQQEFENIRQQNLKLITELMNERNTLQEENKKLSEQLQQKIENDQQHQAAELECEEDVIPDSPITAFSFSGVNRLRRKENPHVRYIEQTHTKLEHSVCANEMRKVSKSSTHPQHNPNENEILVADTYDQSQSPMAKAHGTSSYTPDKSSFNLATVVAETLGLGVQEESETQGPMSPLGDELYHCLEGNHKKQPFESGSETPGTSESATPEGSPKRKVSSAEGAAKEEPKRRSARLSAKPPAKVEAKPKKAAAKDKSSDKKVQTKGKRGAKGKQAEVANQETKEDLPAENGETKTEESPASDEAGEKEAKSDSGSETPGTSESATPESYEQLAPQPCVGETLHSSLPRDSELFVPEEGSSEKESEDAPKTSPPTPGKHGLEQTGEEKVMVTVPDKNPPCPCCGTRVNSVLNLIKHLKVSHGKRGVCFRCAKCGKENSNYHSVVCHFKKCRGPETEKAPAGEWICEVCNRDFTTKIGLGQHKRLAHPAVRNQERIVASQPKETSNRGAHKRCWTKEEEELLIRLEAQFEGNKNINKLIAEHITTKTAKQISDKRRLLSRKPAEEPREEPGTCHHTRRAAASLRTEPEMSHHAQAEDRDNGPGRRPLPGRAAAGGRTMDEIRRHPDKGNGQQRPTKQKSEEQLQAYYKKTLEERLSAGALNTFPRAFKQVMEGRDIKLVINQTAQDCFGCLESISQIRTATRDKKDTVTREKHPKKPFQKWMKKRAIKKGNYLRFQRLFYLDRGKLAKIILDDIECLSCDIPLSEIYSVFKTRWETTGSFKSLGDFKTYGKADNTAFRELITAKEIEKNVQEMSKGSAPGPDGITLGDVVKMDPEFSRTMEIFNLWLTTGKIPDMVRGCRTVLIPKSSKPDRLKDINNWRPITIGSILLRLFSRIVTARLSKACPLNPRQRGFIRAAGCSENLKLLQTIIWSAKREHRPLGVVFVDIAKAFDTVSHQHIIHALQQREVDPHIVGLVSNMYENISTYITTKRNTHTDKIQIRVGVKQGDPMSPLLFNLAMDPLLCKLEESGKGYHRGQSSITAMAFADDLVLLSDSWENMNTNISILETFCNLTGLKTQGQKCHGFYIKPTKKSYTINDCAAWTINGTPLNMIDPGESEKYLGLQFDPWIGIARSGLSTKLDFWLQRIDQAPLKPLQKTDILKTYTIPRLIYIADHSEVKSALLETLDQKIRTAVKEWLHLPPCTCDAILYSSTRDGGLGITKLAGLIPSVQARRLHRIAQSSDDTMKCFMEKEKMEQLHKKLWIQAGGDRENIPSIWEAPPSSEPPNNVSTNSEWEAPTQKDKFPKPCNWRKNEFKKWTKLASQGRGIVNFERDKISNHWIQYYRRIPHRKLLTALQLRANVYPTREFLARGRQDQYIKACRHCDADNESCAHIIGNCPVTQDARIKRHNYICELLLEEAKKKDWVVFKEPHIRDSNKELYKPDLIFVKDGRALVVDVTVRYEAAKSSLEEAAAEKVRKYKHLETEVRHLTNAKDVTFVGFPLGARGKWHQDNFKLLTELGLSKSRQVKMAETFSTVALFSSVDIVHMFASRARKSMVM

SEQ ID NO: 857 - protein, 1665 aa, synthetic construct
MAPKKKRKVNISGSSCGSPNSADTSSDFKDLWTKLKECHDREVQGLQVKVTKLKQERILDAQRLEEFFTKNQQLREQQKVLHETIKVLEDRLRAGLCDRCAVTEEHMRKKQQEFENIRQQNLKLITELMNERNTLQEENKKLSEQLQQKIENDQQHQAAELECEEDVIPDSPITAFSFSGVNRLRRKENPHVRYIEQTHTKLEHSVCANEMRKVSKSSTHPQHNPNENEILVADTYDQSQSPMAKAHGTSSYTPDKSSFNLATVVAETLGLGVQEESETQGPMSPLGDELYHCLEGNHKKQPFESGSETPGTSESATPEGSPKRKVSSAEGAAKEEPKRRSARLSAKPPAKVEAKPKKAAAKDKSSDKKVQTKGKRGAKGKQAEVANQETKEDLPAENGETKTEESPASDEAGEKEAKSDSGSETPGTSESATPESYEQLAPQPCVGETLHSSLPRDSELFVPEEGSSEKESEDAPKTSPPTPGKHGLEQTGEEKVMVTVPDKNPPCPCCGTRVNSVLNLIEHFKVSHGKRGVCFRCAKCGKENSNYHSVVCHFKKCRGPETEKAPAGEWICEVCNRDFTTKIGLGQHKRLAHPAVRNQERIVASQPKETSNRGAHKRCWTKEEEELLIRLEAQFEGNKNINKLIAEHITTKTAKQISDKRRLLSRKPAEEPREEPGTCHHTRRAAASLRTEPEMSHHAQAEDRDNGPGRRPLPGRAAAGGRTMDEIRRHPDKGNGQQRPTKQKSEEQLQAYYKKTLEERLSAGALNTFPRAFKQVMEGRDIKLVINQTAQDCFGCLESISQIRTATRDKKDTVTREKHPKKPFQKWMKKRAIKKGNYLRFQRLFYLDRGKLAKIILDDIECLSCDIPLSEIYSVFKTRWETTGSFKSLGDFKTYGKADNTAFRELITAKEIEKNVQEMSKGSAPGPDGITLGDVVKMDPEFSRTMEIFNLWLTTGKIPDMVRGCRTVLIPKSSKPDRLKDINNWRPITIGSILLRLFSRIVTARLSKACPLNPRQRGFIRAAGCSENLKLLQTIIWSAKREHRPLGVVFVDIAKAFDTVSHQHIIHALQQREVDPHIVGLVSNMYENISTYITTKRNTHTDKIQIRVGVKQGDPMSPLLFNLAMDPLLCKLEESGKGYHRGQSSITAMAFADDLVLLSDSWENMNTNISILETFCNLTGLKTQGQKCHGFYIKPTKKSYTINDCAAWTINGTPLNMIDPGESEKYLGLQFDPWIGIARSGLSTKLDFWLQRIDQAPLKPLQKTDILKTYTIPRLIYIADHSEVKSALLETLDQKIRTAVKEWLHLPPCTCDAILYSSTRDGGLGITKLAGLIPSVQARRLHRIAQSSDDTMKCFMEKEKMEQLHKKLWIQAGGDRENIPSIWEAPPSSEPPNNVSTNSEWEAPTQKDKFPKPCNWRKNEFKKWTKLASQGRGIVNFERDKISNHWIQYYRRIPHRKLLTALQLRANVYPTREFLARGRQDQYIKACRHCDADNESCAHIIGNCPVTQDARIKRHNYICELLLEEAKKKDWVVFKEPHIRDSNKELYKPDLIFVKDGRALVVDVTVRYEAAKSSLEEAAAEKVRKYKHLETEVRHLTNAKDVTFVGFPLGARGKWHQDNFKLLTELGLSKSRQVKMAETFSTVALFSSVDIVHMFASRARKSMVM

SEQ ID NO: 858 - protein, 1665 aa, synthetic construct
MAPKKKRKVNISGSSCGSPNSADTSSDFKDLWTKLKECHDREVQGLQVKVTKLKQERILDAQRLEEFFTKNQQLREQQKVLHETIKVLEDRLRAGLCDRCAVTEEHMRKKQQEFENIRQQNLKLITELMNERNTLQEENKKLSEQLQQKIENDQQHQAAELECEEDVIPDSPITAFSFSGVNRLRRKENPHVRYIEQTHTKLEHSVCANEMRKVSKSSTHPQHNPNENEILVADTYDQSQSPMAKAHGTSSYTPDKSSFNLATVVAETLGLGVQEESETQGPMSPLGDELYHCLEGNHKKQPFESGSETPGTSESATPEGSPKRKVSSAEGAAKEEPKRRSARLSAKPPAKVEAKPKKAAAKDKSSDKKVQTKGKRGAKGKQAEVANQETKEDLPAENGETKTEESPASDEAGEKEAKSDSGSETPGTSESATPESYEQLAPQPCVGETLHSSLPRDSELFVPEEGSSEKESEDAPKTSPPTPGKHGLEQTGEEKVMVTVPDKNPPCPCCGTRVNSVLNLIEHLKVSHGRRGVCFRCAKCGKENSNYHSVVCHFKKCRGPETEKAPAGEWICEVCNRDFTTKIGLGQHKRLAHPAVRNQERIVASQPKETSNRGAHKRCWTKEEEELLIRLEAQFEGNKNINKLIAEHITTKTAKQISDKRRLLSRKPAEEPREEPGTCHHTRRAAASLRTEPEMSHHAQAEDRDNGPGRRPLPGRAAAGGRTMDEIRRHPDKGNGQQRPTKQKSEEQLQAYYKKTLEERLSAGALNTFPRAFKQVMEGRDIKLVINQTAQDCFGCLESISQIRTATRDKKDTVTREKHPKKPFQKWMKKRAIKKGNYLRFQRLFYLDRGKLAKIILDDIECLSCDIPLSEIYSVFKTRWETTGSFKSLGDFKTYGKADNTAFRELITAKEIEKNVQEMSKGSAPGPDGITLGDVVKMDPEFSRTMEIFNLWLTTGKIPDMVRGCRTVLIPKSSKPDRLKDINNWRPITIGSILLRLFSRIVTARLSKACPLNPRQRGFIRAAGCSENLKLLQTIIWSAKREHRPLGVVFVDIAKAFDTVSHQHIIHALQQREVDPHIVGLVSNMYENISTYITTKRNTHTDKIQIRVGVKQGDPMSPLLFNLAMDPLLCKLEESGKGYHRGQSSITAMAFADDLVLLSDSWENMNTNISILETFCNLTGLKTQGQKCHGFYIKPTKKSYTINDCAAWTINGTPLNMIDPGESEKYLGLQFDPWIGIARSGLSTKLDFWLQRIDQAPLKPLQKTDILKTYTIPRLIYIADHSEVKSALLETLDQKIRTAVKEWLHLPPCTCDAILYSSTRDGGLGITKLAGLIPSVQARRLHRIAQSSDDTMKCFMEKEKMEQLHKKLWIQAGGDRENIPSIWEAPPSSEPPNNVSTNSEWEAPTQKDKFPKPCNWRKNEFKKWTKLASQGRGIVNFERDKISNHWIQYYRRIPHRKLLTALQLRANVYPTREFLARGRQDQYIKACRHCDADNESCAHIIGNCPVTQDARIKRHNYICELLLEEAKKKDWVVFKEPHIRDSNKELYKPDLIFVKDGRALVVDVTVRYEAAKSSLEEAAAEKVRKYKHLETEVRHLTNAKDVTFVGFPLGARGKWHQDNFKLLTELGLSKSRQVKMAETFSTVALFSSVDIVHMFASRARKSMVM

SEQ ID NO: 859 - protein, 1665 aa, synthetic construct
MAPKKKRKVNISGSSCGSPNSADTSSDFKDLWTKLKECHDREVQGLQVKVTKLKQERILDAQRLEEFFTKNQQLREQQKVLHETIKVLEDRLRAGLCDRCAVTEEHMRKKQQEFENIRQQNLKLITELMNERNTLQEENKKLSEQLQQKIENDQQHQAAELECEEDVIPDSPITAFSFSGVNRLRRKENPHVRYIEQTHTKLEHSVCANEMRKVSKSSTHPQHNPNENEILVADTYDQSQSPMAKAHGTSSYTPDKSSFNLATVVAETLGLGVQEESETQGPMSPLGDELYHCLEGNHKKQPFESGSETPGTSESATPEGSPKRKVSSAEGAAKEEPKRRSARLSAKPPAKVEAKPKKAAAKDKSSDKKVQTKGKRGAKGKQAEVANQETKEDLPAENGETKTEESPASDEAGEKEAKSDSGSETPGTSESATPESYEQLAPQPCVGETLHSSLPRDSELFVPEEGSSEKESEDAPKTSPPTPGKHGLEQTGEEKVMVTVPDKNPPCPCCGTRVNSVLNLIEHLKVSHGKRGICFRCAKCGKENSNYHSVVCHFKKCRGPETEKAPAGEWICEVCNRDFTTKIGLGQHKRLAHPAVRNQERIVASQPKETSNRGAHKRCWTKEEEELLIRLEAQFEGNKNINKLIAEHITTKTAKQISDKRRLLSRKPAEEPREEPGTCHHTRRAAASLRTEPEMSHHAQAEDRDNGPGRRPLPGRAAAGGRTMDEIRRHPDKGNGQQRPTKQKSEEQLQAYYKKTLEERLSAGALNTFPRAFKQVMEGRDIKLVINQTAQDCFGCLESISQIRTATRDKKDTVTREKHPKKPFQKWMKKRAIKKGNYLRFQRLFYLDRGKLAKIILDDIECLSCDIPLSEIYSVFKTRWETTGSFKSLGDFKTYGKADNTAFRELITAKEIEKNVQEMSKGSAPGPDGITLGDVVKMDPEFSRTMEIFNLWLTTGKIPDMVRGCRTVLIPKSSKPDRLKDINNWRPITIGSILLRLFSRIVTARLSKACPLNPRQRGFIRAAGCSENLKLLQTIIWSAKREHRPLGVVFVDIAKAFDTVSHQHIIHALQQREVDPHIVGLVSNMYENISTYITTKRNTHTDKIQIRVGVKQGDPMSPLLFNLAMDPLLCKLEESGKGYHRGQSSITAMAFADDLVLLSDSWENMNTNISILETFCNLTGLKTQGQKCHGFYIKPTKKSYTINDCAAWTINGTPLNMIDPGESEKYLGLQFDPWIGIARSGLSTKLDFWLQRIDQAPLKPLQKTDILKTYTIPRLIYIADHSEVKSALLETLDQKIRTAVKEWLHLPPCTCDAILYSSTRDGGLGITKLAGLIPSVQARRLHRIAQSSDDTMKCFMEKEKMEQLHKKLWIQAGGDRENIPSIWEAPPSSEPPNNVSTNSEWEAPTQKDKFPKPCNWRKNEFKKWTKLASQGRGIVNFERDKISNHWIQYYRRIPHRKLLTALQLRANVYPTREFLARGRQDQYIKACRHCDADNESCAHIIGNCPVTQDARIKRHNYICELLLEEAKKKDWVVFKEPHIRDSNKELYKPDLIFVKDGRALVVDVTVRYEAAKSSLEEAAAEKVRKYKHLETEVRHLTNAKDVTFVGFPLGARGKWHQDNFKLLTELGLSKSRQVKMAETFSTVALFSSVDIVHMFASRARKSMVM

SEQ ID NO: 860 - protein, 1665 aa, synthetic construct
MAPKKKRKVNISGSSCGSPNSADTSSDFKDLWTKLKECHDREVQGLQVKVTKLKQERILDAQRLEEFFTKNQQLREQQKVLHETIKVLEDRLRAGLCDRCAVTEEHMRKKQQEFENIRQQNLKLITELMNERNTLQEENKKLSEQLQQKIENDQQHQAAELECEEDVIPDSPITAFSFSGVNRLRRKENPHVRYIEQTHTKLEHSVCANEMRKVSKSSTHPQHNPNENEILVADTYDQSQSPMAKAHGTSSYTPDKSSFNLATVVAETLGLGVQEESETQGPMSPLGDELYHCLEGNHKKQPFESGSETPGTSESATPEGSPKRKVSSAEGAAKEEPKRRSARLSAKPPAKVEAKPKKAAAKDKSSDKKVQTKGKRGAKGKQAEVANQETKEDLPAENGETKTEESPASDEAGEKEAKSDSGSETPGTSESATPESYEQLAPQPCVGETLHSSLPRDSELFVPEEGSSEKESEDAPKTSPPTPGKHGLEQTGEEKVMVTVPDKNPPCPCCGTRVNSVLNLIEHLKVSHGKRGVCYRCAKCGKENSNYHSVVCHFKKCRGPETEKAPAGEWICEVCNRDFTTKIGLGQHKRLAHPAVRNQERIVASQPKETSNRGAHKRCWTKEEEELLIRLEAQFEGNKNINKLIAEHITTKTAKQISDKRRLLSRKPAEEPREEPGTCHHTRRAAASLRTEPEMSHHAQAEDRDNGPGRRPLPGRAAAGGRTMDEIRRHPDKGNGQQRPTKQKSEEQLQAYYKKTLEERLSAGALNTFPRAFKQVMEGRDIKLVINQTAQDCFGCLESISQIRTATRDKKDTVTREKHPKKPFQKWMKKRAIKKGNYLRFQRLFYLDRGKLAKIILDDIECLSCDIPLSEIYSVFKTRWETTGSFKSLGDFKTYGKADNTAFRELITAKEIEKNVQEMSKGSAPGPDGITLGDVVKMDPEFSRTMEIFNLWLTTGKIPDMVRGCRTVLIPKSSKPDRLKDINNWRPITIGSILLRLFSRIVTARLSKACPLNPRQRGFIRAAGCSENLKLLQTIIWSAKREHRPLGVVFVDIAKAFDTVSHQHIIHALQQREVDPHIVGLVSNMYENISTYITTKRNTHTDKIQIRVGVKQGDPMSPLLFNLAMDPLLCKLEESGKGYHRGQSSITAMAFADDLVLLSDSWENMNTNISILETFCNLTGLKTQGQKCHGFYIKPTKKSYTINDCAAWTINGTPLNMIDPGESEKYLGLQFDPWIGIARSGLSTKLDFWLQRIDQAPLKPLQKTDILKTYTIPRLIYIADHSEVKSALLETLDQKIRTAVKEWLHLPPCTCDAILYSSTRDGGLGITKLAGLIPSVQARRLHRIAQSSDDTMKCFMEKEKMEQLHKKLWIQAGGDRENIPSIWEAPPSSEPPNNVSTNSEWEAPTQKDKFPKPCNWRKNEFKKWTKLASQGRGIVNFERDKISNHWIQYYRRIPHRKLLTALQLRANVYPTREFLARGRQDQYIKACRHCDADNESCAHIIGNCPVTQDARIKRHNYICELLLEEAKKKDWVVFKEPHIRDSNKELYKPDLIFVKDGRALVVDVTVRYEAAKSSLEEAAAEKVRKYKHLETEVRHLTNAKDVTFVGFPLGARGKWHQDNFKLLTELGLSKSRQVKMAETFSTVALFSSVDIVHMFASRARKSMVM

SEQ ID NO: 861 - protein, 1665 aa, synthetic construct
MAPKKKRKVNISGSSCGSPNSADTSSDFKDLWTKLKECHDREVQGLQVKVTKLKQERILDAQRLEEFFTKNQQLREQQKVLHETIKVLEDRLRAGLCDRCAVTEEHMRKKQQEFENIRQQNLKLITELMNERNTLQEENKKLSEQLQQKIENDQQHQAAELECEEDVIPDSPITAFSFSGVNRLRRKENPHVRYIEQTHTKLEHSVCANEMRKVSKSSTHPQHNPNENEILVADTYDQSQSPMAKAHGTSSYTPDKSSFNLATVVAETLGLGVQEESETQGPMSPLGDELYHCLEGNHKKQPFESGSETPGTSESATPEGSPKRKVSSAEGAAKEEPKRRSARLSAKPPAKVEAKPKKAAAKDKSSDKKVQTKGKRGAKGKQAEVANQETKEDLPAENGETKTEESPASDEAGEKEAKSDSGSETPGTSESATPESYEQLAPQPCVGETLHSSLPRDSELFVPEEGSSEKESEDAPKTSPPTPGKHGLEQTGEEKVMVTVPDKNPPCPCCGTRVNSVLNLIEHLKVSHGKRGVCFRCAKCGKENSNHHSVVCHFKKCRGPETEKAPAGEWICEVCNRDFTTKIGLGQHKRLAHPAVRNQERIVASQPKETSNRGAHKRCWTKEEEELLIRLEAQFEGNKNINKLIAEHITTKTAKQISDKRRLLSRKPAEEPREEPGTCHHTRRAAASLRTEPEMSHHAQAEDRDNGPGRRPLPGRAAAGGRTMDEIRRHPDKGNGQQRPTKQKSEEQLQAYYKKTLEERLSAGALNTFPRAFKQVMEGRDIKLVINQTAQDCFGCLESISQIRTATRDKKDTVTREKHPKKPFQKWMKKRAIKKGNYLRFQRLFYLDRGKLAKIILDDIECLSCDIPLSEIYSVFKTRWETTGSFKSLGDFKTYGKADNTAFRELITAKEIEKNVQEMSKGSAPGPDGITLGDVVKMDPEFSRTMEIFNLWLTTGKIPDMVRGCRTVLIPKSSKPDRLKDINNWRPITIGSILLRLFSRIVTARLSKACPLNPRQRGFIRAAGCSENLKLLQTIIWSAKREHRPLGVVFVDIAKAFDTVSHQHIIHALQQREVDPHIVGLVSNMYENISTYITTKRNTHTDKIQIRVGVKQGDPMSPLLFNLAMDPLLCKLEESGKGYHRGQSSITAMAFADDLVLLSDSWENMNTNISILETFCNLTGLKTQGQKCHGFYIKPTKKSYTINDCAAWTINGTPLNMIDPGESEKYLGLQFDPWIGIARSGLSTKLDFWLQRIDQAPLKPLQKTDILKTYTIPRLIYIADHSEVKSALLETLDQKIRTAVKEWLHLPPCTCDAILYSSTRDGGLGITKLAGLIPSVQARRLHRIAQSSDDTMKCFMEKEKMEQLHKKLWIQAGGDRENIPSIWEAPPSSEPPNNVSTNSEWEAPTQKDKFPKPCNWRKNEFKKWTKLASQGRGIVNFERDKISNHWIQYYRRIPHRKLLTALQLRANVYPTREFLARGRQDQYIKACRHCDADNESCAHIIGNCPVTQDARIKRHNYICELLLEEAKKKDWVVFKEPHIRDSNKELYKPDLIFVKDGRALVVDVTVRYEAAKSSLEEAAAEKVRKYKHLETEVRHLTNAKDVTFVGFPLGARGKWHQDNFKLLTELGLSKSRQVKMAETFSTVALFSSVDIVHMFASRARKSMVM

SEQ ID NO: 862 - protein, 1665 aa, synthetic construct
MAPKKKRKVNISGSSCGSPNSADTSSDFKDLWTKLKECHDREVQGLQVKVTKLKQERILDAQRLEEFFTKNQQLREQQKVLHETIKVLEDRLRAGLCDRCAVTEEHMRKKQQEFENIRQQNLKLITELMNERNTLQEENKKLSEQLQQKIENDQQHQAAELECEEDVIPDSPITAFSFSGVNRLRRKENPHVRYIEQTHTKLEHSVCANEMRKVSKSSTHPQHNPNENEILVADTYDQSQSPMAKAHGTSSYTPDKSSFNLATVVAETLGLGVQEESETQGPMSPLGDELYHCLEGNHKKQPFESGSETPGTSESATPEGSPKRKVSSAEGAAKEEPKRRSARLSAKPPAKVEAKPKKAAAKDKSSDKKVQTKGKRGAKGKQAEVANQETKEDLPAENGETKTEESPASDEAGEKEAKSDSGSETPGTSESATPESYEQLAPQPCVGETLHSSLPRDSELFVPEEGSSEKESEDAPKTSPPTPGKHGLEQTGEEKVMVTVPDKNPPCPCCGTRVNSVLNLIEHLKVSHGKRGVCFRCAKCGKENSNYHSVVCHFKKCRGPETEKAAAGEWICEVCNRDFTTKIGLGQHKRLAHPAVRNQERIVASQPKETSNRGAHKRCWTKEEEELLIRLEAQFEGNKNINKLIAEHITTKTAKQISDKRRLLSRKPAEEPREEPGTCHHTRRAAASLRTEPEMSHHAQAEDRDNGPGRRPLPGRAAAGGRTMDEIRRHPDKGNGQQRPTKQKSEEQLQAYYKKTLEERLSAGALNTFPRAFKQVMEGRDIKLVINQTAQDCFGCLESISQIRTATRDKKDTVTREKHPKKPFQKWMKKRAIKKGNYLRFQRLFYLDRGKLAKIILDDIECLSCDIPLSEIYSVFKTRWETTGSFKSLGDFKTYGKADNTAFRELITAKEIEKNVQEMSKGSAPGPDGITLGDVVKMDPEFSRTMEIFNLWLTTGKIPDMVRGCRTVLIPKSSKPDRLKDINNWRPITIGSILLRLFSRIVTARLSKACPLNPRQRGFIRAAGCSENLKLLQTIIWSAKREHRPLGVVFVDIAKAFDTVSHQHIIHALQQREVDPHIVGLVSNMYENISTYITTKRNTHTDKIQIRVGVKQGDPMSPLLFNLAMDPLLCKLEESGKGYHRGQSSITAMAFADDLVLLSDSWENMNTNISILETFCNLTGLKTQGQKCHGFYIKPTKKSYTINDCAAWTINGTPLNMIDPGESEKYLGLQFDPWIGIARSGLSTKLDFWLQRIDQAPLKPLQKTDILKTYTIPRLIYIADHSEVKSALLETLDQKIRTAVKEWLHLPPCTCDAILYSSTRDGGLGITKLAGLIPSVQARRLHRIAQSSDDTMKCFMEKEKMEQLHKKLWIQAGGDRENIPSIWEAPPSSEPPNNVSTNSEWEAPTQKDKFPKPCNWRKNEFKKWTKLASQGRGIVNFERDKISNHWIQYYRRIPHRKLLTALQLRANVYPTREFLARGRQDQYIKACRHCDADNESCAHIIGNCPVTQDARIKRHNYICELLLEEAKKKDWVVFKEPHIRDSNKELYKPDLIFVKDGRALVVDVTVRYEAAKSSLEEAAAEKVRKYKHLETEVRHLTNAKDVTFVGFPLGARGKWHQDNFKLLTELGLSKSRQVKMAETFSTVALFSSVDIVHMFASRARKSMVM

SEQ ID NO: 863 - protein, 1665 aa, synthetic construct
MAPKKKRKVNISGSSCGSPNSADTSSDFKDLWTKLKECHDREVQGLQVKVTKLKQERILDAQRLEEFFTKNQQLREQQKVLHETIKVLEDRLRAGLCDRCAVTEEHMRKKQQEFENIRQQNLKLITELMNERNTLQEENKKLSEQLQQKIENDQQHQAAELECEEDVIPDSPITAFSFSGVNRLRRKENPHVRYIEQTHTKLEHSVCANEMRKVSKSSTHPQHNPNENEILVADTYDQSQSPMAKAHGTSSYTPDKSSFNLATVVAETLGLGVQEESETQGPMSPLGDELYHCLEGNHKKQPFESGSETPGTSESATPEGSPKRKVSSAEGAAKEEPKRRSARLSAKPPAKVEAKPKKAAAKDKSSDKKVQTKGKRGAKGKQAEVANQETKEDLPAENGETKTEESPASDEAGEKEAKSDSGSETPGTSESATPESYEQLAPQPCVGETLHSSLPRDSELFVPEEGSSEKESEDAPKTSPPTPGKHGLEQTGEEKVMVTVPDKNPPCPCCGTRVNSVLNLIEHLKVSHGKRGVCFRCAKCGKENSNYHSVVCHFKKCRGPETEKAPAGEWICEVCNRSFTTKIGLGQHKRLAHPAVRNQERIVASQPKETSNRGAHKRCWTKEEEELLIRLEAQFEGNKNINKLIAEHITTKTAKQISDKRRLLSRKPAEEPREEPGTCHHTRRAAASLRTEPEMSHHAQAEDRDNGPGRRPLPGRAAAGGRTMDEIRRHPDKGNGQQRPTKQKSEEQLQAYYKKTLEERLSAGALNTFPRAFKQVMEGRDIKLVINQTAQDCFGCLESISQIRTATRDKKDTVTREKHPKKPFQKWMKKRAIKKGNYLRFQRLFYLDRGKLAKIILDDIECLSCDIPLSEIYSVFKTRWETTGSFKSLGDFKTYGKADNTAFRELITAKEIEKNVQEMSKGSAPGPDGITLGDVVKMDPEFSRTMEIFNLWLTTGKIPDMVRGCRTVLIPKSSKPDRLKDINNWRPITIGSILLRLFSRIVTARLSKACPLNPRQRGFIRAAGCSENLKLLQTIIWSAKREHRPLGVVFVDIAKAFDTVSHQHIIHALQQREVDPHIVGLVSNMYENISTYITTKRNTHTDKIQIRVGVKQGDPMSPLLFNLAMDPLLCKLEESGKGYHRGQSSITAMAFADDLVLLSDSWENMNTNISILETFCNLTGLKTQGQKCHGFYIKPTKKSYTINDCAAWTINGTPLNMIDPGESEKYLGLQFDPWIGIARSGLSTKLDFWLQRIDQAPLKPLQKTDILKTYTIPRLIYIADHSEVKSALLETLDQKIRTAVKEWLHLPPCTCDAILYSSTRDGGLGITKLAGLIPSVQARRLHRIAQSSDDTMKCFMEKEKMEQLHKKLWIQAGGDRENIPSIWEAPPSSEPPNNVSTNSEWEAPTQKDKFPKPCNWRKNEFKKWTKLASQGRGIVNFERDKISNHWIQYYRRIPHRKLLTALQLRANVYPTREFLARGRQDQYIKACRHCDADNESCAHIIGNCPVTQDARIKRHNYICELLLEEAKKKDWVVFKEPHIRDSNKELYKPDLIFVKDGRALVVDVTVRYEAAKSSLEEAAAEKVRKYKHLETEVRHLTNAKDVTFVGFPLGARGKWHQDNFKLLTELGLSKSRQVKMAETFSTVALFSSVDIVHMFASRARKSMVM

SEQ ID NO: 864 - protein, 1665 aa, synthetic construct
MAPKKKRKVNISGSSCGSPNSADTSSDFKDLWTKLKECHDREVQGLQVKVTKLKQERILDAQRLEEFFTKNQQLREQQKVLHETIKVLEDRLRAGLCDRCAVTEEHMRKKQQEFENIRQQNLKLITELMNERNTLQEENKKLSEQLQQKIENDQQHQAAELECEEDVIPDSPITAFSFSGVNRLRRKENPHVRYIEQTHTKLEHSVCANEMRKVSKSSTHPQHNPNENEILVADTYDQSQSPMAKAHGTSSYTPDKSSFNLATVVAETLGLGVQEESETQGPMSPLGDELYHCLEGNHKKQPFESGSETPGTSESATPEGSPKRKVSSAEGAAKEEPKRRSARLSAKPPAKVEAKPKKAAAKDKSSDKKVQTKGKRGAKGKQAEVANQETKEDLPAENGETKTEESPASDEAGEKEAKSDSGSETPGTSESATPESYEQLAPQPCVGETLHSSLPRDSELFVPEEGSSEKESEDAPKTSPPTPGKHGLEQTGEEKVMVTVPDKNPPCPCCGTRVNSVLNLIEHLKVSHGKRGVCFRCAKCGKENSNYHSVVCHFKKCRGPETEKAPAGEWICEVCNRDFTTKRGLGQHKRLAHPAVRNQERIVASQPKETSNRGAHKRCWTKEEEELLIRLEAQFEGNKNINKLIAEHITTKTAKQISDKRRLLSRKPAEEPREEPGTCHHTRRAAASLRTEPEMSHHAQAEDRDNGPGRRPLPGRAAAGGRTMDEIRRHPDKGNGQQRPTKQKSEEQLQAYYKKTLEERLSAGALNTFPRAFKQVMEGRDIKLVINQTAQDCFGCLESISQIRTATRDKKDTVTREKHPKKPFQKWMKKRAIKKGNYLRFQRLFYLDRGKLAKIILDDIECLSCDIPLSEIYSVFKTRWETTGSFKSLGDFKTYGKADNTAFRELITAKEIEKNVQEMSKGSAPGPDGITLGDVVKMDPEFSRTMEIFNLWLTTGKIPDMVRGCRTVLIPKSSKPDRLKDINNWRPITIGSILLRLFSRIVTARLSKACPLNPRQRGFIRAAGCSENLKLLQTIIWSAKREHRPLGVVFVDIAKAFDTVSHQHIIHALQQREVDPHIVGLVSNMYENISTYITTKRNTHTDKIQIRVGVKQGDPMSPLLFNLAMDPLLCKLEESGKGYHRGQSSITAMAFADDLVLLSDSWENMNTNISILETFCNLTGLKTQGQKCHGFYIKPTKKSYTINDCAAWTINGTPLNMIDPGESEKYLGLQFDPWIGIARSGLSTKLDFWLQRIDQAPLKPLQKTDILKTYTIPRLIYIADHSEVKSALLETLDQKIRTAVKEWLHLPPCTCDAILYSSTRDGGLGITKLAGLIPSVQARRLHRIAQSSDDTMKCFMEKEKMEQLHKKLWIQAGGDRENIPSIWEAPPSSEPPNNVSTNSEWEAPTQKDKFPKPCNWRKNEFKKWTKLASQGRGIVNFERDKISNHWIQYYRRIPHRKLLTALQLRANVYPTREFLARGRQDQYIKACRHCDADNESCAHIIGNCPVTQDARIKRHNYICELLLEEAKKKDWVVFKEPHIRDSNKELYKPDLIFVKDGRALVVDVTVRYEAAKSSLEEAAAEKVRKYKHLETEVRHLTNAKDVTFVGFPLGARGKWHQDNFKLLTELGLSKSRQVKMAETFSTVALFSSVDIVHMFASRARKSMVM

SEQ ID NO: 865 - protein, 1665 aa, synthetic construct
MAPKKKRKVNISGSSCGSPNSADTSSDFKDLWTKLKECHDREVQGLQVKVTKLKQERILDAQRLEEFFTKNQQLREQQKVLHETIKVLEDRLRAGLCDRCAVTEEHMRKKQQEFENIRQQNLKLITELMNERNTLQEENKKLSEQLQQKIENDQQHQAAELECEEDVIPDSPITAFSFSGVNRLRRKENPHVRYIEQTHTKLEHSVCANEMRKVSKSSTHPQHNPNENEILVADTYDQSQSPMAKAHGTSSYTPDKSSFNLATVVAETLGLGVQEESETQGPMSPLGDELYHCLEGNHKKQPFESGSETPGTSESATPEGSPKRKVSSAEGAAKEEPKRRSARLSAKPPAKVEAKPKKAAAKDKSSDKKVQTKGKRGAKGKQAEVANQETKEDLPAENGETKTEESPASDEAGEKEAKSDSGSETPGTSESATPESYEQLAPQPCVGETLHSSLPRDSELFVPEEGSSEKESEDAPKTSPPTPGKHGLEQTGEEKVMVTVPDKNPPCPCCGTRVNSVLNLIEHLKVSHGKRGVCFRCAKCGKENSNYHSVVCHFKKCRGPETEKAPAGEWICEVCNRDFTTKIGLSQHKRLAHPAVRNQERIVASQPKETSNRGAHKRCWTKEEEELLIRLEAQFEGNKNINKLIAEHITTKTAKQISDKRRLLSRKPAEEPREEPGTCHHTRRAAASLRTEPEMSHHAQAEDRDNGPGRRPLPGRAAAGGRTMDEIRRHPDKGNGQQRPTKQKSEEQLQAYYKKTLEERLSAGALNTFPRAFKQVMEGRDIKLVINQTAQDCFGCLESISQIRTATRDKKDTVTREKHPKKPFQKWMKKRAIKKGNYLRFQRLFYLDRGKLAKIILDDIECLSCDIPLSEIYSVFKTRWETTGSFKSLGDFKTYGKADNTAFRELITAKEIEKNVQEMSKGSAPGPDGITLGDVVKMDPEFSRTMEIFNLWLTTGKIPDMVRGCRTVLIPKSSKPDRLKDINNWRPITIGSILLRLFSRIVTARLSKACPLNPRQRGFIRAAGCSENLKLLQTIIWSAKREHRPLGVVFVDIAKAFDTVSHQHIIHALQQREVDPHIVGLVSNMYENISTYITTKRNTHTDKIQIRVGVKQGDPMSPLLFNLAMDPLLCKLEESGKGYHRGQSSITAMAFADDLVLLSDSWENMNTNISILETFCNLTGLKTQGQKCHGFYIKPTKKSYTINDCAAWTINGTPLNMIDPGESEKYLGLQFDPWIGIARSGLSTKLDFWLQRIDQAPLKPLQKTDILKTYTIPRLIYIADHSEVKSALLETLDQKIRTAVKEWLHLPPCTCDAILYSSTRDGGLGITKLAGLIPSVQARRLHRIAQSSDDTMKCFMEKEKMEQLHKKLWIQAGGDRENIPSIWEAPPSSEPPNNVSTNSEWEAPTQKDKFPKPCNWRKNEFKKWTKLASQGRGIVNFERDKISNHWIQYYRRIPHRKLLTALQLRANVYPTREFLARGRQDQYIKACRHCDADNESCAHIIGNCPVTQDARIKRHNYICELLLEEAKKKDWVVFKEPHIRDSNKELYKPDLIFVKDGRALVVDVTVRYEAAKSSLEEAAAEKVRKYKHLETEVRHLTNAKDVTFVGFPLGARGKWHQDNFKLLTELGLSKSRQVKMAETFSTVALFSSVDIVHMFASRARKSMVM

SEQ ID NO: 866 - protein, 1665 aa, synthetic construct
MAPKKKRKVNISGSSCGSPNSADTSSDFKDLWTKLKECHDREVQGLQVKVTKLKQERILDAQRLEEFFTKNQQLREQQKVLHETIKVLEDRLRAGLCDRCAVTEEHMRKKQQEFENIRQQNLKLITELMNERNTLQEENKKLSEQLQQKIENDQQHQAAELECEEDVIPDSPITAFSFSGVNRLRRKENPHVRYIEQTHTKLEHSVCANEMRKVSKSSTHPQHNPNENEILVADTYDQSQSPMAKAHGTSSYTPDKSSFNLATVVAETLGLGVQEESETQGPMSPLGDELYHCLEGNHKKQPFESGSETPGTSESATPEGSPKRKVSSAEGAAKEEPKRRSARLSAKPPAKVEAKPKKAAAKDKSSDKKVQTKGKRGAKGKQAEVANQETKEDLPAENGETKTEESPASDEAGEKEAKSDSGSETPGTSESATPESYEQLAPQPCVGETLHSSLPRDSELFVPEEGSSEKESEDAPKTSPPTPGKHGLEQTGEEKVMVTVPDKNPPCPCCGTRVNSVLNLIEHLKVSHGKRGVCFRCAKCGKENSNYHSVVCHFKKCRGPETEKAPAGEWICEVCNRDFTTKIGLGQHKRLAHPAVRNQERLVASQPKETSNRGAHKRCWTKEEEELLIRLEAQFEGNKNINKLIAEHITTKTAKQISDKRRLLSRKPAEEPREEPGTCHHTRRAAASLRTEPEMSHHAQAEDRDNGPGRRPLPGRAAAGGRTMDEIRRHPDKGNGQQRPTKQKSEEQLQAYYKKTLEERLSAGALNTFPRAFKQVMEGRDIKLVINQTAQDCFGCLESISQIRTATRDKKDTVTREKHPKKPFQKWMKKRAIKKGNYLRFQRLFYLDRGKLAKIILDDIECLSCDIPLSEIYSVFKTRWETTGSFKSLGDFKTYGKADNTAFRELITAKEIEKNVQEMSKGSAPGPDGITLGDVVKMDPEFSRTMEIFNLWLTTGKIPDMVRGCRTVLIPKSSKPDRLKDINNWRPITIGSILLRLFSRIVTARLSKACPLNPRQRGFIRAAGCSENLKLLQTIIWSAKREHRPLGVVFVDIAKAFDTVSHQHIIHALQQREVDPHIVGLVSNMYENISTYITTKRNTHTDKIQIRVGVKQGDPMSPLLFNLAMDPLLCKLEESGKGYHRGQSSITAMAFADDLVLLSDSWENMNTNISILETFCNLTGLKTQGQKCHGFYIKPTKKSYTINDCAAWTINGTPLNMIDPGESEKYLGLQFDPWIGIARSGLSTKLDFWLQRIDQAPLKPLQKTDILKTYTIPRLIYIADHSEVKSALLETLDQKIRTAVKEWLHLPPCTCDAILYSSTRDGGLGITKLAGLIPSVQARRLHRIAQSSDDTMKCFMEKEKMEQLHKKLWIQAGGDRENIPSIWEAPPSSEPPNNVSTNSEWEAPTQKDKFPKPCNWRKNEFKKWTKLASQGRGIVNFERDKISNHWIQYYRRIPHRKLLTALQLRANVYPTREFLARGRQDQYIKACRHCDADNESCAHIIGNCPVTQDARIKRHNYICELLLEEAKKKDWVVFKEPHIRDSNKELYKPDLIFVKDGRALVVDVTVRYEAAKSSLEEAAAEKVRKYKHLETEVRHLTNAKDVTFVGFPLGARGKWHQDNFKLLTELGLSKSRQVKMAETFSTVALFSSVDIVHMFASRARKSMVM

SEQ ID NO: 867 - protein, 1665 aa, synthetic construct
MAPKKKRKVNISGSSCGSPNSADTSSDFKDLWTKLKECHDREVQGLQVKVTKLKQERILDAQRLEEFFTKNQQLREQQKVLHETIKVLEDRLRAGLCDRCAVTEEHMRKKQQEFENIRQQNLKLITELMNERNTLQEENKKLSEQLQQKIENDQQHQAAELECEEDVIPDSPITAFSFSGVNRLRRKENPHVRYIEQTHTKLEHSVCANEMRKVSKSSTHPQHNPNENEILVADTYDQSQSPMAKAHGTSSYTPDKSSFNLATVVAETLGLGVQEESETQGPMSPLGDELYHCLEGNHKKQPFESGSETPGTSESATPEGSPKRKVSSAEGAAKEEPKRRSARLSAKPPAKVEAKPKKAAAKDKSSDKKVQTKGKRGAKGKQAEVANQETKEDLPAENGETKTEESPASDEAGEKEAKSDSGSETPGTSESATPESYEQLAPQPCVGETLHSSLPRDSELFVPEEGSSEKESEDAPKTSPPTPGKHGLEQTGEEKVMVTVPDKNPPCPCCGTRVNSVLNLIEHLKVSHGKRGVCFRCAKCGKENSNYHSVVCHFKKCRGPETEKAPAGEWICEVCNRDFTTKIGLGQHKRLAHPAVRNQERIVASQPRETSNRGAHKRCWTKEEEELLIRLEAQFEGNKNINKLIAEHITTKTAKQISDKRRLLSRKPAEEPREEPGTCHHTRRAAASLRTEPEMSHHAQAEDRDNGPGRRPLPGRAAAGGRTMDEIRRHPDKGNGQQRPTKQKSEEQLQAYYKKTLEERLSAGALNTFPRAFKQVMEGRDIKLVINQTAQDCFGCLESISQIRTATRDKKDTVTREKHPKKPFQKWMKKRAIKKGNYLRFQRLFYLDRGKLAKIILDDIECLSCDIPLSEIYSVFKTRWETTGSFKSLGDFKTYGKADNTAFRELITAKEIEKNVQEMSKGSAPGPDGITLGDVVKMDPEFSRTMEIFNLWLTTGKIPDMVRGCRTVLIPKSSKPDRLKDINNWRPITIGSILLRLFSRIVTARLSKACPLNPRQRGFIRAAGCSENLKLLQTIIWSAKREHRPLGVVFVDIAKAFDTVSHQHIIHALQQREVDPHIVGLVSNMYENISTYITTKRNTHTDKIQIRVGVKQGDPMSPLLFNLAMDPLLCKLEESGKGYHRGQSSITAMAFADDLVLLSDSWENMNTNISILETFCNLTGLKTQGQKCHGFYIKPTKKSYTINDCAAWTINGTPLNMIDPGESEKYLGLQFDPWIGIARSGLSTKLDFWLQRIDQAPLKPLQKTDILKTYTIPRLIYIADHSEVKSALLETLDQKIRTAVKEWLHLPPCTCDAILYSSTRDGGLGITKLAGLIPSVQARRLHRIAQSSDDTMKCFMEKEKMEQLHKKLWIQAGGDRENIPSIWEAPPSSEPPNNVSTNSEWEAPTQKDKFPKPCNWRKNEFKKWTKLASQGRGIVNFERDKISNHWIQYYRRIPHRKLLTALQLRANVYPTREFLARGRQDQYIKACRHCDADNESCAHIIGNCPVTQDARIKRHNYICELLLEEAKKKDWVVFKEPHIRDSNKELYKPDLIFVKDGRALVVDVTVRYEAAKSSLEEAAAEKVRKYKHLETEVRHLTNAKDVTFVGFPLGARGKWHQDNFKLLTELGLSKSRQVKMAETFSTVALFSSVDIVHMFASRARKSMVM

SEQ ID NO: 868 - protein, 1665 aa, synthetic construct
MAPKKKRKVNISGSSCGSPNSADTSSDFKDLWTKLKECHDREVQGLQVKVTKLKQERILDAQRLEEFFTKNQQLREQQKVLHETIKVLEDRLRAGLCDRCAVTEEHMRKKQQEFENIRQQNLKLITELMNERNTLQEENKKLSEQLQQKIENDQQHQAAELECEEDVIPDSPITAFSFSGVNRLRRKENPHVRYIEQTHTKLEHSVCANEMRKVSKSSTHPQHNPNENEILVADTYDQSQSPMAKAHGTSSYTPDKSSFNLATVVAETLGLGVQEESETQGPMSPLGDELYHCLEGNHKKQPFESGSETPGTSESATPEGSPKRKVSSAEGAAKEEPKRRSARLSAKPPAKVEAKPKKAAAKDKSSDKKVQTKGKRGAKGKQAEVANQETKEDLPAENGETKTEESPASDEAGEKEAKSDSGSETPGTSESATPESYEQLAPQPCVGETLHSSLPRDSELFVPEEGSSEKESEDAPKTSPPTPGKHGLEQTGEEKVMVTVPDKNPPCPCCGTRVNSVLNLIEHLKVSHGKRGVCFRCAKCGKENSNYHSVVCHFKKCRGPETEKAPAGEWICEVCNRDFTTKIGLGQHKRLAHPAVRNQERIVASQPKETSNRRAHKRCWTKEEEELLIRLEAQFEGNKNINKLIAEHITTKTAKQISDKRRLLSRKPAEEPREEPGTCHHTRRAAASLRTEPEMSHHAQAEDRDNGPGRRPLPGRAAAGGRTMDEIRRHPDKGNGQQRPTKQKSEEQLQAYYKKTLEERLSAGALNTFPRAFKQVMEGRDIKLVINQTAQDCFGCLESISQIRTATRDKKDTVTREKHPKKPFQKWMKKRAIKKGNYLRFQRLFYLDRGKLAKIILDDIECLSCDIPLSEIYSVFKTRWETTGSFKSLGDFKTYGKADNTAFRELITAKEIEKNVQEMSKGSAPGPDGITLGDVVKMDPEFSRTMEIFNLWLTTGKIPDMVRGCRTVLIPKSSKPDRLKDINNWRPITIGSILLRLFSRIVTARLSKACPLNPRQRGFIRAAGCSENLKLLQTIIWSAKREHRPLGVVFVDIAKAFDTVSHQHIIHALQQREVDPHIVGLVSNMYENISTYITTKRNTHTDKIQIRVGVKQGDPMSPLLFNLAMDPLLCKLEESGKGYHRGQSSITAMAFADDLVLLSDSWENMNTNISILETFCNLTGLKTQGQKCHGFYIKPTKKSYTINDCAAWTINGTPLNMIDPGESEKYLGLQFDPWIGIARSGLSTKLDFWLQRIDQAPLKPLQKTDILKTYTIPRLIYIADHSEVKSALLETLDQKIRTAVKEWLHLPPCTCDAILYSSTRDGGLGITKLAGLIPSVQARRLHRIAQSSDDTMKCFMEKEKMEQLHKKLWIQAGGDRENIPSIWEAPPSSEPPNNVSTNSEWEAPTQKDKFPKPCNWRKNEFKKWTKLASQGRGIVNFERDKISNHWIQYYRRIPHRKLLTALQLRANVYPTREFLARGRQDQYIKACRHCDADNESCAHIIGNCPVTQDARIKRHNYICELLLEEAKKKDWVVFKEPHIRDSNKELYKPDLIFVKDGRALVVDVTVRYEAAKSSLEEAAAEKVRKYKHLETEVRHLTNAKDVTFVGFPLGARGKWHQDNFKLLTELGLSKSRQVKMAETFSTVALFSSVDIVHMFASRARKSMVM

SEQ ID NO: 869 - protein, 1665 aa, synthetic construct
MAPKKKRKVNISGSSCGSPNSADTSSDFKDLWTKLKECHDREVQGLQVKVTKLKQERILDAQRLEEFFTKNQQLREQQKVLHETIKVLEDRLRAGLCDRCAVTEEHMRKKQQEFENIRQQNLKLITELMNERNTLQEENKKLSEQLQQKIENDQQHQAAELECEEDVIPDSPITAFSFSGVNRLRRKENPHVRYIEQTHTKLEHSVCANEMRKVSKSSTHPQHNPNENEILVADTYDQSQSPMAKAHGTSSYTPDKSSFNLATVVAETLGLGVQEESETQGPMSPLGDELYHCLEGNHKKQPFESGSETPGTSESATPEGSPKRKVSSAEGAAKEEPKRRSARLSAKPPAKVEAKPKKAAAKDKSSDKKVQTKGKRGAKGKQAEVANQETKEDLPAENGETKTEESPASDEAGEKEAKSDSGSETPGTSESATPESYEQLAPQPCVGETLHSSLPRDSELFVPEEGSSEKESEDAPKTSPPTPGKHGLEQTGEEKVMVTVPDKNPPCPCCGTRVNSVLNLIEHLKVSHGKRGVCFRCAKCGKENSNYHSVVCHFKKCRGPETEKAPAGEWICEVCNRDFTTKIGLGQHKRLAHPAVRNQERIVASQPKETSNRGAHKRCWTKEEEELLIRLEAQFEGNKNINKLIAEHITTRTAKQISDKRRLLSRKPAEEPREEPGTCHHTRRAAASLRTEPEMSHHAQAEDRDNGPGRRPLPGRAAAGGRTMDEIRRHPDKGNGQQRPTKQKSEEQLQAYYKKTLEERLSAGALNTFPRAFKQVMEGRDIKLVINQTAQDCFGCLESISQIRTATRDKKDTVTREKHPKKPFQKWMKKRAIKKGNYLRFQRLFYLDRGKLAKIILDDIECLSCDIPLSEIYSVFKTRWETTGSFKSLGDFKTYGKADNTAFRELITAKEIEKNVQEMSKGSAPGPDGITLGDVVKMDPEFSRTMEIFNLWLTTGKIPDMVRGCRTVLIPKSSKPDRLKDINNWRPITIGSILLRLFSRIVTARLSKACPLNPRQRGFIRAAGCSENLKLLQTIIWSAKREHRPLGVVFVDIAKAFDTVSHQHIIHALQQREVDPHIVGLVSNMYENISTYITTKRNTHTDKIQIRVGVKQGDPMSPLLFNLAMDPLLCKLEESGKGYHRGQSSITAMAFADDLVLLSDSWENMNTNISILETFCNLTGLKTQGQKCHGFYIKPTKKSYTINDCAAWTINGTPLNMIDPGESEKYLGLQFDPWIGIARSGLSTKLDFWLQRIDQAPLKPLQKTDILKTYTIPRLIYIADHSEVKSALLETLDQKIRTAVKEWLHLPPCTCDAILYSSTRDGGLGITKLAGLIPSVQARRLHRIAQSSDDTMKCFMEKEKMEQLHKKLWIQAGGDRENIPSIWEAPPSSEPPNNVSTNSEWEAPTQKDKFPKPCNWRKNEFKKWTKLASQGRGIVNFERDKISNHWIQYYRRIPHRKLLTALQLRANVYPTREFLARGRQDQYIKACRHCDADNESCAHIIGNCPVTQDARIKRHNYICELLLEEAKKKDWVVFKEPHIRDSNKELYKPDLIFVKDGRALVVDVTVRYEAAKSSLEEAAAEKVRKYKHLETEVRHLTNAKDVTFVGFPLGARGKWHQDNFKLLTELGLSKSRQVKMAETFSTVALFSSVDIVHMFASRARKSMVM

SEQ ID NO: 870 - protein, 1665 aa, synthetic construct
MAPKKKRKVNISGSSCGSPNSADTSSDFKDLWTKLKECHDREVQGLQVKVTKLKQERILDAQRLEEFFTKNQQLREQQKVLHETIKVLEDRLRAGLCDRCAVTEEHMRKKQQEFENIRQQNLKLITELMNERNTLQEENKKLSEQLQQKIENDQQHQAAELECEEDVIPDSPITAFSFSGVNRLRRKENPHVRYIEQTHTKLEHSVCANEMRKVSKSSTHPQHNPNENEILVADTYDQSQSPMAKAHGTSSYTPDKSSFNLATVVAETLGLGVQEESETQGPMSPLGDELYHCLEGNHKKQPFESGSETPGTSESATPEGSPKRKVSSAEGAAKEEPKRRSARLSAKPPAKVEAKPKKAAAKDKSSDKKVQTKGKRGAKGKQAEVANQETKEDLPAENGETKTEESPASDEAGEKEAKSDSGSETPGTSESATPESYEQLAPQPCVGETLHSSLPRDSELFVPEEGSSEKESEDAPKTSPPTPGKHGLEQTGEEKVMVTVPDKNPPCPCCGTRVNSVLNLIEHLKVSHGKRGVCFRCAKCGKENSNYHSVVCHFKKCRGPETEKAPAGEWICEVCNRDFTTKIGLGQHKRLAHPAVRNQERIVASQPKETSNRGAHKRCWTKEEEELLIRLEAQFEGNKNINKLIAEHITTKTAKQIKDKRRLLSRKPAEEPREEPGTCHHTRRAAASLRTEPEMSHHAQAEDRDNGPGRRPLPGRAAAGGRTMDEIRRHPDKGNGQQRPTKQKSEEQLQAYYKKTLEERLSAGALNTFPRAFKQVMEGRDIKLVINQTAQDCFGCLESISQIRTATRDKKDTVTREKHPKKPFQKWMKKRAIKKGNYLRFQRLFYLDRGKLAKIILDDIECLSCDIPLSEIYSVFKTRWETTGSFKSLGDFKTYGKADNTAFRELITAKEIEKNVQEMSKGSAPGPDGITLGDVVKMDPEFSRTMEIFNLWLTTGKIPDMVRGCRTVLIPKSSKPDRLKDINNWRPITIGSILLRLFSRIVTARLSKACPLNPRQRGFIRAAGCSENLKLLQTIIWSAKREHRPLGVVFVDIAKAFDTVSHQHIIHALQQREVDPHIVGLVSNMYENISTYITTKRNTHTDKIQIRVGVKQGDPMSPLLFNLAMDPLLCKLEESGKGYHRGQSSITAMAFADDLVLLSDSWENMNTNISILETFCNLTGLKTQGQKCHGFYIKPTKKSYTINDCAAWTINGTPLNMIDPGESEKYLGLQFDPWIGIARSGLSTKLDFWLQRIDQAPLKPLQKTDILKTYTIPRLIYIADHSEVKSALLETLDQKIRTAVKEWLHLPPCTCDAILYSSTRDGGLGITKLAGLIPSVQARRLHRIAQSSDDTMKCFMEKEKMEQLHKKLWIQAGGDRENIPSIWEAPPSSEPPNNVSTNSEWEAPTQKDKFPKPCNWRKNEFKKWTKLASQGRGIVNFERDKISNHWIQYYRRIPHRKLLTALQLRANVYPTREFLARGRQDQYIKACRHCDADNESCAHIIGNCPVTQDARIKRHNYICELLLEEAKKKDWVVFKEPHIRDSNKELYKPDLIFVKDGRALVVDVTVRYEAAKSSLEEAAAEKVRKYKHLETEVRHLTNAKDVTFVGFPLGARGKWHQDNFKLLTELGLSKSRQVKMAETFSTVALFSSVDIVHMFASRARKSMVM

SEQ ID NO: 871 - protein, 1665 aa, synthetic construct
MAPKKKRKVNISGSSCGSPNSADTSSDFKDLWTKLKECHDREVQGLQVKVTKLKQERILDAQRLEEFFTKNQQLREQQKVLHETIKVLEDRLRAGLCDRCAVTEEHMRKKQQEFENIRQQNLKLITELMNERNTLQEENKKLSEQLQQKIENDQQHQAAELECEEDVIPDSPITAFSFSGVNRLRRKENPHVRYIEQTHTKLEHSVCANEMRKVSKSSTHPQHNPNENEILVADTYDQSQSPMAKAHGTSSYTPDKSSFNLATVVAETLGLGVQEESETQGPMSPLGDELYHCLEGNHKKQPFESGSETPGTSESATPEGSPKRKVSSAEGAAKEEPKRRSARLSAKPPAKVEAKPKKAAAKDKSSDKKVQTKGKRGAKGKQAEVANQETKEDLPAENGETKTEESPASDEAGEKEAKSDSGSETPGTSESATPESYEQLAPQPCVGETLHSSLPRDSELFVPEEGSSEKESEDAPKTSPPTPGKHGLEQTGEEKVMVTVPDKNPPCPCCGTRVNSVLNLIEHLKVSHGKRGVCFRCAKCGKENSNYHSVVCHFKKCRGPETEKAPAGEWICEVCNRDFTTKIGLGQHKRLAHPAVRNQERIVASQPKETSNRGAHKRCWTKEEEELLIRLEAQFEGNKNINKLIAEHITTKTAKQISDKRRLLSRKPAEEPREEPGTCHHTRRAAASLRTEPEMSHHAQAEDRDNGPGRRPLPGRAAAGGRTMDEIRRHPDKGNGQQRPTKQKSEEQIQAYYKKTLEERLSAGALNTFPRAFKQVMEGRDIKLVINQTAQDCFGCLESISQIRTATRDKKDTVTREKHPKKPFQKWMKKRAIKKGNYLRFQRLFYLDRGKLAKIILDDIECLSCDIPLSEIYSVFKTRWETTGSFKSLGDFKTYGKADNTAFRELITAKEIEKNVQEMSKGSAPGPDGITLGDVVKMDPEFSRTMEIFNLWLTTGKIPDMVRGCRTVLIPKSSKPDRLKDINNWRPITIGSILLRLFSRIVTARLSKACPLNPRQRGFIRAAGCSENLKLLQTIIWSAKREHRPLGVVFVDIAKAFDTVSHQHIIHALQQREVDPHIVGLVSNMYENISTYITTKRNTHTDKIQIRVGVKQGDPMSPLLFNLAMDPLLCKLEESGKGYHRGQSSITAMAFADDLVLLSDSWENMNTNISILETFCNLTGLKTQGQKCHGFYIKPTKKSYTINDCAAWTINGTPLNMIDPGESEKYLGLQFDPWIGIARSGLSTKLDFWLQRIDQAPLKPLQKTDILKTYTIPRLIYIADHSEVKSALLETLDQKIRTAVKEWLHLPPCTCDAILYSSTRDGGLGITKLAGLIPSVQARRLHRIAQSSDDTMKCFMEKEKMEQLHKKLWIQAGGDRENIPSIWEAPPSSEPPNNVSTNSEWEAPTQKDKFPKPCNWRKNEFKKWTKLASQGRGIVNFERDKISNHWIQYYRRIPHRKLLTALQLRANVYPTREFLARGRQDQYIKACRHCDADNESCAHIIGNCPVTQDARIKRHNYICELLLEEAKKKDWVVFKEPHIRDSNKELYKPDLIFVKDGRALVVDVTVRYEAAKSSLEEAAAEKVRKYKHLETEVRHLTNAKDVTFVGFPLGARGKWHQDNFKLLTELGLSKSRQVKMAETFSTVALFSSVDIVHMFASRARKSMVM

SEQ ID NO: 872 - protein, 1665 aa, synthetic construct
MAPKKKRKVNISGSSCGSPNSADTSSDFKDLWTKLKECHDREVQGLQVKVTKLKQERILDAQRLEEFFTKNQQLREQQKVLHETIKVLEDRLRAGLCDRCAVTEEHMRKKQQEFENIRQQNLKLITELMNERNTLQEENKKLSEQLQQKIENDQQHQAAELECEEDVIPDSPITAFSFSGVNRLRRKENPHVRYIEQTHTKLEHSVCANEMRKVSKSSTHPQHNPNENEILVADTYDQSQSPMAKAHGTSSYTPDKSSFNLATVVAETLGLGVQEESETQGPMSPLGDELYHCLEGNHKKQPFESGSETPGTSESATPEGSPKRKVSSAEGAAKEEPKRRSARLSAKPPAKVEAKPKKAAAKDKSSDKKVQTKGKRGAKGKQAEVANQETKEDLPAENGETKTEESPASDEAGEKEAKSDSGSETPGTSESATPESYEQLAPQPCVGETLHSSLPRDSELFVPEEGSSEKESEDAPKTSPPTPGKHGLEQTGEEKVMVTVPDKNPPCPCCGTRVNSVLNLIEHLKVSHGKRGVCFRCAKCGKENSNYHSVVCHFKKCRGPETEKAPAGEWICEVCNRDFTTKIGLGQHKRLAHPAVRNQERIVASQPKETSNRGAHKRCWTKEEEELLIRLEAQFEGNKNINKLIAEHITTKTAKQISDKRRLLSRKPAEEPREEPGTCHHTRRAAASLRTEPEMSHHAQAEDRDNGPGRRPLPGRAAAGGRTMDEIRRHPDKGNGQQRPTKQKSEEQLQAYYKKILEERLSAGALNTFPRAFKQVMEGRDIKLVINQTAQDCFGCLESISQIRTATRDKKDTVTREKHPKKPFQKWMKKRAIKKGNYLRFQRLFYLDRGKLAKIILDDIECLSCDIPLSEIYSVFKTRWETTGSFKSLGDFKTYGKADNTAFRELITAKEIEKNVQEMSKGSAPGPDGITLGDVVKMDPEFSRTMEIFNLWLTTGKIPDMVRGCRTVLIPKSSKPDRLKDINNWRPITIGSILLRLFSRIVTARLSKACPLNPRQRGFIRAAGCSENLKLLQTIIWSAKREHRPLGVVFVDIAKAFDTVSHQHIIHALQQREVDPHIVGLVSNMYENISTYITTKRNTHTDKIQIRVGVKQGDPMSPLLFNLAMDPLLCKLEESGKGYHRGQSSITAMAFADDLVLLSDSWENMNTNISILETFCNLTGLKTQGQKCHGFYIKPTKKSYTINDCAAWTINGTPLNMIDPGESEKYLGLQFDPWIGIARSGLSTKLDFWLQRIDQAPLKPLQKTDILKTYTIPRLIYIADHSEVKSALLETLDQKIRTAVKEWLHLPPCTCDAILYSSTRDGGLGITKLAGLIPSVQARRLHRIAQSSDDTMKCFMEKEKMEQLHKKLWIQAGGDRENIPSIWEAPPSSEPPNNVSTNSEWEAPTQKDKFPKPCNWRKNEFKKWTKLASQGRGIVNFERDKISNHWIQYYRRIPHRKLLTALQLRANVYPTREFLARGRQDQYIKACRHCDADNESCAHIIGNCPVTQDARIKRHNYICELLLEEAKKKDWVVFKEPHIRDSNKELYKPDLIFVKDGRALVVDVTVRYEAAKSSLEEAAAEKVRKYKHLETEVRHLTNAKDVTFVGFPLGARGKWHQDNFKLLTELGLSKSRQVKMAETFSTVALFSSVDIVHMFASRARKSMVM

SEQ ID NO: 873 - protein, 1665 aa, synthetic construct
MAPKKKRKVNISGSSCGSPNSADTSSDFKDLWTKLKECHDREVQGLQVKVTKLKQERILDAQRLEEFFTKNQQLREQQKVLHETIKVLEDRLRAGLCDRCAVTEEHMRKKQQEFENIRQQNLKLITELMNERNTLQEENKKLSEQLQQKIENDQQHQAAELECEEDVIPDSPITAFSFSGVNRLRRKENPHVRYIEQTHTKLEHSVCANEMRKVSKSSTHPQHNPNENEILVADTYDQSQSPMAKAHGTSSYTPDKSSFNLATVVAETLGLGVQEESETQGPMSPLGDELYHCLEGNHKKQPFESGSETPGTSESATPEGSPKRKVSSAEGAAKEEPKRRSARLSAKPPAKVEAKPKKAAAKDKSSDKKVQTKGKRGAKGKQAEVANQETKEDLPAENGETKTEESPASDEAGEKEAKSDSGSETPGTSESATPESYEQLAPQPCVGETLHSSLPRDSELFVPEEGSSEKESEDAPKTSPPTPGKHGLEQTGEEKVMVTVPDKNPPCPCCGTRVNSVLNLIEHLKVSHGKRGVCFRCAKCGKENSNYHSVVCHFKKCRGPETEKAPAGEWICEVCNRDFTTKIGLGQHKRLAHPAVRNQERIVASQPKETSNRGAHKRCWTKEEEELLIRLEAQFEGNKNINKLIAEHITTKTAKQISDKRRLLSRKPAEEPREEPGTCHHTRRAAASLRTEPEMSHHAQAEDRDNGPGRRPLPGRAAAGGRTMDEIRRHPDKGNGQQRPTKQKSEEQLQAYYKKTIEERLSAGALNTFPRAFKQVMEGRDIKLVINQTAQDCFGCLESISQIRTATRDKKDTVTREKHPKKPFQKWMKKRAIKKGNYLRFQRLFYLDRGKLAKIILDDIECLSCDIPLSEIYSVFKTRWETTGSFKSLGDFKTYGKADNTAFRELITAKEIEKNVQEMSKGSAPGPDGITLGDVVKMDPEFSRTMEIFNLWLTTGKIPDMVRGCRTVLIPKSSKPDRLKDINNWRPITIGSILLRLFSRIVTARLSKACPLNPRQRGFIRAAGCSENLKLLQTIIWSAKREHRPLGVVFVDIAKAFDTVSHQHIIHALQQREVDPHIVGLVSNMYENISTYITTKRNTHTDKIQIRVGVKQGDPMSPLLFNLAMDPLLCKLEESGKGYHRGQSSITAMAFADDLVLLSDSWENMNTNISILETFCNLTGLKTQGQKCHGFYIKPTKKSYTINDCAAWTINGTPLNMIDPGESEKYLGLQFDPWIGIARSGLSTKLDFWLQRIDQAPLKPLQKTDILKTYTIPRLIYIADHSEVKSALLETLDQKIRTAVKEWLHLPPCTCDAILYSSTRDGGLGITKLAGLIPSVQARRLHRIAQSSDDTMKCFMEKEKMEQLHKKLWIQAGGDRENIPSIWEAPPSSEPPNNVSTNSEWEAPTQKDKFPKPCNWRKNEFKKWTKLASQGRGIVNFERDKISNHWIQYYRRIPHRKLLTALQLRANVYPTREFLARGRQDQYIKACRHCDADNESCAHIIGNCPVTQDARIKRHNYICELLLEEAKKKDWVVFKEPHIRDSNKELYKPDLIFVKDGRALVVDVTVRYEAAKSSLEEAAAEKVRKYKHLETEVRHLTNAKDVTFVGFPLGARGKWHQDNFKLLTELGLSKSRQVKMAETFSTVALFSSVDIVHMFASRARKSMVM

SEQ ID NO: 874 - protein, 1665 aa, synthetic construct
MAPKKKRKVNISGSSCGSPNSADTSSDFKDLWTKLKECHDREVQGLQVKVTKLKQERILDAQRLEEFFTKNQQLREQQKVLHETIKVLEDRLRAGLCDRCAVTEEHMRKKQQEFENIRQQNLKLITELMNERNTLQEENKKLSEQLQQKIENDQQHQAAELECEEDVIPDSPITAFSFSGVNRLRRKENPHVRYIEQTHTKLEHSVCANEMRKVSKSSTHPQHNPNENEILVADTYDQSQSPMAKAHGTSSYTPDKSSFNLATVVAETLGLGVQEESETQGPMSPLGDELYHCLEGNHKKQPFESGSETPGTSESATPEGSPKRKVSSAEGAAKEEPKRRSARLSAKPPAKVEAKPKKAAAKDKSSDKKVQTKGKRGAKGKQAEVANQETKEDLPAENGETKTEESPASDEAGEKEAKSDSGSETPGTSESATPESYEQLAPQPCVGETLHSSLPRDSELFVPEEGSSEKESEDAPKTSPPTPGKHGLEQTGEEKVMVTVPDKNPPCPCCGTRVNSVLNLIEHLKVSHGKRGVCFRCAKCGKENSNYHSVVCHFKKCRGPETEKAPAGEWICEVCNRDFTTKIGLGQHKRLAHPAVRNQERIVASQPKETSNRGAHKRCWTKEEEELLIRLEAQFEGNKNINKLIAEHITTKTAKQISDKRRLLSRKPAEEPREEPGTCHHTRRAAASLRTEPEMSHHAQAEDRDNGPGRRPLPGRAAAGGRTMDEIRRHPDKGNGQQRPTKQKSEEQLQAYYKKTLEERLSAGALNTFPRALKQVMEGRDIKLVINQTAQDCFGCLESISQIRTATRDKKDTVTREKHPKKPFQKWMKKRAIKKGNYLRFQRLFYLDRGKLAKIILDDIECLSCDIPLSEIYSVFKTRWETTGSFKSLGDFKTYGKADNTAFRELITAKEIEKNVQEMSKGSAPGPDGITLGDVVKMDPEFSRTMEIFNLWLTTGKIPDMVRGCRTVLIPKSSKPDRLKDINNWRPITIGSILLRLFSRIVTARLSKACPLNPRQRGFIRAAGCSENLKLLQTIIWSAKREHRPLGVVFVDIAKAFDTVSHQHIIHALQQREVDPHIVGLVSNMYENISTYITTKRNTHTDKIQIRVGVKQGDPMSPLLFNLAMDPLLCKLEESGKGYHRGQSSITAMAFADDLVLLSDSWENMNTNISILETFCNLTGLKTQGQKCHGFYIKPTKKSYTINDCAAWTINGTPLNMIDPGESEKYLGLQFDPWIGIARSGLSTKLDFWLQRIDQAPLKPLQKTDILKTYTIPRLIYIADHSEVKSALLETLDQKIRTAVKEWLHLPPCTCDAILYSSTRDGGLGITKLAGLIPSVQARRLHRIAQSSDDTMKCFMEKEKMEQLHKKLWIQAGGDRENIPSIWEAPPSSEPPNNVSTNSEWEAPTQKDKFPKPCNWRKNEFKKWTKLASQGRGIVNFERDKISNHWIQYYRRIPHRKLLTALQLRANVYPTREFLARGRQDQYIKACRHCDADNESCAHIIGNCPVTQDARIKRHNYICELLLEEAKKKDWVVFKEPHIRDSNKELYKPDLIFVKDGRALVVDVTVRYEAAKSSLEEAAAEKVRKYKHLETEVRHLTNAKDVTFVGFPLGARGKWHQDNFKLLTELGLSKSRQVKMAETFSTVALFSSVDIVHMFASRARKSMVM

SEQ ID NO: 875 - protein, 1665 aa, synthetic construct
MAPKKKRKVNISGSSCGSPNSADTSSDFKDLWTKLKECHDREVQGLQVKVTKLKQERILDAQRLEEFFTKNQQLREQQKVLHETIKVLEDRLRAGLCDRCAVTEEHMRKKQQEFENIRQQNLKLITELMNERNTLQEENKKLSEQLQQKIENDQQHQAAELECEEDVIPDSPITAFSFSGVNRLRRKENPHVRYIEQTHTKLEHSVCANEMRKVSKSSTHPQHNPNENEILVADTYDQSQSPMAKAHGTSSYTPDKSSFNLATVVAETLGLGVQEESETQGPMSPLGDELYHCLEGNHKKQPFESGSETPGTSESATPEGSPKRKVSSAEGAAKEEPKRRSARLSAKPPAKVEAKPKKAAAKDKSSDKKVQTKGKRGAKGKQAEVANQETKEDLPAENGETKTEESPASDEAGEKEAKSDSGSETPGTSESATPESYEQLAPQPCVGETLHSSLPRDSELFVPEEGSSEKESEDAPKTSPPTPGKHGLEQTGEEKVMVTVPDKNPPCPCCGTRVNSVLNLIEHLKVSHGKRGVCFRCAKCGKENSNYHSVVCHFKKCRGPETEKAPAGEWICEVCNRDFTTKIGLGQHKRLAHPAVRNQERIVASQPKETSNRGAHKRCWTKEEEELLIRLEAQFEGNKNINKLIAEHITTKTAKQISDKRRLLSRKPAEEPREEPGTCHHTRRAAASLRTEPEMSHHAQAEDRDNGPGRRPLPGRAAAGGRTMDEIRRHPDKGNGQQRPTKQKSEEQLQAYYKKTLEERLSAGALNTFPRAFKQVLEGRDIKLVINQTAQDCFGCLESISQIRTATRDKKDTVTREKHPKKPFQKWMKKRAIKKGNYLRFQRLFYLDRGKLAKIILDDIECLSCDIPLSEIYSVFKTRWETTGSFKSLGDFKTYGKADNTAFRELITAKEIEKNVQEMSKGSAPGPDGITLGDVVKMDPEFSRTMEIFNLWLTTGKIPDMVRGCRTVLIPKSSKPDRLKDINNWRPITIGSILLRLFSRIVTARLSKACPLNPRQRGFIRAAGCSENLKLLQTIIWSAKREHRPLGVVFVDIAKAFDTVSHQHIIHALQQREVDPHIVGLVSNMYENISTYITTKRNTHTDKIQIRVGVKQGDPMSPLLFNLAMDPLLCKLEESGKGYHRGQSSITAMAFADDLVLLSDSWENMNTNISILETFCNLTGLKTQGQKCHGFYIKPTKKSYTINDCAAWTINGTPLNMIDPGESEKYLGLQFDPWIGIARSGLSTKLDFWLQRIDQAPLKPLQKTDILKTYTIPRLIYIADHSEVKSALLETLDQKIRTAVKEWLHLPPCTCDAILYSSTRDGGLGITKLAGLIPSVQARRLHRIAQSSDDTMKCFMEKEKMEQLHKKLWIQAGGDRENIPSIWEAPPSSEPPNNVSTNSEWEAPTQKDKFPKPCNWRKNEFKKWTKLASQGRGIVNFERDKISNHWIQYYRRIPHRKLLTALQLRANVYPTREFLARGRQDQYIKACRHCDADNESCAHIIGNCPVTQDARIKRHNYICELLLEEAKKKDWVVFKEPHIRDSNKELYKPDLIFVKDGRALVVDVTVRYEAAKSSLEEAAAEKVRKYKHLETEVRHLTNAKDVTFVGFPLGARGKWHQDNFKLLTELGLSKSRQVKMAETFSTVALFSSVDIVHMFASRARKSMVM

SEQ ID NO: 876 - protein, 1665 aa, synthetic construct
MAPKKKRKVNISGSSCGSPNSADTSSDFKDLWTKLKECHDREVQGLQVKVTKLKQERILDAQRLEEFFTKNQQLREQQKVLHETIKVLEDRLRAGLCDRCAVTEEHMRKKQQEFENIRQQNLKLITELMNERNTLQEENKKLSEQLQQKIENDQQHQAAELECEEDVIPDSPITAFSFSGVNRLRRKENPHVRYIEQTHTKLEHSVCANEMRKVSKSSTHPQHNPNENEILVADTYDQSQSPMAKAHGTSSYTPDKSSFNLATVVAETLGLGVQEESETQGPMSPLGDELYHCLEGNHKKQPFESGSETPGTSESATPEGSPKRKVSSAEGAAKEEPKRRSARLSAKPPAKVEAKPKKAAAKDKSSDKKVQTKGKRGAKGKQAEVANQETKEDLPAENGETKTEESPASDEAGEKEAKSDSGSETPGTSESATPESYEQLAPQPCVGETLHSSLPRDSELFVPEEGSSEKESEDAPKTSPPTPGKHGLEQTGEEKVMVTVPDKNPPCPCCGTRVNSVLNLIEHLKVSHGKRGVCFRCAKCGKENSNYHSVVCHFKKCRGPETEKAPAGEWICEVCNRDFTTKIGLGQHKRLAHPAVRNQERIVASQPKETSNRGAHKRCWTKEEEELLIRLEAQFEGNKNINKLIAEHITTKTAKQISDKRRLLSRKPAEEPREEPGTCHHTRRAAASLRTEPEMSHHAQAEDRDNGPGRRPLPGRAAAGGRTMDEIRRHPDKGNGQQRPTKQKSEEQLQAYYKKTLEERLSAGALNTFPRAFKQVMEGRDIKLVINQTARDCFGCLESISQIRTATRDKKDTVTREKHPKKPFQKWMKKRAIKKGNYLRFQRLFYLDRGKLAKIILDDIECLSCDIPLSEIYSVFKTRWETTGSFKSLGDFKTYGKADNTAFRELITAKEIEKNVQEMSKGSAPGPDGITLGDVVKMDPEFSRTMEIFNLWLTTGKIPDMVRGCRTVLIPKSSKPDRLKDINNWRPITIGSILLRLFSRIVTARLSKACPLNPRQRGFIRAAGCSENLKLLQTIIWSAKREHRPLGVVFVDIAKAFDTVSHQHIIHALQQREVDPHIVGLVSNMYENISTYITTKRNTHTDKIQIRVGVKQGDPMSPLLFNLAMDPLLCKLEESGKGYHRGQSSITAMAFADDLVLLSDSWENMNTNISILETFCNLTGLKTQGQKCHGFYIKPTKKSYTINDCAAWTINGTPLNMIDPGESEKYLGLQFDPWIGIARSGLSTKLDFWLQRIDQAPLKPLQKTDILKTYTIPRLIYIADHSEVKSALLETLDQKIRTAVKEWLHLPPCTCDAILYSSTRDGGLGITKLAGLIPSVQARRLHRIAQSSDDTMKCFMEKEKMEQLHKKLWIQAGGDRENIPSIWEAPPSSEPPNNVSTNSEWEAPTQKDKFPKPCNWRKNEFKKWTKLASQGRGIVNFERDKISNHWIQYYRRIPHRKLLTALQLRANVYPTREFLARGRQDQYIKACRHCDADNESCAHIIGNCPVTQDARIKRHNYICELLLEEAKKKDWVVFKEPHIRDSNKELYKPDLIFVKDGRALVVDVTVRYEAAKSSLEEAAAEKVRKYKHLETEVRHLTNAKDVTFVGFPLGARGKWHQDNFKLLTELGLSKSRQVKMAETFSTVALFSSVDIVHMFASRARKSMVM

SEQ ID NO: 877 - protein, 1665 aa, synthetic construct
MAPKKKRKVNISGSSCGSPNSADTSSDFKDLWTKLKECHDREVQGLQVKVTKLKQERILDAQRLEEFFTKNQQLREQQKVLHETIKVLEDRLRAGLCDRCAVTEEHMRKKQQEFENIRQQNLKLITELMNERNTLQEENKKLSEQLQQKIENDQQHQAAELECEEDVIPDSPITAFSFSGVNRLRRKENPHVRYIEQTHTKLEHSVCANEMRKVSKSSTHPQHNPNENEILVADTYDQSQSPMAKAHGTSSYTPDKSSFNLATVVAETLGLGVQEESETQGPMSPLGDELYHCLEGNHKKQPFESGSETPGTSESATPEGSPKRKVSSAEGAAKEEPKRRSARLSAKPPAKVEAKPKKAAAKDKSSDKKVQTKGKRGAKGKQAEVANQETKEDLPAENGETKTEESPASDEAGEKEAKSDSGSETPGTSESATPESYEQLAPQPCVGETLHSSLPRDSELFVPEEGSSEKESEDAPKTSPPTPGKHGLEQTGEEKVMVTVPDKNPPCPCCGTRVNSVLNLIEHLKVSHGKRGVCFRCAKCGKENSNYHSVVCHFKKCRGPETEKAPAGEWICEVCNRDFTTKIGLGQHKRLAHPAVRNQERIVASQPKETSNRGAHKRCWTKEEEELLIRLEAQFEGNKNINKLIAEHITTKTAKQISDKRRLLSRKPAEEPREEPGTCHHTRRAAASLRTEPEMSHHAQAEDRDNGPGRRPLPGRAAAGGRTMDEIRRHPDKGNGQQRPTKQKSEEQLQAYYKKTLEERLSAGALNTFPRAFKQVMEGRDIKLVINQTAQDCIGCLESISQIRTATRDKKDTVTREKHPKKPFQKWMKKRAIKKGNYLRFQRLFYLDRGKLAKIILDDIECLSCDIPLSEIYSVFKTRWETTGSFKSLGDFKTYGKADNTAFRELITAKEIEKNVQEMSKGSAPGPDGITLGDVVKMDPEFSRTMEIFNLWLTTGKIPDMVRGCRTVLIPKSSKPDRLKDINNWRPITIGSILLRLFSRIVTARLSKACPLNPRQRGFIRAAGCSENLKLLQTIIWSAKREHRPLGVVFVDIAKAFDTVSHQHIIHALQQREVDPHIVGLVSNMYENISTYITTKRNTHTDKIQIRVGVKQGDPMSPLLFNLAMDPLLCKLEESGKGYHRGQSSITAMAFADDLVLLSDSWENMNTNISILETFCNLTGLKTQGQKCHGFYIKPTKKSYTINDCAAWTINGTPLNMIDPGESEKYLGLQFDPWIGIARSGLSTKLDFWLQRIDQAPLKPLQKTDILKTYTIPRLIYIADHSEVKSALLETLDQKIRTAVKEWLHLPPCTCDAILYSSTRDGGLGITKLAGLIPSVQARRLHRIAQSSDDTMKCFMEKEKMEQLHKKLWIQAGGDRENIPSIWEAPPSSEPPNNVSTNSEWEAPTQKDKFPKPCNWRKNEFKKWTKLASQGRGIVNFERDKISNHWIQYYRRIPHRKLLTALQLRANVYPTREFLARGRQDQYIKACRHCDADNESCAHIIGNCPVTQDARIKRHNYICELLLEEAKKKDWVVFKEPHIRDSNKELYKPDLIFVKDGRALVVDVTVRYEAAKSSLEEAAAEKVRKYKHLETEVRHLTNAKDVTFVGFPLGARGKWHQDNFKLLTELGLSKSRQVKMAETFSTVALFSSVDIVHMFASRARKSMVM

SEQ ID NO: 878 - protein, 1665 aa, synthetic construct
MAPKKKRKVNISGSSCGSPNSADTSSDFKDLWTKLKECHDREVQGLQVKVTKLKQERILDAQRLEEFFTKNQQLREQQKVLHETIKVLEDRLRAGLCDRCAVTEEHMRKKQQEFENIRQQNLKLITELMNERNTLQEENKKLSEQLQQKIENDQQHQAAELECEEDVIPDSPITAFSFSGVNRLRRKENPHVRYIEQTHTKLEHSVCANEMRKVSKSSTHPQHNPNENEILVADTYDQSQSPMAKAHGTSSYTPDKSSFNLATVVAETLGLGVQEESETQGPMSPLGDELYHCLEGNHKKQPFESGSETPGTSESATPEGSPKRKVSSAEGAAKEEPKRRSARLSAKPPAKVEAKPKKAAAKDKSSDKKVQTKGKRGAKGKQAEVANQETKEDLPAENGETKTEESPASDEAGEKEAKSDSGSETPGTSESATPESYEQLAPQPCVGETLHSSLPRDSELFVPEEGSSEKESEDAPKTSPPTPGKHGLEQTGEEKVMVTVPDKNPPCPCCGTRVNSVLNLIEHLKVSHGKRGVCFRCAKCGKENSNYHSVVCHFKKCRGPETEKAPAGEWICEVCNRDFTTKIGLGQHKRLAHPAVRNQERIVASQPKETSNRGAHKRCWTKEEEELLIRLEAQFEGNKNINKLIAEHITTKTAKQISDKRRLLSRKPAEEPREEPGTCHHTRRAAASLRTEPEMSHHAQAEDRDNGPGRRPLPGRAAAGGRTMDEIRRHPDKGNGQQRPTKQKSEEQLQAYYKKTLEERLSAGALNTFPRAFKQVMEGRDIKLVINQTAQDCFKCLESISQIRTATRDKKDTVTREKHPKKPFQKWMKKRAIKKGNYLRFQRLFYLDRGKLAKIILDDIECLSCDIPLSEIYSVFKTRWETTGSFKSLGDFKTYGKADNTAFRELITAKEIEKNVQEMSKGSAPGPDGITLGDVVKMDPEFSRTMEIFNLWLTTGKIPDMVRGCRTVLIPKSSKPDRLKDINNWRPITIGSILLRLFSRIVTARLSKACPLNPRQRGFIRAAGCSENLKLLQTIIWSAKREHRPLGVVFVDIAKAFDTVSHQHIIHALQQREVDPHIVGLVSNMYENISTYITTKRNTHTDKIQIRVGVKQGDPMSPLLFNLAMDPLLCKLEESGKGYHRGQSSITAMAFADDLVLLSDSWENMNTNISILETFCNLTGLKTQGQKCHGFYIKPTKKSYTINDCAAWTINGTPLNMIDPGESEKYLGLQFDPWIGIARSGLSTKLDFWLQRIDQAPLKPLQKTDILKTYTIPRLIYIADHSEVKSALLETLDQKIRTAVKEWLHLPPCTCDAILYSSTRDGGLGITKLAGLIPSVQARRLHRIAQSSDDTMKCFMEKEKMEQLHKKLWIQAGGDRENIPSIWEAPPSSEPPNNVSTNSEWEAPTQKDKFPKPCNWRKNEFKKWTKLASQGRGIVNFERDKISNHWIQYYRRIPHRKLLTALQLRANVYPTREFLARGRQDQYIKACRHCDADNESCAHIIGNCPVTQDARIKRHNYICELLLEEAKKKDWVVFKEPHIRDSNKELYKPDLIFVKDGRALVVDVTVRYEAAKSSLEEAAAEKVRKYKHLETEVRHLTNAKDVTFVGFPLGARGKWHQDNFKLLTELGLSKSRQVKMAETFSTVALFSSVDIVHMFASRARKSMVM

SEQ ID NO: 879 - protein, 1665 aa, synthetic construct
MAPKKKRKVNISGSSCGSPNSADTSSDFKDLWTKLKECHDREVQGLQVKVTKLKQERILDAQRLEEFFTKNQQLREQQKVLHETIKVLEDRLRAGLCDRCAVTEEHMRKKQQEFENIRQQNLKLITELMNERNTLQEENKKLSEQLQQKIENDQQHQAAELECEEDVIPDSPITAFSFSGVNRLRRKENPHVRYIEQTHTKLEHSVCANEMRKVSKSSTHPQHNPNENEILVADTYDQSQSPMAKAHGTSSYTPDKSSFNLATVVAETLGLGVQEESETQGPMSPLGDELYHCLEGNHKKQPFESGSETPGTSESATPEGSPKRKVSSAEGAAKEEPKRRSARLSAKPPAKVEAKPKKAAAKDKSSDKKVQTKGKRGAKGKQAEVANQETKEDLPAENGETKTEESPASDEAGEKEAKSDSGSETPGTSESATPESYEQLAPQPCVGETLHSSLPRDSELFVPEEGSSEKESEDAPKTSPPTPGKHGLEQTGEEKVMVTVPDKNPPCPCCGTRVNSVLNLIEHLKVSHGKRGVCFRCAKCGKENSNYHSVVCHFKKCRGPETEKAPAGEWICEVCNRDFTTKIGLGQHKRLAHPAVRNQERIVASQPKETSNRGAHKRCWTKEEEELLIRLEAQFEGNKNINKLIAEHITTKTAKQISDKRRLLSRKPAEEPREEPGTCHHTRRAAASLRTEPEMSHHAQAEDRDNGPGRRPLPGRAAAGGRTMDEIRRHPDKGNGQQRPTKQKSEEQLQAYYKKTLEERLSAGALNTFPRAFKQVMEGRDIKLVINQTAQDCFGLLESISQIRTATRDKKDTVTREKHPKKPFQKWMKKRAIKKGNYLRFQRLFYLDRGKLAKIILDDIECLSCDIPLSEIYSVFKTRWETTGSFKSLGDFKTYGKADNTAFRELITAKEIEKNVQEMSKGSAPGPDGITLGDVVKMDPEFSRTMEIFNLWLTTGKIPDMVRGCRTVLIPKSSKPDRLKDINNWRPITIGSILLRLFSRIVTARLSKACPLNPRQRGFIRAAGCSENLKLLQTIIWSAKREHRPLGVVFVDIAKAFDTVSHQHIIHALQQREVDPHIVGLVSNMYENISTYITTKRNTHTDKIQIRVGVKQGDPMSPLLFNLAMDPLLCKLEESGKGYHRGQSSITAMAFADDLVLLSDSWENMNTNISILETFCNLTGLKTQGQKCHGFYIKPTKKSYTINDCAAWTINGTPLNMIDPGESEKYLGLQFDPWIGIARSGLSTKLDFWLQRIDQAPLKPLQKTDILKTYTIPRLIYIADHSEVKSALLETLDQKIRTAVKEWLHLPPCTCDAILYSSTRDGGLGITKLAGLIPSVQARRLHRIAQSSDDTMKCFMEKEKMEQLHKKLWIQAGGDRENIPSIWEAPPSSEPPNNVSTNSEWEAPTQKDKFPKPCNWRKNEFKKWTKLASQGRGIVNFERDKISNHWIQYYRRIPHRKLLTALQLRANVYPTREFLARGRQDQYIKACRHCDADNESCAHIIGNCPVTQDARIKRHNYICELLLEEAKKKDWVVFKEPHIRDSNKELYKPDLIFVKDGRALVVDVTVRYEAAKSSLEEAAAEKVRKYKHLETEVRHLTNAKDVTFVGFPLGARGKWHQDNFKLLTELGLSKSRQVKMAETFSTVALFSSVDIVHMFASRARKSMVM

SEQ ID NO: 880 - protein, 1665 aa, synthetic construct
MAPKKKRKVNISGSSCGSPNSADTSSDFKDLWTKLKECHDREVQGLQVKVTKLKQERILDAQRLEEFFTKNQQLREQQKVLHETIKVLEDRLRAGLCDRCAVTEEHMRKKQQEFENIRQQNLKLITELMNERNTLQEENKKLSEQLQQKIENDQQHQAAELECEEDVIPDSPITAFSFSGVNRLRRKENPHVRYIEQTHTKLEHSVCANEMRKVSKSSTHPQHNPNENEILVADTYDQSQSPMAKAHGTSSYTPDKSSFNLATVVAETLGLGVQEESETQGPMSPLGDELYHCLEGNHKKQPFESGSETPGTSESATPEGSPKRKVSSAEGAAKEEPKRRSARLSAKPPAKVEAKPKKAAAKDKSSDKKVQTKGKRGAKGKQAEVANQETKEDLPAENGETKTEESPASDEAGEKEAKSDSGSETPGTSESATPESYEQLAPQPCVGETLHSSLPRDSELFVPEEGSSEKESEDAPKTSPPTPGKHGLEQTGEEKVMVTVPDKNPPCPCCGTRVNSVLNLIEHLKVSHGKRGVCFRCAKCGKENSNYHSVVCHFKKCRGPETEKAPAGEWICEVCNRDFTTKIGLGQHKRLAHPAVRNQERIVASQPKETSNRGAHKRCWTKEEEELLIRLEAQFEGNKNINKLIAEHITTKTAKQISDKRRLLSRKPAEEPREEPGTCHHTRRAAASLRTEPEMSHHAQAEDRDNGPGRRPLPGRAAAGGRTMDEIRRHPDKGNGQQRPTKQKSEEQLQAYYKKTLEERLSAGALNTFPRAFKQVMEGRDIKLVINQTAQDCFGCLESISQIRTATRKKKDTVTREKHPKKPFQKWMKKRAIKKGNYLRFQRLFYLDRGKLAKIILDDIECLSCDIPLSEIYSVFKTRWETTGSFKSLGDFKTYGKADNTAFRELITAKEIEKNVQEMSKGSAPGPDGITLGDVVKMDPEFSRTMEIFNLWLTTGKIPDMVRGCRTVLIPKSSKPDRLKDINNWRPITIGSILLRLFSRIVTARLSKACPLNPRQRGFIRAAGCSENLKLLQTIIWSAKREHRPLGVVFVDIAKAFDTVSHQHIIHALQQREVDPHIVGLVSNMYENISTYITTKRNTHTDKIQIRVGVKQGDPMSPLLFNLAMDPLLCKLEESGKGYHRGQSSITAMAFADDLVLLSDSWENMNTNISILETFCNLTGLKTQGQKCHGFYIKPTKKSYTINDCAAWTINGTPLNMIDPGESEKYLGLQFDPWIGIARSGLSTKLDFWLQRIDQAPLKPLQKTDILKTYTIPRLIYIADHSEVKSALLETLDQKIRTAVKEWLHLPPCTCDAILYSSTRDGGLGITKLAGLIPSVQARRLHRIAQSSDDTMKCFMEKEKMEQLHKKLWIQAGGDRENIPSIWEAPPSSEPPNNVSTNSEWEAPTQKDKFPKPCNWRKNEFKKWTKLASQGRGIVNFERDKISNHWIQYYRRIPHRKLLTALQLRANVYPTREFLARGRQDQYIKACRHCDADNESCAHIIGNCPVTQDARIKRHNYICELLLEEAKKKDWVVFKEPHIRDSNKELYKPDLIFVKDGRALVVDVTVRYEAAKSSLEEAAAEKVRKYKHLETEVRHLTNAKDVTFVGFPLGARGKWHQDNFKLLTELGLSKSRQVKMAETFSTVALFSSVDIVHMFASRARKSMVM

SEQ ID NO: 881 - protein, 1665 aa, synthetic construct
MAPKKKRKVNISGSSCGSPNSADTSSDFKDLWTKLKECHDREVQGLQVKVTKLKQERILDAQRLEEFFTKNQQLREQQKVLHETIKVLEDRLRAGLCDRCAVTEEHMRKKQQEFENIRQQNLKLITELMNERNTLQEENKKLSEQLQQKIENDQQHQAAELECEEDVIPDSPITAFSFSGVNRLRRKENPHVRYIEQTHTKLEHSVCANEMRKVSKSSTHPQHNPNENEILVADTYDQSQSPMAKAHGTSSYTPDKSSFNLATVVAETLGLGVQEESETQGPMSPLGDELYHCLEGNHKKQPFESGSETPGTSESATPEGSPKRKVSSAEGAAKEEPKRRSARLSAKPPAKVEAKPKKAAAKDKSSDKKVQTKGKRGAKGKQAEVANQETKEDLPAENGETKTEESPASDEAGEKEAKSDSGSETPGTSESATPESYEQLAPQPCVGETLHSSLPRDSELFVPEEGSSEKESEDAPKTSPPTPGKHGLEQTGEEKVMVTVPDKNPPCPCCGTRVNSVLNLIEHLKVSHGKRGVCFRCAKCGKENSNYHSVVCHFKKCRGPETEKAPAGEWICEVCNRDFTTKIGLGQHKRLAHPAVRNQERIVASQPKETSNRGAHKRCWTKEEEELLIRLEAQFEGNKNINKLIAEHITTKTAKQISDKRRLLSRKPAEEPREEPGTCHHTRRAAASLRTEPEMSHHAQAEDRDNGPGRRPLPGRAAAGGRTMDEIRRHPDKGNGQQRPTKQKSEEQLQAYYKKTLEERLSAGALNTFPRAFKQVMEGRDIKLVINQTAQDCFGCLESISQIRTATRDKKDTVTREKHKKKPFQKWMKKRAIKKGNYLRFQRLFYLDRGKLAKIILDDIECLSCDIPLSEIYSVFKTRWETTGSFKSLGDFKTYGKADNTAFRELITAKEIEKNVQEMSKGSAPGPDGITLGDVVKMDPEFSRTMEIFNLWLTTGKIPDMVRGCRTVLIPKSSKPDRLKDINNWRPITIGSILLRLFSRIVTARLSKACPLNPRQRGFIRAAGCSENLKLLQTIIWSAKREHRPLGVVFVDIAKAFDTVSHQHIIHALQQREVDPHIVGLVSNMYENISTYITTKRNTHTDKIQIRVGVKQGDPMSPLLFNLAMDPLLCKLEESGKGYHRGQSSITAMAFADDLVLLSDSWENMNTNISILETFCNLTGLKTQGQKCHGFYIKPTKKSYTINDCAAWTINGTPLNMIDPGESEKYLGLQFDPWIGIARSGLSTKLDFWLQRIDQAPLKPLQKTDILKTYTIPRLIYIADHSEVKSALLETLDQKIRTAVKEWLHLPPCTCDAILYSSTRDGGLGITKLAGLIPSVQARRLHRIAQSSDDTMKCFMEKEKMEQLHKKLWIQAGGDRENIPSIWEAPPSSEPPNNVSTNSEWEAPTQKDKFPKPCNWRKNEFKKWTKLASQGRGIVNFERDKISNHWIQYYRRIPHRKLLTALQLRANVYPTREFLARGRQDQYIKACRHCDADNESCAHIIGNCPVTQDARIKRHNYICELLLEEAKKKDWVVFKEPHIRDSNKELYKPDLIFVKDGRALVVDVTVRYEAAKSSLEEAAAEKVRKYKHLETEVRHLTNAKDVTFVGFPLGARGKWHQDNFKLLTELGLSKSRQVKMAETFSTVALFSSVDIVHMFASRARKSMVM

SEQ ID NO: 882 - protein, 1665 aa, synthetic construct
MAPKKKRKVNISGSSCGSPNSADTSSDFKDLWTKLKECHDREVQGLQVKVTKLKQERILDAQRLEEFFTKNQQLREQQKVLHETIKVLEDRLRAGLCDRCAVTEEHMRKKQQEFENIRQQNLKLITELMNERNTLQEENKKLSEQLQQKIENDQQHQAAELECEEDVIPDSPITAFSFSGVNRLRRKENPHVRYIEQTHTKLEHSVCANEMRKVSKSSTHPQHNPNENEILVADTYDQSQSPMAKAHGTSSYTPDKSSFNLATVVAETLGLGVQEESETQGPMSPLGDELYHCLEGNHKKQPFESGSETPGTSESATPEGSPKRKVSSAEGAAKEEPKRRSARLSAKPPAKVEAKPKKAAAKDKSSDKKVQTKGKRGAKGKQAEVANQETKEDLPAENGETKTEESPASDEAGEKEAKSDSGSETPGTSESATPESYEQLAPQPCVGETLHSSLPRDSELFVPEEGSSEKESEDAPKTSPPTPGKHGLEQTGEEKVMVTVPDKNPPCPCCGTRVNSVLNLIEHLKVSHGKRGVCFRCAKCGKENSNYHSVVCHFKKCRGPETEKAPAGEWICEVCNRDFTTKIGLGQHKRLAHPAVRNQERIVASQPKETSNRGAHKRCWTKEEEELLIRLEAQFEGNKNINKLIAEHITTKTAKQISDKRRLLSRKPAEEPREEPGTCHHTRRAAASLRTEPEMSHHAQAEDRDNGPGRRPLPGRAAAGGRTMDEIRRHPDKGNGQQRPTKQKSEEQLQAYYKKTLEERLSAGALNTFPRAFKQVMEGRDIKLVINQTAQDCFGCLESISQIRTATRDKKDTVTREKHPKKPFQKWMKKRRIKKGNYLRFQRLFYLDRGKLAKIILDDIECLSCDIPLSEIYSVFKTRWETTGSFKSLGDFKTYGKADNTAFRELITAKEIEKNVQEMSKGSAPGPDGITLGDVVKMDPEFSRTMEIFNLWLTTGKIPDMVRGCRTVLIPKSSKPDRLKDINNWRPITIGSILLRLFSRIVTARLSKACPLNPRQRGFIRAAGCSENLKLLQTIIWSAKREHRPLGVVFVDIAKAFDTVSHQHIIHALQQREVDPHIVGLVSNMYENISTYITTKRNTHTDKIQIRVGVKQGDPMSPLLFNLAMDPLLCKLEESGKGYHRGQSSITAMAFADDLVLLSDSWENMNTNISILETFCNLTGLKTQGQKCHGFYIKPTKKSYTINDCAAWTINGTPLNMIDPGESEKYLGLQFDPWIGIARSGLSTKLDFWLQRIDQAPLKPLQKTDILKTYTIPRLIYIADHSEVKSALLETLDQKIRTAVKEWLHLPPCTCDAILYSSTRDGGLGITKLAGLIPSVQARRLHRIAQSSDDTMKCFMEKEKMEQLHKKLWIQAGGDRENIPSIWEAPPSSEPPNNVSTNSEWEAPTQKDKFPKPCNWRKNEFKKWTKLASQGRGIVNFERDKISNHWIQYYRRIPHRKLLTALQLRANVYPTREFLARGRQDQYIKACRHCDADNESCAHIIGNCPVTQDARIKRHNYICELLLEEAKKKDWVVFKEPHIRDSNKELYKPDLIFVKDGRALVVDVTVRYEAAKSSLEEAAAEKVRKYKHLETEVRHLTNAKDVTFVGFPLGARGKWHQDNFKLLTELGLSKSRQVKMAETFSTVALFSSVDIVHMFASRARKSMVM

SEQ ID NO: 883 - protein, 1665 aa, synthetic construct
MAPKKKRKVNISGSSCGSPNSADTSSDFKDLWTKLKECHDREVQGLQVKVTKLKQERILDAQRLEEFFTKNQQLREQQKVLHETIKVLEDRLRAGLCDRCAVTEEHMRKKQQEFENIRQQNLKLITELMNERNTLQEENKKLSEQLQQKIENDQQHQAAELECEEDVIPDSPITAFSFSGVNRLRRKENPHVRYIEQTHTKLEHSVCANEMRKVSKSSTHPQHNPNENEILVADTYDQSQSPMAKAHGTSSYTPDKSSFNLATVVAETLGLGVQEESETQGPMSPLGDELYHCLEGNHKKQPFESGSETPGTSESATPEGSPKRKVSSAEGAAKEEPKRRSARLSAKPPAKVEAKPKKAAAKDKSSDKKVQTKGKRGAKGKQAEVANQETKEDLPAENGETKTEESPASDEAGEKEAKSDSGSETPGTSESATPESYEQLAPQPCVGETLHSSLPRDSELFVPEEGSSEKESEDAPKTSPPTPGKHGLEQTGEEKVMVTVPDKNPPCPCCGTRVNSVLNLIEHLKVSHGKRGVCFRCAKCGKENSNYHSVVCHFKKCRGPETEKAPAGEWICEVCNRDFTTKIGLGQHKRLAHPAVRNQERIVASQPKETSNRGAHKRCWTKEEEELLIRLEAQFEGNKNINKLIAEHITTKTAKQISDKRRLLSRKPAEEPREEPGTCHHTRRAAASLRTEPEMSHHAQAEDRDNGPGRRPLPGRAAAGGRTMDEIRRHPDKGNGQQRPTKQKSEEQLQAYYKKTLEERLSAGALNTFPRAFKQVMEGRDIKLVINQTAQDCFGCLESISQIRTATRDKKDTVTREKHPKKPFQKWMKKRAIKKGNYRRFQRLFYLDRGKLAKIILDDIECLSCDIPLSEIYSVFKTRWETTGSFKSLGDFKTYGKADNTAFRELITAKEIEKNVQEMSKGSAPGPDGITLGDVVKMDPEFSRTMEIFNLWLTTGKIPDMVRGCRTVLIPKSSKPDRLKDINNWRPITIGSILLRLFSRIVTARLSKACPLNPRQRGFIRAAGCSENLKLLQTIIWSAKREHRPLGVVFVDIAKAFDTVSHQHIIHALQQREVDPHIVGLVSNMYENISTYITTKRNTHTDKIQIRVGVKQGDPMSPLLFNLAMDPLLCKLEESGKGYHRGQSSITAMAFADDLVLLSDSWENMNTNISILETFCNLTGLKTQGQKCHGFYIKPTKKSYTINDCAAWTINGTPLNMIDPGESEKYLGLQFDPWIGIARSGLSTKLDFWLQRIDQAPLKPLQKTDILKTYTIPRLIYIADHSEVKSALLETLDQKIRTAVKEWLHLPPCTCDAILYSSTRDGGLGITKLAGLIPSVQARRLHRIAQSSDDTMKCFMEKEKMEQLHKKLWIQAGGDRENIPSIWEAPPSSEPPNNVSTNSEWEAPTQKDKFPKPCNWRKNEFKKWTKLASQGRGIVNFERDKISNHWIQYYRRIPHRKLLTALQLRANVYPTREFLARGRQDQYIKACRHCDADNESCAHIIGNCPVTQDARIKRHNYICELLLEEAKKKDWVVFKEPHIRDSNKELYKPDLIFVKDGRALVVDVTVRYEAAKSSLEEAAAEKVRKYKHLETEVRHLTNAKDVTFVGFPLGARGKWHQDNFKLLTELGLSKSRQVKMAETFSTVALFSSVDIVHMFASRARKSMVM

SEQ ID NO: 884 - protein, 1665 aa, synthetic construct
MAPKKKRKVNISGSSCGSPNSADTSSDFKDLWTKLKECHDREVQGLQVKVTKLKQERILDAQRLEEFFTKNQQLREQQKVLHETIKVLEDRLRAGLCDRCAVTEEHMRKKQQEFENIRQQNLKLITELMNERNTLQEENKKLSEQLQQKIENDQQHQAAELECEEDVIPDSPITAFSFSGVNRLRRKENPHVRYIEQTHTKLEHSVCANEMRKVSKSSTHPQHNPNENEILVADTYDQSQSPMAKAHGTSSYTPDKSSFNLATVVAETLGLGVQEESETQGPMSPLGDELYHCLEGNHKKQPFESGSETPGTSESATPEGSPKRKVSSAEGAAKEEPKRRSARLSAKPPAKVEAKPKKAAAKDKSSDKKVQTKGKRGAKGKQAEVANQETKEDLPAENGETKTEESPASDEAGEKEAKSDSGSETPGTSESATPESYEQLAPQPCVGETLHSSLPRDSELFVPEEGSSEKESEDAPKTSPPTPGKHGLEQTGEEKVMVTVPDKNPPCPCCGTRVNSVLNLIEHLKVSHGKRGVCFRCAKCGKENSNYHSVVCHFKKCRGPETEKAPAGEWICEVCNRDFTTKIGLGQHKRLAHPAVRNQERIVASQPKETSNRGAHKRCWTKEEEELLIRLEAQFEGNKNINKLIAEHITTKTAKQISDKRRLLSRKPAEEPREEPGTCHHTRRAAASLRTEPEMSHHAQAEDRDNGPGRRPLPGRAAAGGRTMDEIRRHPDKGNGQQRPTKQKSEEQLQAYYKKTLEERLSAGALNTFPRAFKQVMEGRDIKLVINQTAQDCFGCLESISQIRTATRDKKDTVTREKHPKKPFQKWMKKRAIKKGNYLRFQRLFYLNRGKLAKIILDDIECLSCDIPLSEIYSVFKTRWETTGSFKSLGDFKTYGKADNTAFRELITAKEIEKNVQEMSKGSAPGPDGITLGDVVKMDPEFSRTMEIFNLWLTTGKIPDMVRGCRTVLIPKSSKPDRLKDINNWRPITIGSILLRLFSRIVTARLSKACPLNPRQRGFIRAAGCSENLKLLQTIIWSAKREHRPLGVVFVDIAKAFDTVSHQHIIHALQQREVDPHIVGLVSNMYENISTYITTKRNTHTDKIQIRVGVKQGDPMSPLLFNLAMDPLLCKLEESGKGYHRGQSSITAMAFADDLVLLSDSWENMNTNISILETFCNLTGLKTQGQKCHGFYIKPTKKSYTINDCAAWTINGTPLNMIDPGESEKYLGLQFDPWIGIARSGLSTKLDFWLQRIDQAPLKPLQKTDILKTYTIPRLIYIADHSEVKSALLETLDQKIRTAVKEWLHLPPCTCDAILYSSTRDGGLGITKLAGLIPSVQARRLHRIAQSSDDTMKCFMEKEKMEQLHKKLWIQAGGDRENIPSIWEAPPSSEPPNNVSTNSEWEAPTQKDKFPKPCNWRKNEFKKWTKLASQGRGIVNFERDKISNHWIQYYRRIPHRKLLTALQLRANVYPTREFLARGRQDQYIKACRHCDADNESCAHIIGNCPVTQDARIKRHNYICELLLEEAKKKDWVVFKEPHIRDSNKELYKPDLIFVKDGRALVVDVTVRYEAAKSSLEEAAAEKVRKYKHLETEVRHLTNAKDVTFVGFPLGARGKWHQDNFKLLTELGLSKSRQVKMAETFSTVALFSSVDIVHMFASRARKSMVM

SEQ ID NO: 885 - protein, 1665 aa, synthetic construct
MAPKKKRKVNISGSSCGSPNSADTSSDFKDLWTKLKECHDREVQGLQVKVTKLKQERILDAQRLEEFFTKNQQLREQQKVLHETIKVLEDRLRAGLCDRCAVTEEHMRKKQQEFENIRQQNLKLITELMNERNTLQEENKKLSEQLQQKIENDQQHQAAELECEEDVIPDSPITAFSFSGVNRLRRKENPHVRYIEQTHTKLEHSVCANEMRKVSKSSTHPQHNPNENEILVADTYDQSQSPMAKAHGTSSYTPDKSSFNLATVVAETLGLGVQEESETQGPMSPLGDELYHCLEGNHKKQPFESGSETPGTSESATPEGSPKRKVSSAEGAAKEEPKRRSARLSAKPPAKVEAKPKKAAAKDKSSDKKVQTKGKRGAKGKQAEVANQETKEDLPAENGETKTEESPASDEAGEKEAKSDSGSETPGTSESATPESYEQLAPQPCVGETLHSSLPRDSELFVPEEGSSEKESEDAPKTSPPTPGKHGLEQTGEEKVMVTVPDKNPPCPCCGTRVNSVLNLIEHLKVSHGKRGVCFRCAKCGKENSNYHSVVCHFKKCRGPETEKAPAGEWICEVCNRDFTTKIGLGQHKRLAHPAVRNQERIVASQPKETSNRGAHKRCWTKEEEELLIRLEAQFEGNKNINKLIAEHITTKTAKQISDKRRLLSRKPAEEPREEPGTCHHTRRAAASLRTEPEMSHHAQAEDRDNGPGRRPLPGRAAAGGRTMDEIRRHPDKGNGQQRPTKQKSEEQLQAYYKKTLEERLSAGALNTFPRAFKQVMEGRDIKLVINQTAQDCFGCLESISQIRTATRDKKDTVTREKHPKKPFQKWMKKRAIKKGNYLRFQRLFYLDRGKLAKIIIDDIECLSCDIPLSEIYSVFKTRWETTGSFKSLGDFKTYGKADNTAFRELITAKEIEKNVQEMSKGSAPGPDGITLGDVVKMDPEFSRTMEIFNLWLTTGKIPDMVRGCRTVLIPKSSKPDRLKDINNWRPITIGSILLRLFSRIVTARLSKACPLNPRQRGFIRAAGCSENLKLLQTIIWSAKREHRPLGVVFVDIAKAFDTVSHQHIIHALQQREVDPHIVGLVSNMYENISTYITTKRNTHTDKIQIRVGVKQGDPMSPLLFNLAMDPLLCKLEESGKGYHRGQSSITAMAFADDLVLLSDSWENMNTNISILETFCNLTGLKTQGQKCHGFYIKPTKKSYTINDCAAWTINGTPLNMIDPGESEKYLGLQFDPWIGIARSGLSTKLDFWLQRIDQAPLKPLQKTDILKTYTIPRLIYIADHSEVKSALLETLDQKIRTAVKEWLHLPPCTCDAILYSSTRDGGLGITKLAGLIPSVQARRLHRIAQSSDDTMKCFMEKEKMEQLHKKLWIQAGGDRENIPSIWEAPPSSEPPNNVSTNSEWEAPTQKDKFPKPCNWRKNEFKKWTKLASQGRGIVNFERDKISNHWIQYYRRIPHRKLLTALQLRANVYPTREFLARGRQDQYIKACRHCDADNESCAHIIGNCPVTQDARIKRHNYICELLLEEAKKKDWVVFKEPHIRDSNKELYKPDLIFVKDGRALVVDVTVRYEAAKSSLEEAAAEKVRKYKHLETEVRHLTNAKDVTFVGFPLGARGKWHQDNFKLLTELGLSKSRQVKMAETFSTVALFSSVDIVHMFASRARKSMVM

SEQ ID NO: 886 - protein, 1665 aa, synthetic construct
MAPKKKRKVNISGSSCGSPNSADTSSDFKDLWTKLKECHDREVQGLQVKVTKLKQERILDAQRLEEFFTKNQQLREQQKVLHETIKVLEDRLRAGLCDRCAVTEEHMRKKQQEFENIRQQNLKLITELMNERNTLQEENKKLSEQLQQKIENDQQHQAAELECEEDVIPDSPITAFSFSGVNRLRRKENPHVRYIEQTHTKLEHSVCANEMRKVSKSSTHPQHNPNENEILVADTYDQSQSPMAKAHGTSSYTPDKSSFNLATVVAETLGLGVQEESETQGPMSPLGDELYHCLEGNHKKQPFESGSETPGTSESATPEGSPKRKVSSAEGAAKEEPKRRSARLSAKPPAKVEAKPKKAAAKDKSSDKKVQTKGKRGAKGKQAEVANQETKEDLPAENGETKTEESPASDEAGEKEAKSDSGSETPGTSESATPESYEQLAPQPCVGETLHSSLPRDSELFVPEEGSSEKESEDAPKTSPPTPGKHGLEQTGEEKVMVTVPDKNPPCPCCGTRVNSVLNLIEHLKVSHGKRGVCFRCAKCGKENSNYHSVVCHFKKCRGPETEKAPAGEWICEVCNRDFTTKIGLGQHKRLAHPAVRNQERIVASQPKETSNRGAHKRCWTKEEEELLIRLEAQFEGNKNINKLIAEHITTKTAKQISDKRRLLSRKPAEEPREEPGTCHHTRRAAASLRTEPEMSHHAQAEDRDNGPGRRPLPGRAAAGGRTMDEIRRHPDKGNGQQRPTKQKSEEQLQAYYKKTLEERLSAGALNTFPRAFKQVMEGRDIKLVINQTAQDCFGCLESISQIRTATRDKKDTVTREKHPKKPFQKWMKKRAIKKGNYLRFQRLFYLDRGKLAKIILDDKECLSCDIPLSEIYSVFKTRWETTGSFKSLGDFKTYGKADNTAFRELITAKEIEKNVQEMSKGSAPGPDGITLGDVVKMDPEFSRTMEIFNLWLTTGKIPDMVRGCRTVLIPKSSKPDRLKDINNWRPITIGSILLRLFSRIVTARLSKACPLNPRQRGFIRAAGCSENLKLLQTIIWSAKREHRPLGVVFVDIAKAFDTVSHQHIIHALQQREVDPHIVGLVSNMYENISTYITTKRNTHTDKIQIRVGVKQGDPMSPLLFNLAMDPLLCKLEESGKGYHRGQSSITAMAFADDLVLLSDSWENMNTNISILETFCNLTGLKTQGQKCHGFYIKPTKKSYTINDCAAWTINGTPLNMIDPGESEKYLGLQFDPWIGIARSGLSTKLDFWLQRIDQAPLKPLQKTDILKTYTIPRLIYIADHSEVKSALLETLDQKIRTAVKEWLHLPPCTCDAILYSSTRDGGLGITKLAGLIPSVQARRLHRIAQSSDDTMKCFMEKEKMEQLHKKLWIQAGGDRENIPSIWEAPPSSEPPNNVSTNSEWEAPTQKDKFPKPCNWRKNEFKKWTKLASQGRGIVNFERDKISNHWIQYYRRIPHRKLLTALQLRANVYPTREFLARGRQDQYIKACRHCDADNESCAHIIGNCPVTQDARIKRHNYICELLLEEAKKKDWVVFKEPHIRDSNKELYKPDLIFVKDGRALVVDVTVRYEAAKSSLEEAAAEKVRKYKHLETEVRHLTNAKDVTFVGFPLGARGKWHQDNFKLLTELGLSKSRQVKMAETFSTVALFSSVDIVHMFASRARKSMVM

SEQ ID NO: 887 - protein, 1665 aa, synthetic construct
MAPKKKRKVNISGSSCGSPNSADTSSDFKDLWTKLKECHDREVQGLQVKVTKLKQERILDAQRLEEFFTKNQQLREQQKVLHETIKVLEDRLRAGLCDRCAVTEEHMRKKQQEFENIRQQNLKLITELMNERNTLQEENKKLSEQLQQKIENDQQHQAAELECEEDVIPDSPITAFSFSGVNRLRRKENPHVRYIEQTHTKLEHSVCANEMRKVSKSSTHPQHNPNENEILVADTYDQSQSPMAKAHGTSSYTPDKSSFNLATVVAETLGLGVQEESETQGPMSPLGDELYHCLEGNHKKQPFESGSETPGTSESATPEGSPKRKVSSAEGAAKEEPKRRSARLSAKPPAKVEAKPKKAAAKDKSSDKKVQTKGKRGAKGKQAEVANQETKEDLPAENGETKTEESPASDEAGEKEAKSDSGSETPGTSESATPESYEQLAPQPCVGETLHSSLPRDSELFVPEEGSSEKESEDAPKTSPPTPGKHGLEQTGEEKVMVTVPDKNPPCPCCGTRVNSVLNLIEHLKVSHGKRGVCFRCAKCGKENSNYHSVVCHFKKCRGPETEKAPAGEWICEVCNRDFTTKIGLGQHKRLAHPAVRNQERIVASQPKETSNRGAHKRCWTKEEEELLIRLEAQFEGNKNINKLIAEHITTKTAKQISDKRRLLSRKPAEEPREEPGTCHHTRRAAASLRTEPEMSHHAQAEDRDNGPGRRPLPGRAAAGGRTMDEIRRHPDKGNGQQRPTKQKSEEQLQAYYKKTLEERLSAGALNTFPRAFKQVMEGRDIKLVINQTAQDCFGCLESISQIRTATRDKKDTVTREKHPKKPFQKWMKKRAIKKGNYLRFQRLFYLDRGKLAKIILDDIECLSCDIPLSEVYSVFKTRWETTGSFKSLGDFKTYGKADNTAFRELITAKEIEKNVQEMSKGSAPGPDGITLGDVVKMDPEFSRTMEIFNLWLTTGKIPDMVRGCRTVLIPKSSKPDRLKDINNWRPITIGSILLRLFSRIVTARLSKACPLNPRQRGFIRAAGCSENLKLLQTIIWSAKREHRPLGVVFVDIAKAFDTVSHQHIIHALQQREVDPHIVGLVSNMYENISTYITTKRNTHTDKIQIRVGVKQGDPMSPLLFNLAMDPLLCKLEESGKGYHRGQSSITAMAFADDLVLLSDSWENMNTNISILETFCNLTGLKTQGQKCHGFYIKPTKKSYTINDCAAWTINGTPLNMIDPGESEKYLGLQFDPWIGIARSGLSTKLDFWLQRIDQAPLKPLQKTDILKTYTIPRLIYIADHSEVKSALLETLDQKIRTAVKEWLHLPPCTCDAILYSSTRDGGLGITKLAGLIPSVQARRLHRIAQSSDDTMKCFMEKEKMEQLHKKLWIQAGGDRENIPSIWEAPPSSEPPNNVSTNSEWEAPTQKDKFPKPCNWRKNEFKKWTKLASQGRGIVNFERDKISNHWIQYYRRIPHRKLLTALQLRANVYPTREFLARGRQDQYIKACRHCDADNESCAHIIGNCPVTQDARIKRHNYICELLLEEAKKKDWVVFKEPHIRDSNKELYKPDLIFVKDGRALVVDVTVRYEAAKSSLEEAAAEKVRKYKHLETEVRHLTNAKDVTFVGFPLGARGKWHQDNFKLLTELGLSKSRQVKMAETFSTVALFSSVDIVHMFASRARKSMVM

SEQ ID NO: 888 - protein, 1665 aa, synthetic construct
MAPKKKRKVNISGSSCGSPNSADTSSDFKDLWTKLKECHDREVQGLQVKVTKLKQERILDAQRLEEFFTKNQQLREQQKVLHETIKVLEDRLRAGLCDRCAVTEEHMRKKQQEFENIRQQNLKLITELMNERNTLQEENKKLSEQLQQKIENDQQHQAAELECEEDVIPDSPITAFSFSGVNRLRRKENPHVRYIEQTHTKLEHSVCANEMRKVSKSSTHPQHNPNENEILVADTYDQSQSPMAKAHGTSSYTPDKSSFNLATVVAETLGLGVQEESETQGPMSPLGDELYHCLEGNHKKQPFESGSETPGTSESATPEGSPKRKVSSAEGAAKEEPKRRSARLSAKPPAKVEAKPKKAAAKDKSSDKKVQTKGKRGAKGKQAEVANQETKEDLPAENGETKTEESPASDEAGEKEAKSDSGSETPGTSESATPESYEQLAPQPCVGETLHSSLPRDSELFVPEEGSSEKESEDAPKTSPPTPGKHGLEQTGEEKVMVTVPDKNPPCPCCGTRVNSVLNLIEHLKVSHGKRGVCFRCAKCGKENSNYHSVVCHFKKCRGPETEKAPAGEWICEVCNRDFTTKIGLGQHKRLAHPAVRNQERIVASQPKETSNRGAHKRCWTKEEEELLIRLEAQFEGNKNINKLIAEHITTKTAKQISDKRRLLSRKPAEEPREEPGTCHHTRRAAASLRTEPEMSHHAQAEDRDNGPGRRPLPGRAAAGGRTMDEIRRHPDKGNGQQRPTKQKSEEQLQAYYKKTLEERLSAGALNTFPRAFKQVMEGRDIKLVINQTAQDCFGCLESISQIRTATRDKKDTVTREKHPKKPFQKWMKKRAIKKGNYLRFQRLFYLDRGKLAKIILDDIECLSCDIPLSEIYSVYKTRWETTGSFKSLGDFKTYGKADNTAFRELITAKEIEKNVQEMSKGSAPGPDGITLGDVVKMDPEFSRTMEIFNLWLTTGKIPDMVRGCRTVLIPKSSKPDRLKDINNWRPITIGSILLRLFSRIVTARLSKACPLNPRQRGFIRAAGCSENLKLLQTIIWSAKREHRPLGVVFVDIAKAFDTVSHQHIIHALQQREVDPHIVGLVSNMYENISTYITTKRNTHTDKIQIRVGVKQGDPMSPLLFNLAMDPLLCKLEESGKGYHRGQSSITAMAFADDLVLLSDSWENMNTNISILETFCNLTGLKTQGQKCHGFYIKPTKKSYTINDCAAWTINGTPLNMIDPGESEKYLGLQFDPWIGIARSGLSTKLDFWLQRIDQAPLKPLQKTDILKTYTIPRLIYIADHSEVKSALLETLDQKIRTAVKEWLHLPPCTCDAILYSSTRDGGLGITKLAGLIPSVQARRLHRIAQSSDDTMKCFMEKEKMEQLHKKLWIQAGGDRENIPSIWEAPPSSEPPNNVSTNSEWEAPTQKDKFPKPCNWRKNEFKKWTKLASQGRGIVNFERDKISNHWIQYYRRIPHRKLLTALQLRANVYPTREFLARGRQDQYIKACRHCDADNESCAHIIGNCPVTQDARIKRHNYICELLLEEAKKKDWVVFKEPHIRDSNKELYKPDLIFVKDGRALVVDVTVRYEAAKSSLEEAAAEKVRKYKHLETEVRHLTNAKDVTFVGFPLGARGKWHQDNFKLLTELGLSKSRQVKMAETFSTVALFSSVDIVHMFASRARKSMVM

SEQ ID NO: 889 - protein, 1665 aa, synthetic construct
MAPKKKRKVNISGSSCGSPNSADTSSDFKDLWTKLKECHDREVQGLQVKVTKLKQERILDAQRLEEFFTKNQQLREQQKVLHETIKVLEDRLRAGLCDRCAVTEEHMRKKQQEFENIRQQNLKLITELMNERNTLQEENKKLSEQLQQKIENDQQHQAAELECEEDVIPDSPITAFSFSGVNRLRRKENPHVRYIEQTHTKLEHSVCANEMRKVSKSSTHPQHNPNENEILVADTYDQSQSPMAKAHGTSSYTPDKSSFNLATVVAETLGLGVQEESETQGPMSPLGDELYHCLEGNHKKQPFESGSETPGTSESATPEGSPKRKVSSAEGAAKEEPKRRSARLSAKPPAKVEAKPKKAAAKDKSSDKKVQTKGKRGAKGKQAEVANQETKEDLPAENGETKTEESPASDEAGEKEAKSDSGSETPGTSESATPESYEQLAPQPCVGETLHSSLPRDSELFVPEEGSSEKESEDAPKTSPPTPGKHGLEQTGEEKVMVTVPDKNPPCPCCGTRVNSVLNLIEHLKVSHGKRGVCFRCAKCGKENSNYHSVVCHFKKCRGPETEKAPAGEWICEVCNRDFTTKIGLGQHKRLAHPAVRNQERIVASQPKETSNRGAHKRCWTKEEEELLIRLEAQFEGNKNINKLIAEHITTKTAKQISDKRRLLSRKPAEEPREEPGTCHHTRRAAASLRTEPEMSHHAQAEDRDNGPGRRPLPGRAAAGGRTMDEIRRHPDKGNGQQRPTKQKSEEQLQAYYKKTLEERLSAGALNTFPRAFKQVMEGRDIKLVINQTAQDCFGCLESISQIRTATRDKKDTVTREKHPKKPFQKWMKKRAIKKGNYLRFQRLFYLDRGKLAKIILDDIECLSCDIPLSEIYSVFKTRWETTGSFKSLGDFKTYGKADNTALRELITAKEIEKNVQEMSKGSAPGPDGITLGDVVKMDPEFSRTMEIFNLWLTTGKIPDMVRGCRTVLIPKSSKPDRLKDINNWRPITIGSILLRLFSRIVTARLSKACPLNPRQRGFIRAAGCSENLKLLQTIIWSAKREHRPLGVVFVDIAKAFDTVSHQHIIHALQQREVDPHIVGLVSNMYENISTYITTKRNTHTDKIQIRVGVKQGDPMSPLLFNLAMDPLLCKLEESGKGYHRGQSSITAMAFADDLVLLSDSWENMNTNISILETFCNLTGLKTQGQKCHGFYIKPTKKSYTINDCAAWTINGTPLNMIDPGESEKYLGLQFDPWIGIARSGLSTKLDFWLQRIDQAPLKPLQKTDILKTYTIPRLIYIADHSEVKSALLETLDQKIRTAVKEWLHLPPCTCDAILYSSTRDGGLGITKLAGLIPSVQARRLHRIAQSSDDTMKCFMEKEKMEQLHKKLWIQAGGDRENIPSIWEAPPSSEPPNNVSTNSEWEAPTQKDKFPKPCNWRKNEFKKWTKLASQGRGIVNFERDKISNHWIQYYRRIPHRKLLTALQLRANVYPTREFLARGRQDQYIKACRHCDADNESCAHIIGNCPVTQDARIKRHNYICELLLEEAKKKDWVVFKEPHIRDSNKELYKPDLIFVKDGRALVVDVTVRYEAAKSSLEEAAAEKVRKYKHLETEVRHLTNAKDVTFVGFPLGARGKWHQDNFKLLTELGLSKSRQVKMAETFSTVALFSSVDIVHMFASRARKSMVM

SEQ ID NO: 890 - protein, 1665 aa, synthetic construct
MAPKKKRKVNISGSSCGSPNSADTSSDFKDLWTKLKECHDREVQGLQVKVTKLKQERILDAQRLEEFFTKNQQLREQQKVLHETIKVLEDRLRAGLCDRCAVTEEHMRKKQQEFENIRQQNLKLITELMNERNTLQEENKKLSEQLQQKIENDQQHQAAELECEEDVIPDSPITAFSFSGVNRLRRKENPHVRYIEQTHTKLEHSVCANEMRKVSKSSTHPQHNPNENEILVADTYDQSQSPMAKAHGTSSYTPDKSSFNLATVVAETLGLGVQEESETQGPMSPLGDELYHCLEGNHKKQPFESGSETPGTSESATPEGSPKRKVSSAEGAAKEEPKRRSARLSAKPPAKVEAKPKKAAAKDKSSDKKVQTKGKRGAKGKQAEVANQETKEDLPAENGETKTEESPASDEAGEKEAKSDSGSETPGTSESATPESYEQLAPQPCVGETLHSSLPRDSELFVPEEGSSEKESEDAPKTSPPTPGKHGLEQTGEEKVMVTVPDKNPPCPCCGTRVNSVLNLIEHLKVSHGKRGVCFRCAKCGKENSNYHSVVCHFKKCRGPETEKAPAGEWICEVCNRDFTTKIGLGQHKRLAHPAVRNQERIVASQPKETSNRGAHKRCWTKEEEELLIRLEAQFEGNKNINKLIAEHITTKTAKQISDKRRLLSRKPAEEPREEPGTCHHTRRAAASLRTEPEMSHHAQAEDRDNGPGRRPLPGRAAAGGRTMDEIRRHPDKGNGQQRPTKQKSEEQLQAYYKKTLEERLSAGALNTFPRAFKQVMEGRDIKLVINQTAQDCFGCLESISQIRTATRDKKDTVTREKHPKKPFQKWMKKRAIKKGNYLRFQRLFYLDRGKLAKIILDDIECLSCDIPLSEIYSVFKTRWETTGSFKSLGDFKTYGKADNTAFREPITAKEIEKNVQEMSKGSAPGPDGITLGDVVKMDPEFSRTMEIFNLWLTTGKIPDMVRGCRTVLIPKSSKPDRLKDINNWRPITIGSILLRLFSRIVTARLSKACPLNPRQRGFIRAAGCSENLKLLQTIIWSAKREHRPLGVVFVDIAKAFDTVSHQHIIHALQQREVDPHIVGLVSNMYENISTYITTKRNTHTDKIQIRVGVKQGDPMSPLLFNLAMDPLLCKLEESGKGYHRGQSSITAMAFADDLVLLSDSWENMNTNISILETFCNLTGLKTQGQKCHGFYIKPTKKSYTINDCAAWTINGTPLNMIDPGESEKYLGLQFDPWIGIARSGLSTKLDFWLQRIDQAPLKPLQKTDILKTYTIPRLIYIADHSEVKSALLETLDQKIRTAVKEWLHLPPCTCDAILYSSTRDGGLGITKLAGLIPSVQARRLHRIAQSSDDTMKCFMEKEKMEQLHKKLWIQAGGDRENIPSIWEAPPSSEPPNNVSTNSEWEAPTQKDKFPKPCNWRKNEFKKWTKLASQGRGIVNFERDKISNHWIQYYRRIPHRKLLTALQLRANVYPTREFLARGRQDQYIKACRHCDADNESCAHIIGNCPVTQDARIKRHNYICELLLEEAKKKDWVVFKEPHIRDSNKELYKPDLIFVKDGRALVVDVTVRYEAAKSSLEEAAAEKVRKYKHLETEVRHLTNAKDVTFVGFPLGARGKWHQDNFKLLTELGLSKSRQVKMAETFSTVALFSSVDIVHMFASRARKSMVM

SEQ ID NO: 891 - protein, 1665 aa, synthetic construct
MAPKKKRKVNISGSSCGSPNSADTSSDFKDLWTKLKECHDREVQGLQVKVTKLKQERILDAQRLEEFFTKNQQLREQQKVLHETIKVLEDRLRAGLCDRCAVTEEHMRKKQQEFENIRQQNLKLITELMNERNTLQEENKKLSEQLQQKIENDQQHQAAELECEEDVIPDSPITAFSFSGVNRLRRKENPHVRYIEQTHTKLEHSVCANEMRKVSKSSTHPQHNPNENEILVADTYDQSQSPMAKAHGTSSYTPDKSSFNLATVVAETLGLGVQEESETQGPMSPLGDELYHCLEGNHKKQPFESGSETPGTSESATPEGSPKRKVSSAEGAAKEEPKRRSARLSAKPPAKVEAKPKKAAAKDKSSDKKVQTKGKRGAKGKQAEVANQETKEDLPAENGETKTEESPASDEAGEKEAKSDSGSETPGTSESATPESYEQLAPQPCVGETLHSSLPRDSELFVPEEGSSEKESEDAPKTSPPTPGKHGLEQTGEEKVMVTVPDKNPPCPCCGTRVNSVLNLIEHLKVSHGKRGVCFRCAKCGKENSNYHSVVCHFKKCRGPETEKAPAGEWICEVCNRDFTTKIGLGQHKRLAHPAVRNQERIVASQPKETSNRGAHKRCWTKEEEELLIRLEAQFEGNKNINKLIAEHITTKTAKQISDKRRLLSRKPAEEPREEPGTCHHTRRAAASLRTEPEMSHHAQAEDRDNGPGRRPLPGRAAAGGRTMDEIRRHPDKGNGQQRPTKQKSEEQLQAYYKKTLEERLSAGALNTFPRAFKQVMEGRDIKLVINQTAQDCFGCLESISQIRTATRDKKDTVTREKHPKKPFQKWMKKRAIKKGNYLRFQRLFYLDRGKLAKIILDDIECLSCDIPLSEIYSVFKTRWETTGSFKSLGDFKTYGKADNTAFRELITAKEIEKNLQEMSKGSAPGPDGITLGDVVKMDPEFSRTMEIFNLWLTTGKIPDMVRGCRTVLIPKSSKPDRLKDINNWRPITIGSILLRLFSRIVTARLSKACPLNPRQRGFIRAAGCSENLKLLQTIIWSAKREHRPLGVVFVDIAKAFDTVSHQHIIHALQQREVDPHIVGLVSNMYENISTYITTKRNTHTDKIQIRVGVKQGDPMSPLLFNLAMDPLLCKLEESGKGYHRGQSSITAMAFADDLVLLSDSWENMNTNISILETFCNLTGLKTQGQKCHGFYIKPTKKSYTINDCAAWTINGTPLNMIDPGESEKYLGLQFDPWIGIARSGLSTKLDFWLQRIDQAPLKPLQKTDILKTYTIPRLIYIADHSEVKSALLETLDQKIRTAVKEWLHLPPCTCDAILYSSTRDGGLGITKLAGLIPSVQARRLHRIAQSSDDTMKCFMEKEKMEQLHKKLWIQAGGDRENIPSIWEAPPSSEPPNNVSTNSEWEAPTQKDKFPKPCNWRKNEFKKWTKLASQGRGIVNFERDKISNHWIQYYRRIPHRKLLTALQLRANVYPTREFLARGRQDQYIKACRHCDADNESCAHIIGNCPVTQDARIKRHNYICELLLEEAKKKDWVVFKEPHIRDSNKELYKPDLIFVKDGRALVVDVTVRYEAAKSSLEEAAAEKVRKYKHLETEVRHLTNAKDVTFVGFPLGARGKWHQDNFKLLTELGLSKSRQVKMAETFSTVALFSSVDIVHMFASRARKSMVM

SEQ ID NO: 892 - protein, 1665 aa, synthetic construct
MAPKKKRKVNISGSSCGSPNSADTSSDFKDLWTKLKECHDREVQGLQVKVTKLKQERILDAQRLEEFFTKNQQLREQQKVLHETIKVLEDRLRAGLCDRCAVTEEHMRKKQQEFENIRQQNLKLITELMNERNTLQEENKKLSEQLQQKIENDQQHQAAELECEEDVIPDSPITAFSFSGVNRLRRKENPHVRYIEQTHTKLEHSVCANEMRKVSKSSTHPQHNPNENEILVADTYDQSQSPMAKAHGTSSYTPDKSSFNLATVVAETLGLGVQEESETQGPMSPLGDELYHCLEGNHKKQPFESGSETPGTSESATPEGSPKRKVSSAEGAAKEEPKRRSARLSAKPPAKVEAKPKKAAAKDKSSDKKVQTKGKRGAKGKQAEVANQETKEDLPAENGETKTEESPASDEAGEKEAKSDSGSETPGTSESATPESYEQLAPQPCVGETLHSSLPRDSELFVPEEGSSEKESEDAPKTSPPTPGKHGLEQTGEEKVMVTVPDKNPPCPCCGTRVNSVLNLIEHLKVSHGKRGVCFRCAKCGKENSNYHSVVCHFKKCRGPETEKAPAGEWICEVCNRDFTTKIGLGQHKRLAHPAVRNQERIVASQPKETSNRGAHKRCWTKEEEELLIRLEAQFEGNKNINKLIAEHITTKTAKQISDKRRLLSRKPAEEPREEPGTCHHTRRAAASLRTEPEMSHHAQAEDRDNGPGRRPLPGRAAAGGRTMDEIRRHPDKGNGQQRPTKQKSEEQLQAYYKKTLEERLSAGALNTFPRAFKQVMEGRDIKLVINQTAQDCFGCLESISQIRTATRDKKDTVTREKHPKKPFQKWMKKRAIKKGNYLRFQRLFYLDRGKLAKIILDDIECLSCDIPLSEIYSVFKTRWETTGSFKSLGDFKTYGKADNTAFRELITAKEIEKNVQEMSKGSSPGPDGITLGDVVKMDPEFSRTMEIFNLWLTTGKIPDMVRGCRTVLIPKSSKPDRLKDINNWRPITIGSILLRLFSRIVTARLSKACPLNPRQRGFIRAAGCSENLKLLQTIIWSAKREHRPLGVVFVDIAKAFDTVSHQHIIHALQQREVDPHIVGLVSNMYENISTYITTKRNTHTDKIQIRVGVKQGDPMSPLLFNLAMDPLLCKLEESGKGYHRGQSSITAMAFADDLVLLSDSWENMNTNISILETFCNLTGLKTQGQKCHGFYIKPTKKSYTINDCAAWTINGTPLNMIDPGESEKYLGLQFDPWIGIARSGLSTKLDFWLQRIDQAPLKPLQKTDILKTYTIPRLIYIADHSEVKSALLETLDQKIRTAVKEWLHLPPCTCDAILYSSTRDGGLGITKLAGLIPSVQARRLHRIAQSSDDTMKCFMEKEKMEQLHKKLWIQAGGDRENIPSIWEAPPSSEPPNNVSTNSEWEAPTQKDKFPKPCNWRKNEFKKWTKLASQGRGIVNFERDKISNHWIQYYRRIPHRKLLTALQLRANVYPTREFLARGRQDQYIKACRHCDADNESCAHIIGNCPVTQDARIKRHNYICELLLEEAKKKDWVVFKEPHIRDSNKELYKPDLIFVKDGRALVVDVTVRYEAAKSSLEEAAAEKVRKYKHLETEVRHLTNAKDVTFVGFPLGARGKWHQDNFKLLTELGLSKSRQVKMAETFSTVALFSSVDIVHMFASRARKSMVM

SEQ ID NO: 893 - protein, 1665 aa, synthetic construct
MAPKKKRKVNISGSSCGSPNSADTSSDFKDLWTKLKECHDREVQGLQVKVTKLKQERILDAQRLEEFFTKNQQLREQQKVLHETIKVLEDRLRAGLCDRCAVTEEHMRKKQQEFENIRQQNLKLITELMNERNTLQEENKKLSEQLQQKIENDQQHQAAELECEEDVIPDSPITAFSFSGVNRLRRKENPHVRYIEQTHTKLEHSVCANEMRKVSKSSTHPQHNPNENEILVADTYDQSQSPMAKAHGTSSYTPDKSSFNLATVVAETLGLGVQEESETQGPMSPLGDELYHCLEGNHKKQPFESGSETPGTSESATPEGSPKRKVSSAEGAAKEEPKRRSARLSAKPPAKVEAKPKKAAAKDKSSDKKVQTKGKRGAKGKQAEVANQETKEDLPAENGETKTEESPASDEAGEKEAKSDSGSETPGTSESATPESYEQLAPQPCVGETLHSSLPRDSELFVPEEGSSEKESEDAPKTSPPTPGKHGLEQTGEEKVMVTVPDKNPPCPCCGTRVNSVLNLIEHLKVSHGKRGVCFRCAKCGKENSNYHSVVCHFKKCRGPETEKAPAGEWICEVCNRDFTTKIGLGQHKRLAHPAVRNQERIVASQPKETSNRGAHKRCWTKEEEELLIRLEAQFEGNKNINKLIAEHITTKTAKQISDKRRLLSRKPAEEPREEPGTCHHTRRAAASLRTEPEMSHHAQAEDRDNGPGRRPLPGRAAAGGRTMDEIRRHPDKGNGQQRPTKQKSEEQLQAYYKKTLEERLSAGALNTFPRAFKQVMEGRDIKLVINQTAQDCFGCLESISQIRTATRDKKDTVTREKHPKKPFQKWMKKRAIKKGNYLRFQRLFYLDRGKLAKIILDDIECLSCDIPLSEIYSVFKTRWETTGSFKSLGDFKTYGKADNTAFRELITAKEIEKNVQEMSKGSAAGPDGITLGDVVKMDPEFSRTMEIFNLWLTTGKIPDMVRGCRTVLIPKSSKPDRLKDINNWRPITIGSILLRLFSRIVTARLSKACPLNPRQRGFIRAAGCSENLKLLQTIIWSAKREHRPLGVVFVDIAKAFDTVSHQHIIHALQQREVDPHIVGLVSNMYENISTYITTKRNTHTDKIQIRVGVKQGDPMSPLLFNLAMDPLLCKLEESGKGYHRGQSSITAMAFADDLVLLSDSWENMNTNISILETFCNLTGLKTQGQKCHGFYIKPTKKSYTINDCAAWTINGTPLNMIDPGESEKYLGLQFDPWIGIARSGLSTKLDFWLQRIDQAPLKPLQKTDILKTYTIPRLIYIADHSEVKSALLETLDQKIRTAVKEWLHLPPCTCDAILYSSTRDGGLGITKLAGLIPSVQARRLHRIAQSSDDTMKCFMEKEKMEQLHKKLWIQAGGDRENIPSIWEAPPSSEPPNNVSTNSEWEAPTQKDKFPKPCNWRKNEFKKWTKLASQGRGIVNFERDKISNHWIQYYRRIPHRKLLTALQLRANVYPTREFLARGRQDQYIKACRHCDADNESCAHIIGNCPVTQDARIKRHNYICELLLEEAKKKDWVVFKEPHIRDSNKELYKPDLIFVKDGRALVVDVTVRYEAAKSSLEEAAAEKVRKYKHLETEVRHLTNAKDVTFVGFPLGARGKWHQDNFKLLTELGLSKSRQVKMAETFSTVALFSSVDIVHMFASRARKSMVM

SEQ ID NO: 894 - protein, 1665 aa, synthetic construct
MAPKKKRKVNISGSSCGSPNSADTSSDFKDLWTKLKECHDREVQGLQVKVTKLKQERILDAQRLEEFFTKNQQLREQQKVLHETIKVLEDRLRAGLCDRCAVTEEHMRKKQQEFENIRQQNLKLITELMNERNTLQEENKKLSEQLQQKIENDQQHQAAELECEEDVIPDSPITAFSFSGVNRLRRKENPHVRYIEQTHTKLEHSVCANEMRKVSKSSTHPQHNPNENEILVADTYDQSQSPMAKAHGTSSYTPDKSSFNLATVVAETLGLGVQEESETQGPMSPLGDELYHCLEGNHKKQPFESGSETPGTSESATPEGSPKRKVSSAEGAAKEEPKRRSARLSAKPPAKVEAKPKKAAAKDKSSDKKVQTKGKRGAKGKQAEVANQETKEDLPAENGETKTEESPASDEAGEKEAKSDSGSETPGTSESATPESYEQLAPQPCVGETLHSSLPRDSELFVPEEGSSEKESEDAPKTSPPTPGKHGLEQTGEEKVMVTVPDKNPPCPCCGTRVNSVLNLIEHLKVSHGKRGVCFRCAKCGKENSNYHSVVCHFKKCRGPETEKAPAGEWICEVCNRDFTTKIGLGQHKRLAHPAVRNQERIVASQPKETSNRGAHKRCWTKEEEELLIRLEAQFEGNKNINKLIAEHITTKTAKQISDKRRLLSRKPAEEPREEPGTCHHTRRAAASLRTEPEMSHHAQAEDRDNGPGRRPLPGRAAAGGRTMDEIRRHPDKGNGQQRPTKQKSEEQLQAYYKKTLEERLSAGALNTFPRAFKQVMEGRDIKLVINQTAQDCFGCLESISQIRTATRDKKDTVTREKHPKKPFQKWMKKRAIKKGNYLRFQRLFYLDRGKLAKIILDDIECLSCDIPLSEIYSVFKTRWETTGSFKSLGDFKTYGKADNTAFRELITAKEIEKNVQEMSKGSAPGPDGITLGDIVKMDPEFSRTMEIFNLWLTTGKIPDMVRGCRTVLIPKSSKPDRLKDINNWRPITIGSILLRLFSRIVTARLSKACPLNPRQRGFIRAAGCSENLKLLQTIIWSAKREHRPLGVVFVDIAKAFDTVSHQHIIHALQQREVDPHIVGLVSNMYENISTYITTKRNTHTDKIQIRVGVKQGDPMSPLLFNLAMDPLLCKLEESGKGYHRGQSSITAMAFADDLVLLSDSWENMNTNISILETFCNLTGLKTQGQKCHGFYIKPTKKSYTINDCAAWTINGTPLNMIDPGESEKYLGLQFDPWIGIARSGLSTKLDFWLQRIDQAPLKPLQKTDILKTYTIPRLIYIADHSEVKSALLETLDQKIRTAVKEWLHLPPCTCDAILYSSTRDGGLGITKLAGLIPSVQARRLHRIAQSSDDTMKCFMEKEKMEQLHKKLWIQAGGDRENIPSIWEAPPSSEPPNNVSTNSEWEAPTQKDKFPKPCNWRKNEFKKWTKLASQGRGIVNFERDKISNHWIQYYRRIPHRKLLTALQLRANVYPTREFLARGRQDQYIKACRHCDADNESCAHIIGNCPVTQDARIKRHNYICELLLEEAKKKDWVVFKEPHIRDSNKELYKPDLIFVKDGRALVVDVTVRYEAAKSSLEEAAAEKVRKYKHLETEVRHLTNAKDVTFVGFPLGARGKWHQDNFKLLTELGLSKSRQVKMAETFSTVALFSSVDIVHMFASRARKSMVM

SEQ ID NO: 895 - protein, 1665 aa, synthetic construct
MAPKKKRKVNISGSSCGSPNSADTSSDFKDLWTKLKECHDREVQGLQVKVTKLKQERILDAQRLEEFFTKNQQLREQQKVLHETIKVLEDRLRAGLCDRCAVTEEHMRKKQQEFENIRQQNLKLITELMNERNTLQEENKKLSEQLQQKIENDQQHQAAELECEEDVIPDSPITAFSFSGVNRLRRKENPHVRYIEQTHTKLEHSVCANEMRKVSKSSTHPQHNPNENEILVADTYDQSQSPMAKAHGTSSYTPDKSSFNLATVVAETLGLGVQEESETQGPMSPLGDELYHCLEGNHKKQPFESGSETPGTSESATPEGSPKRKVSSAEGAAKEEPKRRSARLSAKPPAKVEAKPKKAAAKDKSSDKKVQTKGKRGAKGKQAEVANQETKEDLPAENGETKTEESPASDEAGEKEAKSDSGSETPGTSESATPESYEQLAPQPCVGETLHSSLPRDSELFVPEEGSSEKESEDAPKTSPPTPGKHGLEQTGEEKVMVTVPDKNPPCPCCGTRVNSVLNLIEHLKVSHGKRGVCFRCAKCGKENSNYHSVVCHFKKCRGPETEKAPAGEWICEVCNRDFTTKIGLGQHKRLAHPAVRNQERIVASQPKETSNRGAHKRCWTKEEEELLIRLEAQFEGNKNINKLIAEHITTKTAKQISDKRRLLSRKPAEEPREEPGTCHHTRRAAASLRTEPEMSHHAQAEDRDNGPGRRPLPGRAAAGGRTMDEIRRHPDKGNGQQRPTKQKSEEQLQAYYKKTLEERLSAGALNTFPRAFKQVMEGRDIKLVINQTAQDCFGCLESISQIRTATRDKKDTVTREKHPKKPFQKWMKKRAIKKGNYLRFQRLFYLDRGKLAKIILDDIECLSCDIPLSEIYSVFKTRWETTGSFKSLGDFKTYGKADNTAFRELITAKEIEKNVQEMSKGSAPGPDGITLGDVKKMDPEFSRTMEIFNLWLTTGKIPDMVRGCRTVLIPKSSKPDRLKDINNWRPITIGSILLRLFSRIVTARLSKACPLNPRQRGFIRAAGCSENLKLLQTIIWSAKREHRPLGVVFVDIAKAFDTVSHQHIIHALQQREVDPHIVGLVSNMYENISTYITTKRNTHTDKIQIRVGVKQGDPMSPLLFNLAMDPLLCKLEESGKGYHRGQSSITAMAFADDLVLLSDSWENMNTNISILETFCNLTGLKTQGQKCHGFYIKPTKKSYTINDCAAWTINGTPLNMIDPGESEKYLGLQFDPWIGIARSGLSTKLDFWLQRIDQAPLKPLQKTDILKTYTIPRLIYIADHSEVKSALLETLDQKIRTAVKEWLHLPPCTCDAILYSSTRDGGLGITKLAGLIPSVQARRLHRIAQSSDDTMKCFMEKEKMEQLHKKLWIQAGGDRENIPSIWEAPPSSEPPNNVSTNSEWEAPTQKDKFPKPCNWRKNEFKKWTKLASQGRGIVNFERDKISNHWIQYYRRIPHRKLLTALQLRANVYPTREFLARGRQDQYIKACRHCDADNESCAHIIGNCPVTQDARIKRHNYICELLLEEAKKKDWVVFKEPHIRDSNKELYKPDLIFVKDGRALVVDVTVRYEAAKSSLEEAAAEKVRKYKHLETEVRHLTNAKDVTFVGFPLGARGKWHQDNFKLLTELGLSKSRQVKMAETFSTVALFSSVDIVHMFASRARKSMVM

SEQ ID NO: 896 - protein, 1665 aa, synthetic construct
MAPKKKRKVNISGSSCGSPNSADTSSDFKDLWTKLKECHDREVQGLQVKVTKLKQERILDAQRLEEFFTKNQQLREQQKVLHETIKVLEDRLRAGLCDRCAVTEEHMRKKQQEFENIRQQNLKLITELMNERNTLQEENKKLSEQLQQKIENDQQHQAAELECEEDVIPDSPITAFSFSGVNRLRRKENPHVRYIEQTHTKLEHSVCANEMRKVSKSSTHPQHNPNENEILVADTYDQSQSPMAKAHGTSSYTPDKSSFNLATVVAETLGLGVQEESETQGPMSPLGDELYHCLEGNHKKQPFESGSETPGTSESATPEGSPKRKVSSAEGAAKEEPKRRSARLSAKPPAKVEAKPKKAAAKDKSSDKKVQTKGKRGAKGKQAEVANQETKEDLPAENGETKTEESPASDEAGEKEAKSDSGSETPGTSESATPESYEQLAPQPCVGETLHSSLPRDSELFVPEEGSSEKESEDAPKTSPPTPGKHGLEQTGEEKVMVTVPDKNPPCPCCGTRVNSVLNLIEHLKVSHGKRGVCFRCAKCGKENSNYHSVVCHFKKCRGPETEKAPAGEWICEVCNRDFTTKIGLGQHKRLAHPAVRNQERIVASQPKETSNRGAHKRCWTKEEEELLIRLEAQFEGNKNINKLIAEHITTKTAKQISDKRRLLSRKPAEEPREEPGTCHHTRRAAASLRTEPEMSHHAQAEDRDNGPGRRPLPGRAAAGGRTMDEIRRHPDKGNGQQRPTKQKSEEQLQAYYKKTLEERLSAGALNTFPRAFKQVMEGRDIKLVINQTAQDCFGCLESISQIRTATRDKKDTVTREKHPKKPFQKWMKKRAIKKGNYLRFQRLFYLDRGKLAKIILDDIECLSCDIPLSEIYSVFKTRWETTGSFKSLGDFKTYGKADNTAFRELITAKEIEKNVQEMSKGSAPGPDGITLGDVVKMDPKFSRTMEIFNLWLTTGKIPDMVRGCRTVLIPKSSKPDRLKDINNWRPITIGSILLRLFSRIVTARLSKACPLNPRQRGFIRAAGCSENLKLLQTIIWSAKREHRPLGVVFVDIAKAFDTVSHQHIIHALQQREVDPHIVGLVSNMYENISTYITTKRNTHTDKIQIRVGVKQGDPMSPLLFNLAMDPLLCKLEESGKGYHRGQSSITAMAFADDLVLLSDSWENMNTNISILETFCNLTGLKTQGQKCHGFYIKPTKKSYTINDCAAWTINGTPLNMIDPGESEKYLGLQFDPWIGIARSGLSTKLDFWLQRIDQAPLKPLQKTDILKTYTIPRLIYIADHSEVKSALLETLDQKIRTAVKEWLHLPPCTCDAILYSSTRDGGLGITKLAGLIPSVQARRLHRIAQSSDDTMKCFMEKEKMEQLHKKLWIQAGGDRENIPSIWEAPPSSEPPNNVSTNSEWEAPTQKDKFPKPCNWRKNEFKKWTKLASQGRGIVNFERDKISNHWIQYYRRIPHRKLLTALQLRANVYPTREFLARGRQDQYIKACRHCDADNESCAHIIGNCPVTQDARIKRHNYICELLLEEAKKKDWVVFKEPHIRDSNKELYKPDLIFVKDGRALVVDVTVRYEAAKSSLEEAAAEKVRKYKHLETEVRHLTNAKDVTFVGFPLGARGKWHQDNFKLLTELGLSKSRQVKMAETFSTVALFSSVDIVHMFASRARKSMVM

SEQ ID NO: 897 - protein, 1665 aa, synthetic construct
MAPKKKRKVNISGSSCGSPNSADTSSDFKDLWTKLKECHDREVQGLQVKVTKLKQERILDAQRLEEFFTKNQQLREQQKVLHETIKVLEDRLRAGLCDRCAVTEEHMRKKQQEFENIRQQNLKLITELMNERNTLQEENKKLSEQLQQKIENDQQHQAAELECEEDVIPDSPITAFSFSGVNRLRRKENPHVRYIEQTHTKLEHSVCANEMRKVSKSSTHPQHNPNENEILVADTYDQSQSPMAKAHGTSSYTPDKSSFNLATVVAETLGLGVQEESETQGPMSPLGDELYHCLEGNHKKQPFESGSETPGTSESATPEGSPKRKVSSAEGAAKEEPKRRSARLSAKPPAKVEAKPKKAAAKDKSSDKKVQTKGKRGAKGKQAEVANQETKEDLPAENGETKTEESPASDEAGEKEAKSDSGSETPGTSESATPESYEQLAPQPCVGETLHSSLPRDSELFVPEEGSSEKESEDAPKTSPPTPGKHGLEQTGEEKVMVTVPDKNPPCPCCGTRVNSVLNLIEHLKVSHGKRGVCFRCAKCGKENSNYHSVVCHFKKCRGPETEKAPAGEWICEVCNRDFTTKIGLGQHKRLAHPAVRNQERIVASQPKETSNRGAHKRCWTKEEEELLIRLEAQFEGNKNINKLIAEHITTKTAKQISDKRRLLSRKPAEEPREEPGTCHHTRRAAASLRTEPEMSHHAQAEDRDNGPGRRPLPGRAAAGGRTMDEIRRHPDKGNGQQRPTKQKSEEQLQAYYKKTLEERLSAGALNTFPRAFKQVMEGRDIKLVINQTAQDCFGCLESISQIRTATRDKKDTVTREKHPKKPFQKWMKKRAIKKGNYLRFQRLFYLDRGKLAKIILDDIECLSCDIPLSEIYSVFKTRWETTGSFKSLGDFKTYGKADNTAFRELITAKEIEKNVQEMSKGSAPGPDGITLGDVVKMDPEFSRTMRIFNLWLTTGKIPDMVRGCRTVLIPKSSKPDRLKDINNWRPITIGSILLRLFSRIVTARLSKACPLNPRQRGFIRAAGCSENLKLLQTIIWSAKREHRPLGVVFVDIAKAFDTVSHQHIIHALQQREVDPHIVGLVSNMYENISTYITTKRNTHTDKIQIRVGVKQGDPMSPLLFNLAMDPLLCKLEESGKGYHRGQSSITAMAFADDLVLLSDSWENMNTNISILETFCNLTGLKTQGQKCHGFYIKPTKKSYTINDCAAWTINGTPLNMIDPGESEKYLGLQFDPWIGIARSGLSTKLDFWLQRIDQAPLKPLQKTDILKTYTIPRLIYIADHSEVKSALLETLDQKIRTAVKEWLHLPPCTCDAILYSSTRDGGLGITKLAGLIPSVQARRLHRIAQSSDDTMKCFMEKEKMEQLHKKLWIQAGGDRENIPSIWEAPPSSEPPNNVSTNSEWEAPTQKDKFPKPCNWRKNEFKKWTKLASQGRGIVNFERDKISNHWIQYYRRIPHRKLLTALQLRANVYPTREFLARGRQDQYIKACRHCDADNESCAHIIGNCPVTQDARIKRHNYICELLLEEAKKKDWVVFKEPHIRDSNKELYKPDLIFVKDGRALVVDVTVRYEAAKSSLEEAAAEKVRKYKHLETEVRHLTNAKDVTFVGFPLGARGKWHQDNFKLLTELGLSKSRQVKMAETFSTVALFSSVDIVHMFASRARKSMVM

SEQ ID NO: 898 - protein, 1665 aa, synthetic construct
MAPKKKRKVNISGSSCGSPNSADTSSDFKDLWTKLKECHDREVQGLQVKVTKLKQERILDAQRLEEFFTKNQQLREQQKVLHETIKVLEDRLRAGLCDRCAVTEEHMRKKQQEFENIRQQNLKLITELMNERNTLQEENKKLSEQLQQKIENDQQHQAAELECEEDVIPDSPITAFSFSGVNRLRRKENPHVRYIEQTHTKLEHSVCANEMRKVSKSSTHPQHNPNENEILVADTYDQSQSPMAKAHGTSSYTPDKSSFNLATVVAETLGLGVQEESETQGPMSPLGDELYHCLEGNHKKQPFESGSETPGTSESATPEGSPKRKVSSAEGAAKEEPKRRSARLSAKPPAKVEAKPKKAAAKDKSSDKKVQTKGKRGAKGKQAEVANQETKEDLPAENGETKTEESPASDEAGEKEAKSDSGSETPGTSESATPESYEQLAPQPCVGETLHSSLPRDSELFVPEEGSSEKESEDAPKTSPPTPGKHGLEQTGEEKVMVTVPDKNPPCPCCGTRVNSVLNLIEHLKVSHGKRGVCFRCAKCGKENSNYHSVVCHFKKCRGPETEKAPAGEWICEVCNRDFTTKIGLGQHKRLAHPAVRNQERIVASQPKETSNRGAHKRCWTKEEEELLIRLEAQFEGNKNINKLIAEHITTKTAKQISDKRRLLSRKPAEEPREEPGTCHHTRRAAASLRTEPEMSHHAQAEDRDNGPGRRPLPGRAAAGGRTMDEIRRHPDKGNGQQRPTKQKSEEQLQAYYKKTLEERLSAGALNTFPRAFKQVMEGRDIKLVINQTAQDCFGCLESISQIRTATRDKKDTVTREKHPKKPFQKWMKKRAIKKGNYLRFQRLFYLDRGKLAKIILDDIECLSCDIPLSEIYSVFKTRWETTGSFKSLGDFKTYGKADNTAFRELITAKEIEKNVQEMSKGSAPGPDGITLGDVVKMDPEFSRTMEIYNLWLTTGKIPDMVRGCRTVLIPKSSKPDRLKDINNWRPITIGSILLRLFSRIVTARLSKACPLNPRQRGFIRAAGCSENLKLLQTIIWSAKREHRPLGVVFVDIAKAFDTVSHQHIIHALQQREVDPHIVGLVSNMYENISTYITTKRNTHTDKIQIRVGVKQGDPMSPLLFNLAMDPLLCKLEESGKGYHRGQSSITAMAFADDLVLLSDSWENMNTNISILETFCNLTGLKTQGQKCHGFYIKPTKKSYTINDCAAWTINGTPLNMIDPGESEKYLGLQFDPWIGIARSGLSTKLDFWLQRIDQAPLKPLQKTDILKTYTIPRLIYIADHSEVKSALLETLDQKIRTAVKEWLHLPPCTCDAILYSSTRDGGLGITKLAGLIPSVQARRLHRIAQSSDDTMKCFMEKEKMEQLHKKLWIQAGGDRENIPSIWEAPPSSEPPNNVSTNSEWEAPTQKDKFPKPCNWRKNEFKKWTKLASQGRGIVNFERDKISNHWIQYYRRIPHRKLLTALQLRANVYPTREFLARGRQDQYIKACRHCDADNESCAHIIGNCPVTQDARIKRHNYICELLLEEAKKKDWVVFKEPHIRDSNKELYKPDLIFVKDGRALVVDVTVRYEAAKSSLEEAAAEKVRKYKHLETEVRHLTNAKDVTFVGFPLGARGKWHQDNFKLLTELGLSKSRQVKMAETFSTVALFSSVDIVHMFASRARKSMVM

SEQ ID NO: 899 - protein, 1665 aa, synthetic construct
MAPKKKRKVNISGSSCGSPNSADTSSDFKDLWTKLKECHDREVQGLQVKVTKLKQERILDAQRLEEFFTKNQQLREQQKVLHETIKVLEDRLRAGLCDRCAVTEEHMRKKQQEFENIRQQNLKLITELMNERNTLQEENKKLSEQLQQKIENDQQHQAAELECEEDVIPDSPITAFSFSGVNRLRRKENPHVRYIEQTHTKLEHSVCANEMRKVSKSSTHPQHNPNENEILVADTYDQSQSPMAKAHGTSSYTPDKSSFNLATVVAETLGLGVQEESETQGPMSPLGDELYHCLEGNHKKQPFESGSETPGTSESATPEGSPKRKVSSAEGAAKEEPKRRSARLSAKPPAKVEAKPKKAAAKDKSSDKKVQTKGKRGAKGKQAEVANQETKEDLPAENGETKTEESPASDEAGEKEAKSDSGSETPGTSESATPESYEQLAPQPCVGETLHSSLPRDSELFVPEEGSSEKESEDAPKTSPPTPGKHGLEQTGEEKVMVTVPDKNPPCPCCGTRVNSVLNLIEHLKVSHGKRGVCFRCAKCGKENSNYHSVVCHFKKCRGPETEKAPAGEWICEVCNRDFTTKIGLGQHKRLAHPAVRNQERIVASQPKETSNRGAHKRCWTKEEEELLIRLEAQFEGNKNINKLIAEHITTKTAKQISDKRRLLSRKPAEEPREEPGTCHHTRRAAASLRTEPEMSHHAQAEDRDNGPGRRPLPGRAAAGGRTMDEIRRHPDKGNGQQRPTKQKSEEQLQAYYKKTLEERLSAGALNTFPRAFKQVMEGRDIKLVINQTAQDCFGCLESISQIRTATRDKKDTVTREKHPKKPFQKWMKKRAIKKGNYLRFQRLFYLDRGKLAKIILDDIECLSCDIPLSEIYSVFKTRWETTGSFKSLGDFKTYGKADNTAFRELITAKEIEKNVQEMSKGSAPGPDGITLGDVVKMDPEFSRTMEIFNLILTTGKIPDMVRGCRTVLIPKSSKPDRLKDINNWRPITIGSILLRLFSRIVTARLSKACPLNPRQRGFIRAAGCSENLKLLQTIIWSAKREHRPLGVVFVDIAKAFDTVSHQHIIHALQQREVDPHIVGLVSNMYENISTYITTKRNTHTDKIQIRVGVKQGDPMSPLLFNLAMDPLLCKLEESGKGYHRGQSSITAMAFADDLVLLSDSWENMNTNISILETFCNLTGLKTQGQKCHGFYIKPTKKSYTINDCAAWTINGTPLNMIDPGESEKYLGLQFDPWIGIARSGLSTKLDFWLQRIDQAPLKPLQKTDILKTYTIPRLIYIADHSEVKSALLETLDQKIRTAVKEWLHLPPCTCDAILYSSTRDGGLGITKLAGLIPSVQARRLHRIAQSSDDTMKCFMEKEKMEQLHKKLWIQAGGDRENIPSIWEAPPSSEPPNNVSTNSEWEAPTQKDKFPKPCNWRKNEFKKWTKLASQGRGIVNFERDKISNHWIQYYRRIPHRKLLTALQLRANVYPTREFLARGRQDQYIKACRHCDADNESCAHIIGNCPVTQDARIKRHNYICELLLEEAKKKDWVVFKEPHIRDSNKELYKPDLIFVKDGRALVVDVTVRYEAAKSSLEEAAAEKVRKYKHLETEVRHLTNAKDVTFVGFPLGARGKWHQDNFKLLTELGLSKSRQVKMAETFSTVALFSSVDIVHMFASRARKSMVM

SEQ ID NO: 900 - protein, 1665 aa, synthetic construct
MAPKKKRKVNISGSSCGSPNSADTSSDFKDLWTKLKECHDREVQGLQVKVTKLKQERILDAQRLEEFFTKNQQLREQQKVLHETIKVLEDRLRAGLCDRCAVTEEHMRKKQQEFENIRQQNLKLITELMNERNTLQEENKKLSEQLQQKIENDQQHQAAELECEEDVIPDSPITAFSFSGVNRLRRKENPHVRYIEQTHTKLEHSVCANEMRKVSKSSTHPQHNPNENEILVADTYDQSQSPMAKAHGTSSYTPDKSSFNLATVVAETLGLGVQEESETQGPMSPLGDELYHCLEGNHKKQPFESGSETPGTSESATPEGSPKRKVSSAEGAAKEEPKRRSARLSAKPPAKVEAKPKKAAAKDKSSDKKVQTKGKRGAKGKQAEVANQETKEDLPAENGETKTEESPASDEAGEKEAKSDSGSETPGTSESATPESYEQLAPQPCVGETLHSSLPRDSELFVPEEGSSEKESEDAPKTSPPTPGKHGLEQTGEEKVMVTVPDKNPPCPCCGTRVNSVLNLIEHLKVSHGKRGVCFRCAKCGKENSNYHSVVCHFKKCRGPETEKAPAGEWICEVCNRDFTTKIGLGQHKRLAHPAVRNQERIVASQPKETSNRGAHKRCWTKEEEELLIRLEAQFEGNKNINKLIAEHITTKTAKQISDKRRLLSRKPAEEPREEPGTCHHTRRAAASLRTEPEMSHHAQAEDRDNGPGRRPLPGRAAAGGRTMDEIRRHPDKGNGQQRPTKQKSEEQLQAYYKKTLEERLSAGALNTFPRAFKQVMEGRDIKLVINQTAQDCFGCLESISQIRTATRDKKDTVTREKHPKKPFQKWMKKRAIKKGNYLRFQRLFYLDRGKLAKIILDDIECLSCDIPLSEIYSVFKTRWETTGSFKSLGDFKTYGKADNTAFRELITAKEIEKNVQEMSKGSAPGPDGITLGDVVKMDPEFSRTMEIFNLWLTTGKIPDMVRGCRTVLIPKSSKPDRLKDINNWRPITIGSILLRLFSRIVTARLSKACPLHPRQRGFIRAAGCSENLKLLQTIIWSAKREHRPLGVVFVDIAKAFDTVSHQHIIHALQQREVDPHIVGLVSNMYENISTYITTKRNTHTDKIQIRVGVKQGDPMSPLLFNLAMDPLLCKLEESGKGYHRGQSSITAMAFADDLVLLSDSWENMNTNISILETFCNLTGLKTQGQKCHGFYIKPTKKSYTINDCAAWTINGTPLNMIDPGESEKYLGLQFDPWIGIARSGLSTKLDFWLQRIDQAPLKPLQKTDILKTYTIPRLIYIADHSEVKSALLETLDQKIRTAVKEWLHLPPCTCDAILYSSTRDGGLGITKLAGLIPSVQARRLHRIAQSSDDTMKCFMEKEKMEQLHKKLWIQAGGDRENIPSIWEAPPSSEPPNNVSTNSEWEAPTQKDKFPKPCNWRKNEFKKWTKLASQGRGIVNFERDKISNHWIQYYRRIPHRKLLTALQLRANVYPTREFLARGRQDQYIKACRHCDADNESCAHIIGNCPVTQDARIKRHNYICELLLEEAKKKDWVVFKEPHIRDSNKELYKPDLIFVKDGRALVVDVTVRYEAAKSSLEEAAAEKVRKYKHLETEVRHLTNAKDVTFVGFPLGARGKWHQDNFKLLTELGLSKSRQVKMAETFSTVALFSSVDIVHMFASRARKSMVM

SEQ ID NO: 901 - protein, 1665 aa, synthetic construct
MAPKKKRKVNISGSSCGSPNSADTSSDFKDLWTKLKECHDREVQGLQVKVTKLKQERILDAQRLEEFFTKNQQLREQQKVLHETIKVLEDRLRAGLCDRCAVTEEHMRKKQQEFENIRQQNLKLITELMNERNTLQEENKKLSEQLQQKIENDQQHQAAELECEEDVIPDSPITAFSFSGVNRLRRKENPHVRYIEQTHTKLEHSVCANEMRKVSKSSTHPQHNPNENEILVADTYDQSQSPMAKAHGTSSYTPDKSSFNLATVVAETLGLGVQEESETQGPMSPLGDELYHCLEGNHKKQPFESGSETPGTSESATPEGSPKRKVSSAEGAAKEEPKRRSARLSAKPPAKVEAKPKKAAAKDKSSDKKVQTKGKRGAKGKQAEVANQETKEDLPAENGETKTEESPASDEAGEKEAKSDSGSETPGTSESATPESYEQLAPQPCVGETLHSSLPRDSELFVPEEGSSEKESEDAPKTSPPTPGKHGLEQTGEEKVMVTVPDKNPPCPCCGTRVNSVLNLIEHLKVSHGKRGVCFRCAKCGKENSNYHSVVCHFKKCRGPETEKAPAGEWICEVCNRDFTTKIGLGQHKRLAHPAVRNQERIVASQPKETSNRGAHKRCWTKEEEELLIRLEAQFEGNKNINKLIAEHITTKTAKQISDKRRLLSRKPAEEPREEPGTCHHTRRAAASLRTEPEMSHHAQAEDRDNGPGRRPLPGRAAAGGRTMDEIRRHPDKGNGQQRPTKQKSEEQLQAYYKKTLEERLSAGALNTFPRAFKQVMEGRDIKLVINQTAQDCFGCLESISQIRTATRDKKDTVTREKHPKKPFQKWMKKRAIKKGNYLRFQRLFYLDRGKLAKIILDDIECLSCDIPLSEIYSVFKTRWETTGSFKSLGDFKTYGKADNTAFRELITAKEIEKNVQEMSKGSAPGPDGITLGDVVKMDPEFSRTMEIFNLWLTTGKIPDMVRGCRTVLIPKSSKPDRLKDINNWRPITIGSILLRLFSRIVTARLSKACPLNPRQRGFIRAAGCSENIKLLQTIIWSAKREHRPLGVVFVDIAKAFDTVSHQHIIHALQQREVDPHIVGLVSNMYENISTYITTKRNTHTDKIQIRVGVKQGDPMSPLLFNLAMDPLLCKLEESGKGYHRGQSSITAMAFADDLVLLSDSWENMNTNISILETFCNLTGLKTQGQKCHGFYIKPTKKSYTINDCAAWTINGTPLNMIDPGESEKYLGLQFDPWIGIARSGLSTKLDFWLQRIDQAPLKPLQKTDILKTYTIPRLIYIADHSEVKSALLETLDQKIRTAVKEWLHLPPCTCDAILYSSTRDGGLGITKLAGLIPSVQARRLHRIAQSSDDTMKCFMEKEKMEQLHKKLWIQAGGDRENIPSIWEAPPSSEPPNNVSTNSEWEAPTQKDKFPKPCNWRKNEFKKWTKLASQGRGIVNFERDKISNHWIQYYRRIPHRKLLTALQLRANVYPTREFLARGRQDQYIKACRHCDADNESCAHIIGNCPVTQDARIKRHNYICELLLEEAKKKDWVVFKEPHIRDSNKELYKPDLIFVKDGRALVVDVTVRYEAAKSSLEEAAAEKVRKYKHLETEVRHLTNAKDVTFVGFPLGARGKWHQDNFKLLTELGLSKSRQVKMAETFSTVALFSSVDIVHMFASRARKSMVM

SEQ ID NO: 902 - protein, 1665 aa, synthetic construct
MAPKKKRKVNISGSSCGSPNSADTSSDFKDLWTKLKECHDREVQGLQVKVTKLKQERILDAQRLEEFFTKNQQLREQQKVLHETIKVLEDRLRAGLCDRCAVTEEHMRKKQQEFENIRQQNLKLITELMNERNTLQEENKKLSEQLQQKIENDQQHQAAELECEEDVIPDSPITAFSFSGVNRLRRKENPHVRYIEQTHTKLEHSVCANEMRKVSKSSTHPQHNPNENEILVADTYDQSQSPMAKAHGTSSYTPDKSSFNLATVVAETLGLGVQEESETQGPMSPLGDELYHCLEGNHKKQPFESGSETPGTSESATPEGSPKRKVSSAEGAAKEEPKRRSARLSAKPPAKVEAKPKKAAAKDKSSDKKVQTKGKRGAKGKQAEVANQETKEDLPAENGETKTEESPASDEAGEKEAKSDSGSETPGTSESATPESYEQLAPQPCVGETLHSSLPRDSELFVPEEGSSEKESEDAPKTSPPTPGKHGLEQTGEEKVMVTVPDKNPPCPCCGTRVNSVLNLIEHLKVSHGKRGVCFRCAKCGKENSNYHSVVCHFKKCRGPETEKAPAGEWICEVCNRDFTTKIGLGQHKRLAHPAVRNQERIVASQPKETSNRGAHKRCWTKEEEELLIRLEAQFEGNKNINKLIAEHITTKTAKQISDKRRLLSRKPAEEPREEPGTCHHTRRAAASLRTEPEMSHHAQAEDRDNGPGRRPLPGRAAAGGRTMDEIRRHPDKGNGQQRPTKQKSEEQLQAYYKKTLEERLSAGALNTFPRAFKQVMEGRDIKLVINQTAQDCFGCLESISQIRTATRDKKDTVTREKHPKKPFQKWMKKRAIKKGNYLRFQRLFYLDRGKLAKIILDDIECLSCDIPLSEIYSVFKTRWETTGSFKSLGDFKTYGKADNTAFRELITAKEIEKNVQEMSKGSAPGPDGITLGDVVKMDPEFSRTMEIFNLWLTTGKIPDMVRGCRTVLIPKSSKPDRLKDINNWRPITIGSILLRLFSRIVTARLSKACPLNPRQRGFIRAAGCSENLKLLQTIIWSSKREHRPLGVVFVDIAKAFDTVSHQHIIHALQQREVDPHIVGLVSNMYENISTYITTKRNTHTDKIQIRVGVKQGDPMSPLLFNLAMDPLLCKLEESGKGYHRGQSSITAMAFADDLVLLSDSWENMNTNISILETFCNLTGLKTQGQKCHGFYIKPTKKSYTINDCAAWTINGTPLNMIDPGESEKYLGLQFDPWIGIARSGLSTKLDFWLQRIDQAPLKPLQKTDILKTYTIPRLIYIADHSEVKSALLETLDQKIRTAVKEWLHLPPCTCDAILYSSTRDGGLGITKLAGLIPSVQARRLHRIAQSSDDTMKCFMEKEKMEQLHKKLWIQAGGDRENIPSIWEAPPSSEPPNNVSTNSEWEAPTQKDKFPKPCNWRKNEFKKWTKLASQGRGIVNFERDKISNHWIQYYRRIPHRKLLTALQLRANVYPTREFLARGRQDQYIKACRHCDADNESCAHIIGNCPVTQDARIKRHNYICELLLEEAKKKDWVVFKEPHIRDSNKELYKPDLIFVKDGRALVVDVTVRYEAAKSSLEEAAAEKVRKYKHLETEVRHLTNAKDVTFVGFPLGARGKWHQDNFKLLTELGLSKSRQVKMAETFSTVALFSSVDIVHMFASRARKSMVM

SEQ ID NO: 903 - protein, 1665 aa, synthetic construct
MAPKKKRKVNISGSSCGSPNSADTSSDFKDLWTKLKECHDREVQGLQVKVTKLKQERILDAQRLEEFFTKNQQLREQQKVLHETIKVLEDRLRAGLCDRCAVTEEHMRKKQQEFENIRQQNLKLITELMNERNTLQEENKKLSEQLQQKIENDQQHQAAELECEEDVIPDSPITAFSFSGVNRLRRKENPHVRYIEQTHTKLEHSVCANEMRKVSKSSTHPQHNPNENEILVADTYDQSQSPMAKAHGTSSYTPDKSSFNLATVVAETLGLGVQEESETQGPMSPLGDELYHCLEGNHKKQPFESGSETPGTSESATPEGSPKRKVSSAEGAAKEEPKRRSARLSAKPPAKVEAKPKKAAAKDKSSDKKVQTKGKRGAKGKQAEVANQETKEDLPAENGETKTEESPASDEAGEKEAKSDSGSETPGTSESATPESYEQLAPQPCVGETLHSSLPRDSELFVPEEGSSEKESEDAPKTSPPTPGKHGLEQTGEEKVMVTVPDKNPPCPCCGTRVNSVLNLIEHLKVSHGKRGVCFRCAKCGKENSNYHSVVCHFKKCRGPETEKAPAGEWICEVCNRDFTTKIGLGQHKRLAHPAVRNQERIVASQPKETSNRGAHKRCWTKEEEELLIRLEAQFEGNKNINKLIAEHITTKTAKQISDKRRLLSRKPAEEPREEPGTCHHTRRAAASLRTEPEMSHHAQAEDRDNGPGRRPLPGRAAAGGRTMDEIRRHPDKGNGQQRPTKQKSEEQLQAYYKKTLEERLSAGALNTFPRAFKQVMEGRDIKLVINQTAQDCFGCLESISQIRTATRDKKDTVTREKHPKKPFQKWMKKRAIKKGNYLRFQRLFYLDRGKLAKIILDDIECLSCDIPLSEIYSVFKTRWETTGSFKSLGDFKTYGKADNTAFRELITAKEIEKNVQEMSKGSAPGPDGITLGDVVKMDPEFSRTMEIFNLWLTTGKIPDMVRGCRTVLIPKSSKPDRLKDINNWRPITIGSILLRLFSRIVTARLSKACPLNPRQRGFIRAAGCSENLKLLQTIIWSAKREHRPIGVVFVDIAKAFDTVSHQHIIHALQQREVDPHIVGLVSNMYENISTYITTKRNTHTDKIQIRVGVKQGDPMSPLLFNLAMDPLLCKLEESGKGYHRGQSSITAMAFADDLVLLSDSWENMNTNISILETFCNLTGLKTQGQKCHGFYIKPTKKSYTINDCAAWTINGTPLNMIDPGESEKYLGLQFDPWIGIARSGLSTKLDFWLQRIDQAPLKPLQKTDILKTYTIPRLIYIADHSEVKSALLETLDQKIRTAVKEWLHLPPCTCDAILYSSTRDGGLGITKLAGLIPSVQARRLHRIAQSSDDTMKCFMEKEKMEQLHKKLWIQAGGDRENIPSIWEAPPSSEPPNNVSTNSEWEAPTQKDKFPKPCNWRKNEFKKWTKLASQGRGIVNFERDKISNHWIQYYRRIPHRKLLTALQLRANVYPTREFLARGRQDQYIKACRHCDADNESCAHIIGNCPVTQDARIKRHNYICELLLEEAKKKDWVVFKEPHIRDSNKELYKPDLIFVKDGRALVVDVTVRYEAAKSSLEEAAAEKVRKYKHLETEVRHLTNAKDVTFVGFPLGARGKWHQDNFKLLTELGLSKSRQVKMAETFSTVALFSSVDIVHMFASRARKSMVM

SEQ ID NO: 904 - protein, 1665 aa, synthetic construct
MAPKKKRKVNISGSSCGSPNSADTSSDFKDLWTKLKECHDREVQGLQVKVTKLKQERILDAQRLEEFFTKNQQLREQQKVLHETIKVLEDRLRAGLCDRCAVTEEHMRKKQQEFENIRQQNLKLITELMNERNTLQEENKKLSEQLQQKIENDQQHQAAELECEEDVIPDSPITAFSFSGVNRLRRKENPHVRYIEQTHTKLEHSVCANEMRKVSKSSTHPQHNPNENEILVADTYDQSQSPMAKAHGTSSYTPDKSSFNLATVVAETLGLGVQEESETQGPMSPLGDELYHCLEGNHKKQPFESGSETPGTSESATPEGSPKRKVSSAEGAAKEEPKRRSARLSAKPPAKVEAKPKKAAAKDKSSDKKVQTKGKRGAKGKQAEVANQETKEDLPAENGETKTEESPASDEAGEKEAKSDSGSETPGTSESATPESYEQLAPQPCVGETLHSSLPRDSELFVPEEGSSEKESEDAPKTSPPTPGKHGLEQTGEEKVMVTVPDKNPPCPCCGTRVNSVLNLIEHLKVSHGKRGVCFRCAKCGKENSNYHSVVCHFKKCRGPETEKAPAGEWICEVCNRDFTTKIGLGQHKRLAHPAVRNQERIVASQPKETSNRGAHKRCWTKEEEELLIRLEAQFEGNKNINKLIAEHITTKTAKQISDKRRLLSRKPAEEPREEPGTCHHTRRAAASLRTEPEMSHHAQAEDRDNGPGRRPLPGRAAAGGRTMDEIRRHPDKGNGQQRPTKQKSEEQLQAYYKKTLEERLSAGALNTFPRAFKQVMEGRDIKLVINQTAQDCFGCLESISQIRTATRDKKDTVTREKHPKKPFQKWMKKRAIKKGNYLRFQRLFYLDRGKLAKIILDDIECLSCDIPLSEIYSVFKTRWETTGSFKSLGDFKTYGKADNTAFRELITAKEIEKNVQEMSKGSAPGPDGITLGDVVKMDPEFSRTMEIFNLWLTTGKIPDMVRGCRTVLIPKSSKPDRLKDINNWRPITIGSILLRLFSRIVTARLSKACPLNPRQRGFIRAAGCSENLKLLQTIIWSAKREHRPLGVVFIDIAKAFDTVSHQHIIHALQQREVDPHIVGLVSNMYENISTYITTKRNTHTDKIQIRVGVKQGDPMSPLLFNLAMDPLLCKLEESGKGYHRGQSSITAMAFADDLVLLSDSWENMNTNISILETFCNLTGLKTQGQKCHGFYIKPTKKSYTINDCAAWTINGTPLNMIDPGESEKYLGLQFDPWIGIARSGLSTKLDFWLQRIDQAPLKPLQKTDILKTYTIPRLIYIADHSEVKSALLETLDQKIRTAVKEWLHLPPCTCDAILYSSTRDGGLGITKLAGLIPSVQARRLHRIAQSSDDTMKCFMEKEKMEQLHKKLWIQAGGDRENIPSIWEAPPSSEPPNNVSTNSEWEAPTQKDKFPKPCNWRKNEFKKWTKLASQGRGIVNFERDKISNHWIQYYRRIPHRKLLTALQLRANVYPTREFLARGRQDQYIKACRHCDADNESCAHIIGNCPVTQDARIKRHNYICELLLEEAKKKDWVVFKEPHIRDSNKELYKPDLIFVKDGRALVVDVTVRYEAAKSSLEEAAAEKVRKYKHLETEVRHLTNAKDVTFVGFPLGARGKWHQDNFKLLTELGLSKSRQVKMAETFSTVALFSSVDIVHMFASRARKSMVM

SEQ ID NO: 905 - protein, 1665 aa, synthetic construct
MAPKKKRKVNISGSSCGSPNSADTSSDFKDLWTKLKECHDREVQGLQVKVTKLKQERILDAQRLEEFFTKNQQLREQQKVLHETIKVLEDRLRAGLCDRCAVTEEHMRKKQQEFENIRQQNLKLITELMNERNTLQEENKKLSEQLQQKIENDQQHQAAELECEEDVIPDSPITAFSFSGVNRLRRKENPHVRYIEQTHTKLEHSVCANEMRKVSKSSTHPQHNPNENEILVADTYDQSQSPMAKAHGTSSYTPDKSSFNLATVVAETLGLGVQEESETQGPMSPLGDELYHCLEGNHKKQPFESGSETPGTSESATPEGSPKRKVSSAEGAAKEEPKRRSARLSAKPPAKVEAKPKKAAAKDKSSDKKVQTKGKRGAKGKQAEVANQETKEDLPAENGETKTEESPASDEAGEKEAKSDSGSETPGTSESATPESYEQLAPQPCVGETLHSSLPRDSELFVPEEGSSEKESEDAPKTSPPTPGKHGLEQTGEEKVMVTVPDKNPPCPCCGTRVNSVLNLIEHLKVSHGKRGVCFRCAKCGKENSNYHSVVCHFKKCRGPETEKAPAGEWICEVCNRDFTTKIGLGQHKRLAHPAVRNQERIVASQPKETSNRGAHKRCWTKEEEELLIRLEAQFEGNKNINKLIAEHITTKTAKQISDKRRLLSRKPAEEPREEPGTCHHTRRAAASLRTEPEMSHHAQAEDRDNGPGRRPLPGRAAAGGRTMDEIRRHPDKGNGQQRPTKQKSEEQLQAYYKKTLEERLSAGALNTFPRAFKQVMEGRDIKLVINQTAQDCFGCLESISQIRTATRDKKDTVTREKHPKKPFQKWMKKRAIKKGNYLRFQRLFYLDRGKLAKIILDDIECLSCDIPLSEIYSVFKTRWETTGSFKSLGDFKTYGKADNTAFRELITAKEIEKNVQEMSKGSAPGPDGITLGDVVKMDPEFSRTMEIFNLWLTTGKIPDMVRGCRTVLIPKSSKPDRLKDINNWRPITIGSILLRLFSRIVTARLSKACPLNPRQRGFIRAAGCSENLKLLQTIIWSAKREHRPLGVVFVDFAKAFDTVSHQHIIHALQQREVDPHIVGLVSNMYENISTYITTKRNTHTDKIQIRVGVKQGDPMSPLLFNLAMDPLLCKLEESGKGYHRGQSSITAMAFADDLVLLSDSWENMNTNISILETFCNLTGLKTQGQKCHGFYIKPTKKSYTINDCAAWTINGTPLNMIDPGESEKYLGLQFDPWIGIARSGLSTKLDFWLQRIDQAPLKPLQKTDILKTYTIPRLIYIADHSEVKSALLETLDQKIRTAVKEWLHLPPCTCDAILYSSTRDGGLGITKLAGLIPSVQARRLHRIAQSSDDTMKCFMEKEKMEQLHKKLWIQAGGDRENIPSIWEAPPSSEPPNNVSTNSEWEAPTQKDKFPKPCNWRKNEFKKWTKLASQGRGIVNFERDKISNHWIQYYRRIPHRKLLTALQLRANVYPTREFLARGRQDQYIKACRHCDADNESCAHIIGNCPVTQDARIKRHNYICELLLEEAKKKDWVVFKEPHIRDSNKELYKPDLIFVKDGRALVVDVTVRYEAAKSSLEEAAAEKVRKYKHLETEVRHLTNAKDVTFVGFPLGARGKWHQDNFKLLTELGLSKSRQVKMAETFSTVALFSSVDIVHMFASRARKSMVM

SEQ ID NO: 906 - protein, 1665 aa, synthetic construct
MAPKKKRKVNISGSSCGSPNSADTSSDFKDLWTKLKECHDREVQGLQVKVTKLKQERILDAQRLEEFFTKNQQLREQQKVLHETIKVLEDRLRAGLCDRCAVTEEHMRKKQQEFENIRQQNLKLITELMNERNTLQEENKKLSEQLQQKIENDQQHQAAELECEEDVIPDSPITAFSFSGVNRLRRKENPHVRYIEQTHTKLEHSVCANEMRKVSKSSTHPQHNPNENEILVADTYDQSQSPMAKAHGTSSYTPDKSSFNLATVVAETLGLGVQEESETQGPMSPLGDELYHCLEGNHKKQPFESGSETPGTSESATPEGSPKRKVSSAEGAAKEEPKRRSARLSAKPPAKVEAKPKKAAAKDKSSDKKVQTKGKRGAKGKQAEVANQETKEDLPAENGETKTEESPASDEAGEKEAKSDSGSETPGTSESATPESYEQLAPQPCVGETLHSSLPRDSELFVPEEGSSEKESEDAPKTSPPTPGKHGLEQTGEEKVMVTVPDKNPPCPCCGTRVNSVLNLIEHLKVSHGKRGVCFRCAKCGKENSNYHSVVCHFKKCRGPETEKAPAGEWICEVCNRDFTTKIGLGQHKRLAHPAVRNQERIVASQPKETSNRGAHKRCWTKEEEELLIRLEAQFEGNKNINKLIAEHITTKTAKQISDKRRLLSRKPAEEPREEPGTCHHTRRAAASLRTEPEMSHHAQAEDRDNGPGRRPLPGRAAAGGRTMDEIRRHPDKGNGQQRPTKQKSEEQLQAYYKKTLEERLSAGALNTFPRAFKQVMEGRDIKLVINQTAQDCFGCLESISQIRTATRDKKDTVTREKHPKKPFQKWMKKRAIKKGNYLRFQRLFYLDRGKLAKIILDDIECLSCDIPLSEIYSVFKTRWETTGSFKSLGDFKTYGKADNTAFRELITAKEIEKNVQEMSKGSAPGPDGITLGDVVKMDPEFSRTMEIFNLWLTTGKIPDMVRGCRTVLIPKSSKPDRLKDINNWRPITIGSILLRLFSRIVTARLSKACPLNPRQRGFIRAAGCSENLKLLQTIIWSAKREHRPLGVVFVDIAKAYDTVSHQHIIHALQQREVDPHIVGLVSNMYENISTYITTKRNTHTDKIQIRVGVKQGDPMSPLLFNLAMDPLLCKLEESGKGYHRGQSSITAMAFADDLVLLSDSWENMNTNISILETFCNLTGLKTQGQKCHGFYIKPTKKSYTINDCAAWTINGTPLNMIDPGESEKYLGLQFDPWIGIARSGLSTKLDFWLQRIDQAPLKPLQKTDILKTYTIPRLIYIADHSEVKSALLETLDQKIRTAVKEWLHLPPCTCDAILYSSTRDGGLGITKLAGLIPSVQARRLHRIAQSSDDTMKCFMEKEKMEQLHKKLWIQAGGDRENIPSIWEAPPSSEPPNNVSTNSEWEAPTQKDKFPKPCNWRKNEFKKWTKLASQGRGIVNFERDKISNHWIQYYRRIPHRKLLTALQLRANVYPTREFLARGRQDQYIKACRHCDADNESCAHIIGNCPVTQDARIKRHNYICELLLEEAKKKDWVVFKEPHIRDSNKELYKPDLIFVKDGRALVVDVTVRYEAAKSSLEEAAAEKVRKYKHLETEVRHLTNAKDVTFVGFPLGARGKWHQDNFKLLTELGLSKSRQVKMAETFSTVALFSSVDIVHMFASRARKSMVM

SEQ ID NO: 907 - protein, 1665 aa, synthetic construct
MAPKKKRKVNISGSSCGSPNSADTSSDFKDLWTKLKECHDREVQGLQVKVTKLKQERILDAQRLEEFFTKNQQLREQQKVLHETIKVLEDRLRAGLCDRCAVTEEHMRKKQQEFENIRQQNLKLITELMNERNTLQEENKKLSEQLQQKIENDQQHQAAELECEEDVIPDSPITAFSFSGVNRLRRKENPHVRYIEQTHTKLEHSVCANEMRKVSKSSTHPQHNPNENEILVADTYDQSQSPMAKAHGTSSYTPDKSSFNLATVVAETLGLGVQEESETQGPMSPLGDELYHCLEGNHKKQPFESGSETPGTSESATPEGSPKRKVSSAEGAAKEEPKRRSARLSAKPPAKVEAKPKKAAAKDKSSDKKVQTKGKRGAKGKQAEVANQETKEDLPAENGETKTEESPASDEAGEKEAKSDSGSETPGTSESATPESYEQLAPQPCVGETLHSSLPRDSELFVPEEGSSEKESEDAPKTSPPTPGKHGLEQTGEEKVMVTVPDKNPPCPCCGTRVNSVLNLIEHLKVSHGKRGVCFRCAKCGKENSNYHSVVCHFKKCRGPETEKAPAGEWICEVCNRDFTTKIGLGQHKRLAHPAVRNQERIVASQPKETSNRGAHKRCWTKEEEELLIRLEAQFEGNKNINKLIAEHITTKTAKQISDKRRLLSRKPAEEPREEPGTCHHTRRAAASLRTEPEMSHHAQAEDRDNGPGRRPLPGRAAAGGRTMDEIRRHPDKGNGQQRPTKQKSEEQLQAYYKKTLEERLSAGALNTFPRAFKQVMEGRDIKLVINQTAQDCFGCLESISQIRTATRDKKDTVTREKHPKKPFQKWMKKRAIKKGNYLRFQRLFYLDRGKLAKIILDDIECLSCDIPLSEIYSVFKTRWETTGSFKSLGDFKTYGKADNTAFRELITAKEIEKNVQEMSKGSAPGPDGITLGDVVKMDPEFSRTMEIFNLWLTTGKIPDMVRGCRTVLIPKSSKPDRLKDINNWRPITIGSILLRLFSRIVTARLSKACPLNPRQRGFIRAAGCSENLKLLQTIIWSAKREHRPLGVVFVDIAKAFDTVSHQHIIHAMQQREVDPHIVGLVSNMYENISTYITTKRNTHTDKIQIRVGVKQGDPMSPLLFNLAMDPLLCKLEESGKGYHRGQSSITAMAFADDLVLLSDSWENMNTNISILETFCNLTGLKTQGQKCHGFYIKPTKKSYTINDCAAWTINGTPLNMIDPGESEKYLGLQFDPWIGIARSGLSTKLDFWLQRIDQAPLKPLQKTDILKTYTIPRLIYIADHSEVKSALLETLDQKIRTAVKEWLHLPPCTCDAILYSSTRDGGLGITKLAGLIPSVQARRLHRIAQSSDDTMKCFMEKEKMEQLHKKLWIQAGGDRENIPSIWEAPPSSEPPNNVSTNSEWEAPTQKDKFPKPCNWRKNEFKKWTKLASQGRGIVNFERDKISNHWIQYYRRIPHRKLLTALQLRANVYPTREFLARGRQDQYIKACRHCDADNESCAHIIGNCPVTQDARIKRHNYICELLLEEAKKKDWVVFKEPHIRDSNKELYKPDLIFVKDGRALVVDVTVRYEAAKSSLEEAAAEKVRKYKHLETEVRHLTNAKDVTFVGFPLGARGKWHQDNFKLLTELGLSKSRQVKMAETFSTVALFSSVDIVHMFASRARKSMVM

SEQ ID NO: 908 - protein, 1665 aa, synthetic construct
MAPKKKRKVNISGSSCGSPNSADTSSDFKDLWTKLKECHDREVQGLQVKVTKLKQERILDAQRLEEFFTKNQQLREQQKVLHETIKVLEDRLRAGLCDRCAVTEEHMRKKQQEFENIRQQNLKLITELMNERNTLQEENKKLSEQLQQKIENDQQHQAAELECEEDVIPDSPITAFSFSGVNRLRRKENPHVRYIEQTHTKLEHSVCANEMRKVSKSSTHPQHNPNENEILVADTYDQSQSPMAKAHGTSSYTPDKSSFNLATVVAETLGLGVQEESETQGPMSPLGDELYHCLEGNHKKQPFESGSETPGTSESATPEGSPKRKVSSAEGAAKEEPKRRSARLSAKPPAKVEAKPKKAAAKDKSSDKKVQTKGKRGAKGKQAEVANQETKEDLPAENGETKTEESPASDEAGEKEAKSDSGSETPGTSESATPESYEQLAPQPCVGETLHSSLPRDSELFVPEEGSSEKESEDAPKTSPPTPGKHGLEQTGEEKVMVTVPDKNPPCPCCGTRVNSVLNLIEHLKVSHGKRGVCFRCAKCGKENSNYHSVVCHFKKCRGPETEKAPAGEWICEVCNRDFTTKIGLGQHKRLAHPAVRNQERIVASQPKETSNRGAHKRCWTKEEEELLIRLEAQFEGNKNINKLIAEHITTKTAKQISDKRRLLSRKPAEEPREEPGTCHHTRRAAASLRTEPEMSHHAQAEDRDNGPGRRPLPGRAAAGGRTMDEIRRHPDKGNGQQRPTKQKSEEQLQAYYKKTLEERLSAGALNTFPRAFKQVMEGRDIKLVINQTAQDCFGCLESISQIRTATRDKKDTVTREKHPKKPFQKWMKKRAIKKGNYLRFQRLFYLDRGKLAKIILDDIECLSCDIPLSEIYSVFKTRWETTGSFKSLGDFKTYGKADNTAFRELITAKEIEKNVQEMSKGSAPGPDGITLGDVVKMDPEFSRTMEIFNLWLTTGKIPDMVRGCRTVLIPKSSKPDRLKDINNWRPITIGSILLRLFSRIVTARLSKACPLNPRQRGFIRAAGCSENLKLLQTIIWSAKREHRPLGVVFVDIAKAFDTVSHQHIIHALQQRGVDPHIVGLVSNMYENISTYITTKRNTHTDKIQIRVGVKQGDPMSPLLFNLAMDPLLCKLEESGKGYHRGQSSITAMAFADDLVLLSDSWENMNTNISILETFCNLTGLKTQGQKCHGFYIKPTKKSYTINDCAAWTINGTPLNMIDPGESEKYLGLQFDPWIGIARSGLSTKLDFWLQRIDQAPLKPLQKTDILKTYTIPRLIYIADHSEVKSALLETLDQKIRTAVKEWLHLPPCTCDAILYSSTRDGGLGITKLAGLIPSVQARRLHRIAQSSDDTMKCFMEKEKMEQLHKKLWIQAGGDRENIPSIWEAPPSSEPPNNVSTNSEWEAPTQKDKFPKPCNWRKNEFKKWTKLASQGRGIVNFERDKISNHWIQYYRRIPHRKLLTALQLRANVYPTREFLARGRQDQYIKACRHCDADNESCAHIIGNCPVTQDARIKRHNYICELLLEEAKKKDWVVFKEPHIRDSNKELYKPDLIFVKDGRALVVDVTVRYEAAKSSLEEAAAEKVRKYKHLETEVRHLTNAKDVTFVGFPLGARGKWHQDNFKLLTELGLSKSRQVKMAETFSTVALFSSVDIVHMFASRARKSMVM

SEQ ID NO: 909 - protein, 1665 aa, synthetic construct
MAPKKKRKVNISGSSCGSPNSADTSSDFKDLWTKLKECHDREVQGLQVKVTKLKQERILDAQRLEEFFTKNQQLREQQKVLHETIKVLEDRLRAGLCDRCAVTEEHMRKKQQEFENIRQQNLKLITELMNERNTLQEENKKLSEQLQQKIENDQQHQAAELECEEDVIPDSPITAFSFSGVNRLRRKENPHVRYIEQTHTKLEHSVCANEMRKVSKSSTHPQHNPNENEILVADTYDQSQSPMAKAHGTSSYTPDKSSFNLATVVAETLGLGVQEESETQGPMSPLGDELYHCLEGNHKKQPFESGSETPGTSESATPEGSPKRKVSSAEGAAKEEPKRRSARLSAKPPAKVEAKPKKAAAKDKSSDKKVQTKGKRGAKGKQAEVANQETKEDLPAENGETKTEESPASDEAGEKEAKSDSGSETPGTSESATPESYEQLAPQPCVGETLHSSLPRDSELFVPEEGSSEKESEDAPKTSPPTPGKHGLEQTGEEKVMVTVPDKNPPCPCCGTRVNSVLNLIEHLKVSHGKRGVCFRCAKCGKENSNYHSVVCHFKKCRGPETEKAPAGEWICEVCNRDFTTKIGLGQHKRLAHPAVRNQERIVASQPKETSNRGAHKRCWTKEEEELLIRLEAQFEGNKNINKLIAEHITTKTAKQISDKRRLLSRKPAEEPREEPGTCHHTRRAAASLRTEPEMSHHAQAEDRDNGPGRRPLPGRAAAGGRTMDEIRRHPDKGNGQQRPTKQKSEEQLQAYYKKTLEERLSAGALNTFPRAFKQVMEGRDIKLVINQTAQDCFGCLESISQIRTATRDKKDTVTREKHPKKPFQKWMKKRAIKKGNYLRFQRLFYLDRGKLAKIILDDIECLSCDIPLSEIYSVFKTRWETTGSFKSLGDFKTYGKADNTAFRELITAKEIEKNVQEMSKGSAPGPDGITLGDVVKMDPEFSRTMEIFNLWLTTGKIPDMVRGCRTVLIPKSSKPDRLKDINNWRPITIGSILLRLFSRIVTARLSKACPLNPRQRGFIRAAGCSENLKLLQTIIWSAKREHRPLGVVFVDIAKAFDTVSHQHIIHALQQREVDPHIVGLVSNMLENISTYITTKRNTHTDKIQIRVGVKQGDPMSPLLFNLAMDPLLCKLEESGKGYHRGQSSITAMAFADDLVLLSDSWENMNTNISILETFCNLTGLKTQGQKCHGFYIKPTKKSYTINDCAAWTINGTPLNMIDPGESEKYLGLQFDPWIGIARSGLSTKLDFWLQRIDQAPLKPLQKTDILKTYTIPRLIYIADHSEVKSALLETLDQKIRTAVKEWLHLPPCTCDAILYSSTRDGGLGITKLAGLIPSVQARRLHRIAQSSDDTMKCFMEKEKMEQLHKKLWIQAGGDRENIPSIWEAPPSSEPPNNVSTNSEWEAPTQKDKFPKPCNWRKNEFKKWTKLASQGRGIVNFERDKISNHWIQYYRRIPHRKLLTALQLRANVYPTREFLARGRQDQYIKACRHCDADNESCAHIIGNCPVTQDARIKRHNYICELLLEEAKKKDWVVFKEPHIRDSNKELYKPDLIFVKDGRALVVDVTVRYEAAKSSLEEAAAEKVRKYKHLETEVRHLTNAKDVTFVGFPLGARGKWHQDNFKLLTELGLSKSRQVKMAETFSTVALFSSVDIVHMFASRARKSMVM

SEQ ID NO: 910 - protein, 1665 aa, synthetic construct
MAPKKKRKVNISGSSCGSPNSADTSSDFKDLWTKLKECHDREVQGLQVKVTKLKQERILDAQRLEEFFTKNQQLREQQKVLHETIKVLEDRLRAGLCDRCAVTEEHMRKKQQEFENIRQQNLKLITELMNERNTLQEENKKLSEQLQQKIENDQQHQAAELECEEDVIPDSPITAFSFSGVNRLRRKENPHVRYIEQTHTKLEHSVCANEMRKVSKSSTHPQHNPNENEILVADTYDQSQSPMAKAHGTSSYTPDKSSFNLATVVAETLGLGVQEESETQGPMSPLGDELYHCLEGNHKKQPFESGSETPGTSESATPEGSPKRKVSSAEGAAKEEPKRRSARLSAKPPAKVEAKPKKAAAKDKSSDKKVQTKGKRGAKGKQAEVANQETKEDLPAENGETKTEESPASDEAGEKEAKSDSGSETPGTSESATPESYEQLAPQPCVGETLHSSLPRDSELFVPEEGSSEKESEDAPKTSPPTPGKHGLEQTGEEKVMVTVPDKNPPCPCCGTRVNSVLNLIEHLKVSHGKRGVCFRCAKCGKENSNYHSVVCHFKKCRGPETEKAPAGEWICEVCNRDFTTKIGLGQHKRLAHPAVRNQERIVASQPKETSNRGAHKRCWTKEEEELLIRLEAQFEGNKNINKLIAEHITTKTAKQISDKRRLLSRKPAEEPREEPGTCHHTRRAAASLRTEPEMSHHAQAEDRDNGPGRRPLPGRAAAGGRTMDEIRRHPDKGNGQQRPTKQKSEEQLQAYYKKTLEERLSAGALNTFPRAFKQVMEGRDIKLVINQTAQDCFGCLESISQIRTATRDKKDTVTREKHPKKPFQKWMKKRAIKKGNYLRFQRLFYLDRGKLAKIILDDIECLSCDIPLSEIYSVFKTRWETTGSFKSLGDFKTYGKADNTAFRELITAKEIEKNVQEMSKGSAPGPDGITLGDVVKMDPEFSRTMEIFNLWLTTGKIPDMVRGCRTVLIPKSSKPDRLKDINNWRPITIGSILLRLFSRIVTARLSKACPLNPRQRGFIRAAGCSENLKLLQTIIWSAKREHRPLGVVFVDIAKAFDTVSHQHIIHALQQREVDPHIVGLVSNMYENISTYITTGRNTHTDKIQIRVGVKQGDPMSPLLFNLAMDPLLCKLEESGKGYHRGQSSITAMAFADDLVLLSDSWENMNTNISILETFCNLTGLKTQGQKCHGFYIKPTKKSYTINDCAAWTINGTPLNMIDPGESEKYLGLQFDPWIGIARSGLSTKLDFWLQRIDQAPLKPLQKTDILKTYTIPRLIYIADHSEVKSALLETLDQKIRTAVKEWLHLPPCTCDAILYSSTRDGGLGITKLAGLIPSVQARRLHRIAQSSDDTMKCFMEKEKMEQLHKKLWIQAGGDRENIPSIWEAPPSSEPPNNVSTNSEWEAPTQKDKFPKPCNWRKNEFKKWTKLASQGRGIVNFERDKISNHWIQYYRRIPHRKLLTALQLRANVYPTREFLARGRQDQYIKACRHCDADNESCAHIIGNCPVTQDARIKRHNYICELLLEEAKKKDWVVFKEPHIRDSNKELYKPDLIFVKDGRALVVDVTVRYEAAKSSLEEAAAEKVRKYKHLETEVRHLTNAKDVTFVGFPLGARGKWHQDNFKLLTELGLSKSRQVKMAETFSTVALFSSVDIVHMFASRARKSMVM

SEQ ID NO: 911 - protein, 1665 aa, synthetic construct
MAPKKKRKVNISGSSCGSPNSADTSSDFKDLWTKLKECHDREVQGLQVKVTKLKQERILDAQRLEEFFTKNQQLREQQKVLHETIKVLEDRLRAGLCDRCAVTEEHMRKKQQEFENIRQQNLKLITELMNERNTLQEENKKLSEQLQQKIENDQQHQAAELECEEDVIPDSPITAFSFSGVNRLRRKENPHVRYIEQTHTKLEHSVCANEMRKVSKSSTHPQHNPNENEILVADTYDQSQSPMAKAHGTSSYTPDKSSFNLATVVAETLGLGVQEESETQGPMSPLGDELYHCLEGNHKKQPFESGSETPGTSESATPEGSPKRKVSSAEGAAKEEPKRRSARLSAKPPAKVEAKPKKAAAKDKSSDKKVQTKGKRGAKGKQAEVANQETKEDLPAENGETKTEESPASDEAGEKEAKSDSGSETPGTSESATPESYEQLAPQPCVGETLHSSLPRDSELFVPEEGSSEKESEDAPKTSPPTPGKHGLEQTGEEKVMVTVPDKNPPCPCCGTRVNSVLNLIEHLKVSHGKRGVCFRCAKCGKENSNYHSVVCHFKKCRGPETEKAPAGEWICEVCNRDFTTKIGLGQHKRLAHPAVRNQERIVASQPKETSNRGAHKRCWTKEEEELLIRLEAQFEGNKNINKLIAEHITTKTAKQISDKRRLLSRKPAEEPREEPGTCHHTRRAAASLRTEPEMSHHAQAEDRDNGPGRRPLPGRAAAGGRTMDEIRRHPDKGNGQQRPTKQKSEEQLQAYYKKTLEERLSAGALNTFPRAFKQVMEGRDIKLVINQTAQDCFGCLESISQIRTATRDKKDTVTREKHPKKPFQKWMKKRAIKKGNYLRFQRLFYLDRGKLAKIILDDIECLSCDIPLSEIYSVFKTRWETTGSFKSLGDFKTYGKADNTAFRELITAKEIEKNVQEMSKGSAPGPDGITLGDVVKMDPEFSRTMEIFNLWLTTGKIPDMVRGCRTVLIPKSSKPDRLKDINNWRPITIGSILLRLFSRIVTARLSKACPLNPRQRGFIRAAGCSENLKLLQTIIWSAKREHRPLGVVFVDIAKAFDTVSHQHIIHALQQREVDPHIVGLVSNMYENISTYITTRRNTHTDKIQIRVGVKQGDPMSPLLFNLAMDPLLCKLEESGKGYHRGQSSITAMAFADDLVLLSDSWENMNTNISILETFCNLTGLKTQGQKCHGFYIKPTKKSYTINDCAAWTINGTPLNMIDPGESEKYLGLQFDPWIGIARSGLSTKLDFWLQRIDQAPLKPLQKTDILKTYTIPRLIYIADHSEVKSALLETLDQKIRTAVKEWLHLPPCTCDAILYSSTRDGGLGITKLAGLIPSVQARRLHRIAQSSDDTMKCFMEKEKMEQLHKKLWIQAGGDRENIPSIWEAPPSSEPPNNVSTNSEWEAPTQKDKFPKPCNWRKNEFKKWTKLASQGRGIVNFERDKISNHWIQYYRRIPHRKLLTALQLRANVYPTREFLARGRQDQYIKACRHCDADNESCAHIIGNCPVTQDARIKRHNYICELLLEEAKKKDWVVFKEPHIRDSNKELYKPDLIFVKDGRALVVDVTVRYEAAKSSLEEAAAEKVRKYKHLETEVRHLTNAKDVTFVGFPLGARGKWHQDNFKLLTELGLSKSRQVKMAETFSTVALFSSVDIVHMFASRARKSMVM

SEQ ID NO: 912 - protein, 1665 aa, synthetic construct
MAPKKKRKVNISGSSCGSPNSADTSSDFKDLWTKLKECHDREVQGLQVKVTKLKQERILDAQRLEEFFTKNQQLREQQKVLHETIKVLEDRLRAGLCDRCAVTEEHMRKKQQEFENIRQQNLKLITELMNERNTLQEENKKLSEQLQQKIENDQQHQAAELECEEDVIPDSPITAFSFSGVNRLRRKENPHVRYIEQTHTKLEHSVCANEMRKVSKSSTHPQHNPNENEILVADTYDQSQSPMAKAHGTSSYTPDKSSFNLATVVAETLGLGVQEESETQGPMSPLGDELYHCLEGNHKKQPFESGSETPGTSESATPEGSPKRKVSSAEGAAKEEPKRRSARLSAKPPAKVEAKPKKAAAKDKSSDKKVQTKGKRGAKGKQAEVANQETKEDLPAENGETKTEESPASDEAGEKEAKSDSGSETPGTSESATPESYEQLAPQPCVGETLHSSLPRDSELFVPEEGSSEKESEDAPKTSPPTPGKHGLEQTGEEKVMVTVPDKNPPCPCCGTRVNSVLNLIEHLKVSHGKRGVCFRCAKCGKENSNYHSVVCHFKKCRGPETEKAPAGEWICEVCNRDFTTKIGLGQHKRLAHPAVRNQERIVASQPKETSNRGAHKRCWTKEEEELLIRLEAQFEGNKNINKLIAEHITTKTAKQISDKRRLLSRKPAEEPREEPGTCHHTRRAAASLRTEPEMSHHAQAEDRDNGPGRRPLPGRAAAGGRTMDEIRRHPDKGNGQQRPTKQKSEEQLQAYYKKTLEERLSAGALNTFPRAFKQVMEGRDIKLVINQTAQDCFGCLESISQIRTATRDKKDTVTREKHPKKPFQKWMKKRAIKKGNYLRFQRLFYLDRGKLAKIILDDIECLSCDIPLSEIYSVFKTRWETTGSFKSLGDFKTYGKADNTAFRELITAKEIEKNVQEMSKGSAPGPDGITLGDVVKMDPEFSRTMEIFNLWLTTGKIPDMVRGCRTVLIPKSSKPDRLKDINNWRPITIGSILLRLFSRIVTARLSKACPLNPRQRGFIRAAGCSENLKLLQTIIWSAKREHRPLGVVFVDIAKAFDTVSHQHIIHALQQREVDPHIVGLVSNMYENISTYITTKRNTHTDKIQIRVGIKQGDPMSPLLFNLAMDPLLCKLEESGKGYHRGQSSITAMAFADDLVLLSDSWENMNTNISILETFCNLTGLKTQGQKCHGFYIKPTKKSYTINDCAAWTINGTPLNMIDPGESEKYLGLQFDPWIGIARSGLSTKLDFWLQRIDQAPLKPLQKTDILKTYTIPRLIYIADHSEVKSALLETLDQKIRTAVKEWLHLPPCTCDAILYSSTRDGGLGITKLAGLIPSVQARRLHRIAQSSDDTMKCFMEKEKMEQLHKKLWIQAGGDRENIPSIWEAPPSSEPPNNVSTNSEWEAPTQKDKFPKPCNWRKNEFKKWTKLASQGRGIVNFERDKISNHWIQYYRRIPHRKLLTALQLRANVYPTREFLARGRQDQYIKACRHCDADNESCAHIIGNCPVTQDARIKRHNYICELLLEEAKKKDWVVFKEPHIRDSNKELYKPDLIFVKDGRALVVDVTVRYEAAKSSLEEAAAEKVRKYKHLETEVRHLTNAKDVTFVGFPLGARGKWHQDNFKLLTELGLSKSRQVKMAETFSTVALFSSVDIVHMFASRARKSMVM

SEQ ID NO: 913 - protein, 1665 aa, synthetic construct
MAPKKKRKVNISGSSCGSPNSADTSSDFKDLWTKLKECHDREVQGLQVKVTKLKQERILDAQRLEEFFTKNQQLREQQKVLHETIKVLEDRLRAGLCDRCAVTEEHMRKKQQEFENIRQQNLKLITELMNERNTLQEENKKLSEQLQQKIENDQQHQAAELECEEDVIPDSPITAFSFSGVNRLRRKENPHVRYIEQTHTKLEHSVCANEMRKVSKSSTHPQHNPNENEILVADTYDQSQSPMAKAHGTSSYTPDKSSFNLATVVAETLGLGVQEESETQGPMSPLGDELYHCLEGNHKKQPFESGSETPGTSESATPEGSPKRKVSSAEGAAKEEPKRRSARLSAKPPAKVEAKPKKAAAKDKSSDKKVQTKGKRGAKGKQAEVANQETKEDLPAENGETKTEESPASDEAGEKEAKSDSGSETPGTSESATPESYEQLAPQPCVGETLHSSLPRDSELFVPEEGSSEKESEDAPKTSPPTPGKHGLEQTGEEKVMVTVPDKNPPCPCCGTRVNSVLNLIEHLKVSHGKRGVCFRCAKCGKENSNYHSVVCHFKKCRGPETEKAPAGEWICEVCNRDFTTKIGLGQHKRLAHPAVRNQERIVASQPKETSNRGAHKRCWTKEEEELLIRLEAQFEGNKNINKLIAEHITTKTAKQISDKRRLLSRKPAEEPREEPGTCHHTRRAAASLRTEPEMSHHAQAEDRDNGPGRRPLPGRAAAGGRTMDEIRRHPDKGNGQQRPTKQKSEEQLQAYYKKTLEERLSAGALNTFPRAFKQVMEGRDIKLVINQTAQDCFGCLESISQIRTATRDKKDTVTREKHPKKPFQKWMKKRAIKKGNYLRFQRLFYLDRGKLAKIILDDIECLSCDIPLSEIYSVFKTRWETTGSFKSLGDFKTYGKADNTAFRELITAKEIEKNVQEMSKGSAPGPDGITLGDVVKMDPEFSRTMEIFNLWLTTGKIPDMVRGCRTVLIPKSSKPDRLKDINNWRPITIGSILLRLFSRIVTARLSKACPLNPRQRGFIRAAGCSENLKLLQTIIWSAKREHRPLGVVFVDIAKAFDTVSHQHIIHALQQREVDPHIVGLVSNMYENISTYITTKRNTHTDKIQIRVGVKQGDPMSPILFNLAMDPLLCKLEESGKGYHRGQSSITAMAFADDLVLLSDSWENMNTNISILETFCNLTGLKTQGQKCHGFYIKPTKKSYTINDCAAWTINGTPLNMIDPGESEKYLGLQFDPWIGIARSGLSTKLDFWLQRIDQAPLKPLQKTDILKTYTIPRLIYIADHSEVKSALLETLDQKIRTAVKEWLHLPPCTCDAILYSSTRDGGLGITKLAGLIPSVQARRLHRIAQSSDDTMKCFMEKEKMEQLHKKLWIQAGGDRENIPSIWEAPPSSEPPNNVSTNSEWEAPTQKDKFPKPCNWRKNEFKKWTKLASQGRGIVNFERDKISNHWIQYYRRIPHRKLLTALQLRANVYPTREFLARGRQDQYIKACRHCDADNESCAHIIGNCPVTQDARIKRHNYICELLLEEAKKKDWVVFKEPHIRDSNKELYKPDLIFVKDGRALVVDVTVRYEAAKSSLEEAAAEKVRKYKHLETEVRHLTNAKDVTFVGFPLGARGKWHQDNFKLLTELGLSKSRQVKMAETFSTVALFSSVDIVHMFASRARKSMVM

SEQ ID NO: 914 - protein, 1665 aa, synthetic construct
MAPKKKRKVNISGSSCGSPNSADTSSDFKDLWTKLKECHDREVQGLQVKVTKLKQERILDAQRLEEFFTKNQQLREQQKVLHETIKVLEDRLRAGLCDRCAVTEEHMRKKQQEFENIRQQNLKLITELMNERNTLQEENKKLSEQLQQKIENDQQHQAAELECEEDVIPDSPITAFSFSGVNRLRRKENPHVRYIEQTHTKLEHSVCANEMRKVSKSSTHPQHNPNENEILVADTYDQSQSPMAKAHGTSSYTPDKSSFNLATVVAETLGLGVQEESETQGPMSPLGDELYHCLEGNHKKQPFESGSETPGTSESATPEGSPKRKVSSAEGAAKEEPKRRSARLSAKPPAKVEAKPKKAAAKDKSSDKKVQTKGKRGAKGKQAEVANQETKEDLPAENGETKTEESPASDEAGEKEAKSDSGSETPGTSESATPESYEQLAPQPCVGETLHSSLPRDSELFVPEEGSSEKESEDAPKTSPPTPGKHGLEQTGEEKVMVTVPDKNPPCPCCGTRVNSVLNLIEHLKVSHGKRGVCFRCAKCGKENSNYHSVVCHFKKCRGPETEKAPAGEWICEVCNRDFTTKIGLGQHKRLAHPAVRNQERIVASQPKETSNRGAHKRCWTKEEEELLIRLEAQFEGNKNINKLIAEHITTKTAKQISDKRRLLSRKPAEEPREEPGTCHHTRRAAASLRTEPEMSHHAQAEDRDNGPGRRPLPGRAAAGGRTMDEIRRHPDKGNGQQRPTKQKSEEQLQAYYKKTLEERLSAGALNTFPRAFKQVMEGRDIKLVINQTAQDCFGCLESISQIRTATRDKKDTVTREKHPKKPFQKWMKKRAIKKGNYLRFQRLFYLDRGKLAKIILDDIECLSCDIPLSEIYSVFKTRWETTGSFKSLGDFKTYGKADNTAFRELITAKEIEKNVQEMSKGSAPGPDGITLGDVVKMDPEFSRTMEIFNLWLTTGKIPDMVRGCRTVLIPKSSKPDRLKDINNWRPITIGSILLRLFSRIVTARLSKACPLNPRQRGFIRAAGCSENLKLLQTIIWSAKREHRPLGVVFVDIAKAFDTVSHQHIIHALQQREVDPHIVGLVSNMYENISTYITTKRNTHTDKIQIRVGVKQGDPMSPLLFNLAMDPLLRKLEESGKGYHRGQSSITAMAFADDLVLLSDSWENMNTNISILETFCNLTGLKTQGQKCHGFYIKPTKKSYTINDCAAWTINGTPLNMIDPGESEKYLGLQFDPWIGIARSGLSTKLDFWLQRIDQAPLKPLQKTDILKTYTIPRLIYIADHSEVKSALLETLDQKIRTAVKEWLHLPPCTCDAILYSSTRDGGLGITKLAGLIPSVQARRLHRIAQSSDDTMKCFMEKEKMEQLHKKLWIQAGGDRENIPSIWEAPPSSEPPNNVSTNSEWEAPTQKDKFPKPCNWRKNEFKKWTKLASQGRGIVNFERDKISNHWIQYYRRIPHRKLLTALQLRANVYPTREFLARGRQDQYIKACRHCDADNESCAHIIGNCPVTQDARIKRHNYICELLLEEAKKKDWVVFKEPHIRDSNKELYKPDLIFVKDGRALVVDVTVRYEAAKSSLEEAAAEKVRKYKHLETEVRHLTNAKDVTFVGFPLGARGKWHQDNFKLLTELGLSKSRQVKMAETFSTVALFSSVDIVHMFASRARKSMVM

SEQ ID NO: 915 - protein, 1665 aa, synthetic construct
MAPKKKRKVNISGSSCGSPNSADTSSDFKDLWTKLKECHDREVQGLQVKVTKLKQERILDAQRLEEFFTKNQQLREQQKVLHETIKVLEDRLRAGLCDRCAVTEEHMRKKQQEFENIRQQNLKLITELMNERNTLQEENKKLSEQLQQKIENDQQHQAAELECEEDVIPDSPITAFSFSGVNRLRRKENPHVRYIEQTHTKLEHSVCANEMRKVSKSSTHPQHNPNENEILVADTYDQSQSPMAKAHGTSSYTPDKSSFNLATVVAETLGLGVQEESETQGPMSPLGDELYHCLEGNHKKQPFESGSETPGTSESATPEGSPKRKVSSAEGAAKEEPKRRSARLSAKPPAKVEAKPKKAAAKDKSSDKKVQTKGKRGAKGKQAEVANQETKEDLPAENGETKTEESPASDEAGEKEAKSDSGSETPGTSESATPESYEQLAPQPCVGETLHSSLPRDSELFVPEEGSSEKESEDAPKTSPPTPGKHGLEQTGEEKVMVTVPDKNPPCPCCGTRVNSVLNLIEHLKVSHGKRGVCFRCAKCGKENSNYHSVVCHFKKCRGPETEKAPAGEWICEVCNRDFTTKIGLGQHKRLAHPAVRNQERIVASQPKETSNRGAHKRCWTKEEEELLIRLEAQFEGNKNINKLIAEHITTKTAKQISDKRRLLSRKPAEEPREEPGTCHHTRRAAASLRTEPEMSHHAQAEDRDNGPGRRPLPGRAAAGGRTMDEIRRHPDKGNGQQRPTKQKSEEQLQAYYKKTLEERLSAGALNTFPRAFKQVMEGRDIKLVINQTAQDCFGCLESISQIRTATRDKKDTVTREKHPKKPFQKWMKKRAIKKGNYLRFQRLFYLDRGKLAKIILDDIECLSCDIPLSEIYSVFKTRWETTGSFKSLGDFKTYGKADNTAFRELITAKEIEKNVQEMSKGSAPGPDGITLGDVVKMDPEFSRTMEIFNLWLTTGKIPDMVRGCRTVLIPKSSKPDRLKDINNWRPITIGSILLRLFSRIVTARLSKACPLNPRQRGFIRAAGCSENLKLLQTIIWSAKREHRPLGVVFVDIAKAFDTVSHQHIIHALQQREVDPHIVGLVSNMYENISTYITTKRNTHTDKIQIRVGVKQGDPMSPLLFNLAMDPLLCKLEESGKGYKRGQSSITAMAFADDLVLLSDSWENMNTNISILETFCNLTGLKTQGQKCHGFYIKPTKKSYTINDCAAWTINGTPLNMIDPGESEKYLGLQFDPWIGIARSGLSTKLDFWLQRIDQAPLKPLQKTDILKTYTIPRLIYIADHSEVKSALLETLDQKIRTAVKEWLHLPPCTCDAILYSSTRDGGLGITKLAGLIPSVQARRLHRIAQSSDDTMKCFMEKEKMEQLHKKLWIQAGGDRENIPSIWEAPPSSEPPNNVSTNSEWEAPTQKDKFPKPCNWRKNEFKKWTKLASQGRGIVNFERDKISNHWIQYYRRIPHRKLLTALQLRANVYPTREFLARGRQDQYIKACRHCDADNESCAHIIGNCPVTQDARIKRHNYICELLLEEAKKKDWVVFKEPHIRDSNKELYKPDLIFVKDGRALVVDVTVRYEAAKSSLEEAAAEKVRKYKHLETEVRHLTNAKDVTFVGFPLGARGKWHQDNFKLLTELGLSKSRQVKMAETFSTVALFSSVDIVHMFASRARKSMVM

SEQ ID NO: 916 - protein, 1665 aa, synthetic construct
MAPKKKRKVNISGSSCGSPNSADTSSDFKDLWTKLKECHDREVQGLQVKVTKLKQERILDAQRLEEFFTKNQQLREQQKVLHETIKVLEDRLRAGLCDRCAVTEEHMRKKQQEFENIRQQNLKLITELMNERNTLQEENKKLSEQLQQKIENDQQHQAAELECEEDVIPDSPITAFSFSGVNRLRRKENPHVRYIEQTHTKLEHSVCANEMRKVSKSSTHPQHNPNENEILVADTYDQSQSPMAKAHGTSSYTPDKSSFNLATVVAETLGLGVQEESETQGPMSPLGDELYHCLEGNHKKQPFESGSETPGTSESATPEGSPKRKVSSAEGAAKEEPKRRSARLSAKPPAKVEAKPKKAAAKDKSSDKKVQTKGKRGAKGKQAEVANQETKEDLPAENGETKTEESPASDEAGEKEAKSDSGSETPGTSESATPESYEQLAPQPCVGETLHSSLPRDSELFVPEEGSSEKESEDAPKTSPPTPGKHGLEQTGEEKVMVTVPDKNPPCPCCGTRVNSVLNLIEHLKVSHGKRGVCFRCAKCGKENSNYHSVVCHFKKCRGPETEKAPAGEWICEVCNRDFTTKIGLGQHKRLAHPAVRNQERIVASQPKETSNRGAHKRCWTKEEEELLIRLEAQFEGNKNINKLIAEHITTKTAKQISDKRRLLSRKPAEEPREEPGTCHHTRRAAASLRTEPEMSHHAQAEDRDNGPGRRPLPGRAAAGGRTMDEIRRHPDKGNGQQRPTKQKSEEQLQAYYKKTLEERLSAGALNTFPRAFKQVMEGRDIKLVINQTAQDCFGCLESISQIRTATRDKKDTVTREKHPKKPFQKWMKKRAIKKGNYLRFQRLFYLDRGKLAKIILDDIECLSCDIPLSEIYSVFKTRWETTGSFKSLGDFKTYGKADNTAFRELITAKEIEKNVQEMSKGSAPGPDGITLGDVVKMDPEFSRTMEIFNLWLTTGKIPDMVRGCRTVLIPKSSKPDRLKDINNWRPITIGSILLRLFSRIVTARLSKACPLNPRQRGFIRAAGCSENLKLLQTIIWSAKREHRPLGVVFVDIAKAFDTVSHQHIIHALQQREVDPHIVGLVSNMYENISTYITTKRNTHTDKIQIRVGVKQGDPMSPLLFNLAMDPLLCKLEESGKGYHRGQSSITAMAFADDLVLLSDSWENMNTNISILETFCNLTGLKTQGQKCHGFYIKPTKKSYTINNCAAWTINGTPLNMIDPGESEKYLGLQFDPWIGIARSGLSTKLDFWLQRIDQAPLKPLQKTDILKTYTIPRLIYIADHSEVKSALLETLDQKIRTAVKEWLHLPPCTCDAILYSSTRDGGLGITKLAGLIPSVQARRLHRIAQSSDDTMKCFMEKEKMEQLHKKLWIQAGGDRENIPSIWEAPPSSEPPNNVSTNSEWEAPTQKDKFPKPCNWRKNEFKKWTKLASQGRGIVNFERDKISNHWIQYYRRIPHRKLLTALQLRANVYPTREFLARGRQDQYIKACRHCDADNESCAHIIGNCPVTQDARIKRHNYICELLLEEAKKKDWVVFKEPHIRDSNKELYKPDLIFVKDGRALVVDVTVRYEAAKSSLEEAAAEKVRKYKHLETEVRHLTNAKDVTFVGFPLGARGKWHQDNFKLLTELGLSKSRQVKMAETFSTVALFSSVDIVHMFASRARKSMVM

SEQ ID NO: 917 - protein, 1665 aa, synthetic construct
MAPKKKRKVNISGSSCGSPNSADTSSDFKDLWTKLKECHDREVQGLQVKVTKLKQERILDAQRLEEFFTKNQQLREQQKVLHETIKVLEDRLRAGLCDRCAVTEEHMRKKQQEFENIRQQNLKLITELMNERNTLQEENKKLSEQLQQKIENDQQHQAAELECEEDVIPDSPITAFSFSGVNRLRRKENPHVRYIEQTHTKLEHSVCANEMRKVSKSSTHPQHNPNENEILVADTYDQSQSPMAKAHGTSSYTPDKSSFNLATVVAETLGLGVQEESETQGPMSPLGDELYHCLEGNHKKQPFESGSETPGTSESATPEGSPKRKVSSAEGAAKEEPKRRSARLSAKPPAKVEAKPKKAAAKDKSSDKKVQTKGKRGAKGKQAEVANQETKEDLPAENGETKTEESPASDEAGEKEAKSDSGSETPGTSESATPESYEQLAPQPCVGETLHSSLPRDSELFVPEEGSSEKESEDAPKTSPPTPGKHGLEQTGEEKVMVTVPDKNPPCPCCGTRVNSVLNLIEHLKVSHGKRGVCFRCAKCGKENSNYHSVVCHFKKCRGPETEKAPAGEWICEVCNRDFTTKIGLGQHKRLAHPAVRNQERIVASQPKETSNRGAHKRCWTKEEEELLIRLEAQFEGNKNINKLIAEHITTKTAKQISDKRRLLSRKPAEEPREEPGTCHHTRRAAASLRTEPEMSHHAQAEDRDNGPGRRPLPGRAAAGGRTMDEIRRHPDKGNGQQRPTKQKSEEQLQAYYKKTLEERLSAGALNTFPRAFKQVMEGRDIKLVINQTAQDCFGCLESISQIRTATRDKKDTVTREKHPKKPFQKWMKKRAIKKGNYLRFQRLFYLDRGKLAKIILDDIECLSCDIPLSEIYSVFKTRWETTGSFKSLGDFKTYGKADNTAFRELITAKEIEKNVQEMSKGSAPGPDGITLGDVVKMDPEFSRTMEIFNLWLTTGKIPDMVRGCRTVLIPKSSKPDRLKDINNWRPITIGSILLRLFSRIVTARLSKACPLNPRQRGFIRAAGCSENLKLLQTIIWSAKREHRPLGVVFVDIAKAFDTVSHQHIIHALQQREVDPHIVGLVSNMYENISTYITTKRNTHTDKIQIRVGVKQGDPMSPLLFNLAMDPLLCKLEESGKGYHRGQSSITAMAFADDLVLLSDSWENMNTNISILETFCNLTGLKTQGQKCHGFYIKPTKKSYTINDCAPWTINGTPLNMIDPGESEKYLGLQFDPWIGIARSGLSTKLDFWLQRIDQAPLKPLQKTDILKTYTIPRLIYIADHSEVKSALLETLDQKIRTAVKEWLHLPPCTCDAILYSSTRDGGLGITKLAGLIPSVQARRLHRIAQSSDDTMKCFMEKEKMEQLHKKLWIQAGGDRENIPSIWEAPPSSEPPNNVSTNSEWEAPTQKDKFPKPCNWRKNEFKKWTKLASQGRGIVNFERDKISNHWIQYYRRIPHRKLLTALQLRANVYPTREFLARGRQDQYIKACRHCDADNESCAHIIGNCPVTQDARIKRHNYICELLLEEAKKKDWVVFKEPHIRDSNKELYKPDLIFVKDGRALVVDVTVRYEAAKSSLEEAAAEKVRKYKHLETEVRHLTNAKDVTFVGFPLGARGKWHQDNFKLLTELGLSKSRQVKMAETFSTVALFSSVDIVHMFASRARKSMVM

SEQ ID NO: 918 - protein, 1665 aa, synthetic construct
MAPKKKRKVNISGSSCGSPNSADTSSDFKDLWTKLKECHDREVQGLQVKVTKLKQERILDAQRLEEFFTKNQQLREQQKVLHETIKVLEDRLRAGLCDRCAVTEEHMRKKQQEFENIRQQNLKLITELMNERNTLQEENKKLSEQLQQKIENDQQHQAAELECEEDVIPDSPITAFSFSGVNRLRRKENPHVRYIEQTHTKLEHSVCANEMRKVSKSSTHPQHNPNENEILVADTYDQSQSPMAKAHGTSSYTPDKSSFNLATVVAETLGLGVQEESETQGPMSPLGDELYHCLEGNHKKQPFESGSETPGTSESATPEGSPKRKVSSAEGAAKEEPKRRSARLSAKPPAKVEAKPKKAAAKDKSSDKKVQTKGKRGAKGKQAEVANQETKEDLPAENGETKTEESPASDEAGEKEAKSDSGSETPGTSESATPESYEQLAPQPCVGETLHSSLPRDSELFVPEEGSSEKESEDAPKTSPPTPGKHGLEQTGEEKVMVTVPDKNPPCPCCGTRVNSVLNLIEHLKVSHGKRGVCFRCAKCGKENSNYHSVVCHFKKCRGPETEKAPAGEWICEVCNRDFTTKIGLGQHKRLAHPAVRNQERIVASQPKETSNRGAHKRCWTKEEEELLIRLEAQFEGNKNINKLIAEHITTKTAKQISDKRRLLSRKPAEEPREEPGTCHHTRRAAASLRTEPEMSHHAQAEDRDNGPGRRPLPGRAAAGGRTMDEIRRHPDKGNGQQRPTKQKSEEQLQAYYKKTLEERLSAGALNTFPRAFKQVMEGRDIKLVINQTAQDCFGCLESISQIRTATRDKKDTVTREKHPKKPFQKWMKKRAIKKGNYLRFQRLFYLDRGKLAKIILDDIECLSCDIPLSEIYSVFKTRWETTGSFKSLGDFKTYGKADNTAFRELITAKEIEKNVQEMSKGSAPGPDGITLGDVVKMDPEFSRTMEIFNLWLTTGKIPDMVRGCRTVLIPKSSKPDRLKDINNWRPITIGSILLRLFSRIVTARLSKACPLNPRQRGFIRAAGCSENLKLLQTIIWSAKREHRPLGVVFVDIAKAFDTVSHQHIIHALQQREVDPHIVGLVSNMYENISTYITTKRNTHTDKIQIRVGVKQGDPMSPLLFNLAMDPLLCKLEESGKGYHRGQSSITAMAFADDLVLLSDSWENMNTNISILETFCNLTGLKTQGQKCHGFYIKPTKKSYTINDCAAFTINGTPLNMIDPGESEKYLGLQFDPWIGIARSGLSTKLDFWLQRIDQAPLKPLQKTDILKTYTIPRLIYIADHSEVKSALLETLDQKIRTAVKEWLHLPPCTCDAILYSSTRDGGLGITKLAGLIPSVQARRLHRIAQSSDDTMKCFMEKEKMEQLHKKLWIQAGGDRENIPSIWEAPPSSEPPNNVSTNSEWEAPTQKDKFPKPCNWRKNEFKKWTKLASQGRGIVNFERDKISNHWIQYYRRIPHRKLLTALQLRANVYPTREFLARGRQDQYIKACRHCDADNESCAHIIGNCPVTQDARIKRHNYICELLLEEAKKKDWVVFKEPHIRDSNKELYKPDLIFVKDGRALVVDVTVRYEAAKSSLEEAAAEKVRKYKHLETEVRHLTNAKDVTFVGFPLGARGKWHQDNFKLLTELGLSKSRQVKMAETFSTVALFSSVDIVHMFASRARKSMVM

SEQ ID NO: 919 - protein, 1665 aa, synthetic construct
MAPKKKRKVNISGSSCGSPNSADTSSDFKDLWTKLKECHDREVQGLQVKVTKLKQERILDAQRLEEFFTKNQQLREQQKVLHETIKVLEDRLRAGLCDRCAVTEEHMRKKQQEFENIRQQNLKLITELMNERNTLQEENKKLSEQLQQKIENDQQHQAAELECEEDVIPDSPITAFSFSGVNRLRRKENPHVRYIEQTHTKLEHSVCANEMRKVSKSSTHPQHNPNENEILVADTYDQSQSPMAKAHGTSSYTPDKSSFNLATVVAETLGLGVQEESETQGPMSPLGDELYHCLEGNHKKQPFESGSETPGTSESATPEGSPKRKVSSAEGAAKEEPKRRSARLSAKPPAKVEAKPKKAAAKDKSSDKKVQTKGKRGAKGKQAEVANQETKEDLPAENGETKTEESPASDEAGEKEAKSDSGSETPGTSESATPESYEQLAPQPCVGETLHSSLPRDSELFVPEEGSSEKESEDAPKTSPPTPGKHGLEQTGEEKVMVTVPDKNPPCPCCGTRVNSVLNLIEHLKVSHGKRGVCFRCAKCGKENSNYHSVVCHFKKCRGPETEKAPAGEWICEVCNRDFTTKIGLGQHKRLAHPAVRNQERIVASQPKETSNRGAHKRCWTKEEEELLIRLEAQFEGNKNINKLIAEHITTKTAKQISDKRRLLSRKPAEEPREEPGTCHHTRRAAASLRTEPEMSHHAQAEDRDNGPGRRPLPGRAAAGGRTMDEIRRHPDKGNGQQRPTKQKSEEQLQAYYKKTLEERLSAGALNTFPRAFKQVMEGRDIKLVINQTAQDCFGCLESISQIRTATRDKKDTVTREKHPKKPFQKWMKKRAIKKGNYLRFQRLFYLDRGKLAKIILDDIECLSCDIPLSEIYSVFKTRWETTGSFKSLGDFKTYGKADNTAFRELITAKEIEKNVQEMSKGSAPGPDGITLGDVVKMDPEFSRTMEIFNLWLTTGKIPDMVRGCRTVLIPKSSKPDRLKDINNWRPITIGSILLRLFSRIVTARLSKACPLNPRQRGFIRAAGCSENLKLLQTIIWSAKREHRPLGVVFVDIAKAFDTVSHQHIIHALQQREVDPHIVGLVSNMYENISTYITTKRNTHTDKIQIRVGVKQGDPMSPLLFNLAMDPLLCKLEESGKGYHRGQSSITAMAFADDLVLLSDSWENMNTNISILETFCNLTGLKTQGQKCHGFYIKPTKKSYTINDCAAWTINGTPLNLIDPGESEKYLGLQFDPWIGIARSGLSTKLDFWLQRIDQAPLKPLQKTDILKTYTIPRLIYIADHSEVKSALLETLDQKIRTAVKEWLHLPPCTCDAILYSSTRDGGLGITKLAGLIPSVQARRLHRIAQSSDDTMKCFMEKEKMEQLHKKLWIQAGGDRENIPSIWEAPPSSEPPNNVSTNSEWEAPTQKDKFPKPCNWRKNEFKKWTKLASQGRGIVNFERDKISNHWIQYYRRIPHRKLLTALQLRANVYPTREFLARGRQDQYIKACRHCDADNESCAHIIGNCPVTQDARIKRHNYICELLLEEAKKKDWVVFKEPHIRDSNKELYKPDLIFVKDGRALVVDVTVRYEAAKSSLEEAAAEKVRKYKHLETEVRHLTNAKDVTFVGFPLGARGKWHQDNFKLLTELGLSKSRQVKMAETFSTVALFSSVDIVHMFASRARKSMVM

SEQ ID NO: 920 - protein, 1665 aa, synthetic construct
MAPKKKRKVNISGSSCGSPNSADTSSDFKDLWTKLKECHDREVQGLQVKVTKLKQERILDAQRLEEFFTKNQQLREQQKVLHETIKVLEDRLRAGLCDRCAVTEEHMRKKQQEFENIRQQNLKLITELMNERNTLQEENKKLSEQLQQKIENDQQHQAAELECEEDVIPDSPITAFSFSGVNRLRRKENPHVRYIEQTHTKLEHSVCANEMRKVSKSSTHPQHNPNENEILVADTYDQSQSPMAKAHGTSSYTPDKSSFNLATVVAETLGLGVQEESETQGPMSPLGDELYHCLEGNHKKQPFESGSETPGTSESATPEGSPKRKVSSAEGAAKEEPKRRSARLSAKPPAKVEAKPKKAAAKDKSSDKKVQTKGKRGAKGKQAEVANQETKEDLPAENGETKTEESPASDEAGEKEAKSDSGSETPGTSESATPESYEQLAPQPCVGETLHSSLPRDSELFVPEEGSSEKESEDAPKTSPPTPGKHGLEQTGEEKVMVTVPDKNPPCPCCGTRVNSVLNLIEHLKVSHGKRGVCFRCAKCGKENSNYHSVVCHFKKCRGPETEKAPAGEWICEVCNRDFTTKIGLGQHKRLAHPAVRNQERIVASQPKETSNRGAHKRCWTKEEEELLIRLEAQFEGNKNINKLIAEHITTKTAKQISDKRRLLSRKPAEEPREEPGTCHHTRRAAASLRTEPEMSHHAQAEDRDNGPGRRPLPGRAAAGGRTMDEIRRHPDKGNGQQRPTKQKSEEQLQAYYKKTLEERLSAGALNTFPRAFKQVMEGRDIKLVINQTAQDCFGCLESISQIRTATRDKKDTVTREKHPKKPFQKWMKKRAIKKGNYLRFQRLFYLDRGKLAKIILDDIECLSCDIPLSEIYSVFKTRWETTGSFKSLGDFKTYGKADNTAFRELITAKEIEKNVQEMSKGSAPGPDGITLGDVVKMDPEFSRTMEIFNLWLTTGKIPDMVRGCRTVLIPKSSKPDRLKDINNWRPITIGSILLRLFSRIVTARLSKACPLNPRQRGFIRAAGCSENLKLLQTIIWSAKREHRPLGVVFVDIAKAFDTVSHQHIIHALQQREVDPHIVGLVSNMYENISTYITTKRNTHTDKIQIRVGVKQGDPMSPLLFNLAMDPLLCKLEESGKGYHRGQSSITAMAFADDLVLLSDSWENMNTNISILETFCNLTGLKTQGQKCHGFYIKPTKKSYTINDCAAWTINGTPLNMIDPGESERYLGLQFDPWIGIARSGLSTKLDFWLQRIDQAPLKPLQKTDILKTYTIPRLIYIADHSEVKSALLETLDQKIRTAVKEWLHLPPCTCDAILYSSTRDGGLGITKLAGLIPSVQARRLHRIAQSSDDTMKCFMEKEKMEQLHKKLWIQAGGDRENIPSIWEAPPSSEPPNNVSTNSEWEAPTQKDKFPKPCNWRKNEFKKWTKLASQGRGIVNFERDKISNHWIQYYRRIPHRKLLTALQLRANVYPTREFLARGRQDQYIKACRHCDADNESCAHIIGNCPVTQDARIKRHNYICELLLEEAKKKDWVVFKEPHIRDSNKELYKPDLIFVKDGRALVVDVTVRYEAAKSSLEEAAAEKVRKYKHLETEVRHLTNAKDVTFVGFPLGARGKWHQDNFKLLTELGLSKSRQVKMAETFSTVALFSSVDIVHMFASRARKSMVM

SEQ ID NO: 921 - protein, 1665 aa, synthetic construct
MAPKKKRKVNISGSSCGSPNSADTSSDFKDLWTKLKECHDREVQGLQVKVTKLKQERILDAQRLEEFFTKNQQLREQQKVLHETIKVLEDRLRAGLCDRCAVTEEHMRKKQQEFENIRQQNLKLITELMNERNTLQEENKKLSEQLQQKIENDQQHQAAELECEEDVIPDSPITAFSFSGVNRLRRKENPHVRYIEQTHTKLEHSVCANEMRKVSKSSTHPQHNPNENEILVADTYDQSQSPMAKAHGTSSYTPDKSSFNLATVVAETLGLGVQEESETQGPMSPLGDELYHCLEGNHKKQPFESGSETPGTSESATPEGSPKRKVSSAEGAAKEEPKRRSARLSAKPPAKVEAKPKKAAAKDKSSDKKVQTKGKRGAKGKQAEVANQETKEDLPAENGETKTEESPASDEAGEKEAKSDSGSETPGTSESATPESYEQLAPQPCVGETLHSSLPRDSELFVPEEGSSEKESEDAPKTSPPTPGKHGLEQTGEEKVMVTVPDKNPPCPCCGTRVNSVLNLIEHLKVSHGKRGVCFRCAKCGKENSNYHSVVCHFKKCRGPETEKAPAGEWICEVCNRDFTTKIGLGQHKRLAHPAVRNQERIVASQPKETSNRGAHKRCWTKEEEELLIRLEAQFEGNKNINKLIAEHITTKTAKQISDKRRLLSRKPAEEPREEPGTCHHTRRAAASLRTEPEMSHHAQAEDRDNGPGRRPLPGRAAAGGRTMDEIRRHPDKGNGQQRPTKQKSEEQLQAYYKKTLEERLSAGALNTFPRAFKQVMEGRDIKLVINQTAQDCFGCLESISQIRTATRDKKDTVTREKHPKKPFQKWMKKRAIKKGNYLRFQRLFYLDRGKLAKIILDDIECLSCDIPLSEIYSVFKTRWETTGSFKSLGDFKTYGKADNTAFRELITAKEIEKNVQEMSKGSAPGPDGITLGDVVKMDPEFSRTMEIFNLWLTTGKIPDMVRGCRTVLIPKSSKPDRLKDINNWRPITIGSILLRLFSRIVTARLSKACPLNPRQRGFIRAAGCSENLKLLQTIIWSAKREHRPLGVVFVDIAKAFDTVSHQHIIHALQQREVDPHIVGLVSNMYENISTYITTKRNTHTDKIQIRVGVKQGDPMSPLLFNLAMDPLLCKLEESGKGYHRGQSSITAMAFADDLVLLSDSWENMNTNISILETFCNLTGLKTQGQKCHGFYIKPTKKSYTINDCAAWTINGTPLNMIDPGESEKHLGLQFDPWIGIARSGLSTKLDFWLQRIDQAPLKPLQKTDILKTYTIPRLIYIADHSEVKSALLETLDQKIRTAVKEWLHLPPCTCDAILYSSTRDGGLGITKLAGLIPSVQARRLHRIAQSSDDTMKCFMEKEKMEQLHKKLWIQAGGDRENIPSIWEAPPSSEPPNNVSTNSEWEAPTQKDKFPKPCNWRKNEFKKWTKLASQGRGIVNFERDKISNHWIQYYRRIPHRKLLTALQLRANVYPTREFLARGRQDQYIKACRHCDADNESCAHIIGNCPVTQDARIKRHNYICELLLEEAKKKDWVVFKEPHIRDSNKELYKPDLIFVKDGRALVVDVTVRYEAAKSSLEEAAAEKVRKYKHLETEVRHLTNAKDVTFVGFPLGARGKWHQDNFKLLTELGLSKSRQVKMAETFSTVALFSSVDIVHMFASRARKSMVM

SEQ ID NO: 922 - protein, 1665 aa, synthetic construct
MAPKKKRKVNISGSSCGSPNSADTSSDFKDLWTKLKECHDREVQGLQVKVTKLKQERILDAQRLEEFFTKNQQLREQQKVLHETIKVLEDRLRAGLCDRCAVTEEHMRKKQQEFENIRQQNLKLITELMNERNTLQEENKKLSEQLQQKIENDQQHQAAELECEEDVIPDSPITAFSFSGVNRLRRKENPHVRYIEQTHTKLEHSVCANEMRKVSKSSTHPQHNPNENEILVADTYDQSQSPMAKAHGTSSYTPDKSSFNLATVVAETLGLGVQEESETQGPMSPLGDELYHCLEGNHKKQPFESGSETPGTSESATPEGSPKRKVSSAEGAAKEEPKRRSARLSAKPPAKVEAKPKKAAAKDKSSDKKVQTKGKRGAKGKQAEVANQETKEDLPAENGETKTEESPASDEAGEKEAKSDSGSETPGTSESATPESYEQLAPQPCVGETLHSSLPRDSELFVPEEGSSEKESEDAPKTSPPTPGKHGLEQTGEEKVMVTVPDKNPPCPCCGTRVNSVLNLIEHLKVSHGKRGVCFRCAKCGKENSNYHSVVCHFKKCRGPETEKAPAGEWICEVCNRDFTTKIGLGQHKRLAHPAVRNQERIVASQPKETSNRGAHKRCWTKEEEELLIRLEAQFEGNKNINKLIAEHITTKTAKQISDKRRLLSRKPAEEPREEPGTCHHTRRAAASLRTEPEMSHHAQAEDRDNGPGRRPLPGRAAAGGRTMDEIRRHPDKGNGQQRPTKQKSEEQLQAYYKKTLEERLSAGALNTFPRAFKQVMEGRDIKLVINQTAQDCFGCLESISQIRTATRDKKDTVTREKHPKKPFQKWMKKRAIKKGNYLRFQRLFYLDRGKLAKIILDDIECLSCDIPLSEIYSVFKTRWETTGSFKSLGDFKTYGKADNTAFRELITAKEIEKNVQEMSKGSAPGPDGITLGDVVKMDPEFSRTMEIFNLWLTTGKIPDMVRGCRTVLIPKSSKPDRLKDINNWRPITIGSILLRLFSRIVTARLSKACPLNPRQRGFIRAAGCSENLKLLQTIIWSAKREHRPLGVVFVDIAKAFDTVSHQHIIHALQQREVDPHIVGLVSNMYENISTYITTKRNTHTDKIQIRVGVKQGDPMSPLLFNLAMDPLLCKLEESGKGYHRGQSSITAMAFADDLVLLSDSWENMNTNISILETFCNLTGLKTQGQKCHGFYIKPTKKSYTINDCAAWTINGTPLNMIDPGESEKYLGLQFNPWIGIARSGLSTKLDFWLQRIDQAPLKPLQKTDILKTYTIPRLIYIADHSEVKSALLETLDQKIRTAVKEWLHLPPCTCDAILYSSTRDGGLGITKLAGLIPSVQARRLHRIAQSSDDTMKCFMEKEKMEQLHKKLWIQAGGDRENIPSIWEAPPSSEPPNNVSTNSEWEAPTQKDKFPKPCNWRKNEFKKWTKLASQGRGIVNFERDKISNHWIQYYRRIPHRKLLTALQLRANVYPTREFLARGRQDQYIKACRHCDADNESCAHIIGNCPVTQDARIKRHNYICELLLEEAKKKDWVVFKEPHIRDSNKELYKPDLIFVKDGRALVVDVTVRYEAAKSSLEEAAAEKVRKYKHLETEVRHLTNAKDVTFVGFPLGARGKWHQDNFKLLTELGLSKSRQVKMAETFSTVALFSSVDIVHMFASRARKSMVM

SEQ ID NO: 923 - protein, 1665 aa, synthetic construct
MAPKKKRKVNISGSSCGSPNSADTSSDFKDLWTKLKECHDREVQGLQVKVTKLKQERILDAQRLEEFFTKNQQLREQQKVLHETIKVLEDRLRAGLCDRCAVTEEHMRKKQQEFENIRQQNLKLITELMNERNTLQEENKKLSEQLQQKIENDQQHQAAELECEEDVIPDSPITAFSFSGVNRLRRKENPHVRYIEQTHTKLEHSVCANEMRKVSKSSTHPQHNPNENEILVADTYDQSQSPMAKAHGTSSYTPDKSSFNLATVVAETLGLGVQEESETQGPMSPLGDELYHCLEGNHKKQPFESGSETPGTSESATPEGSPKRKVSSAEGAAKEEPKRRSARLSAKPPAKVEAKPKKAAAKDKSSDKKVQTKGKRGAKGKQAEVANQETKEDLPAENGETKTEESPASDEAGEKEAKSDSGSETPGTSESATPESYEQLAPQPCVGETLHSSLPRDSELFVPEEGSSEKESEDAPKTSPPTPGKHGLEQTGEEKVMVTVPDKNPPCPCCGTRVNSVLNLIEHLKVSHGKRGVCFRCAKCGKENSNYHSVVCHFKKCRGPETEKAPAGEWICEVCNRDFTTKIGLGQHKRLAHPAVRNQERIVASQPKETSNRGAHKRCWTKEEEELLIRLEAQFEGNKNINKLIAEHITTKTAKQISDKRRLLSRKPAEEPREEPGTCHHTRRAAASLRTEPEMSHHAQAEDRDNGPGRRPLPGRAAAGGRTMDEIRRHPDKGNGQQRPTKQKSEEQLQAYYKKTLEERLSAGALNTFPRAFKQVMEGRDIKLVINQTAQDCFGCLESISQIRTATRDKKDTVTREKHPKKPFQKWMKKRAIKKGNYLRFQRLFYLDRGKLAKIILDDIECLSCDIPLSEIYSVFKTRWETTGSFKSLGDFKTYGKADNTAFRELITAKEIEKNVQEMSKGSAPGPDGITLGDVVKMDPEFSRTMEIFNLWLTTGKIPDMVRGCRTVLIPKSSKPDRLKDINNWRPITIGSILLRLFSRIVTARLSKACPLNPRQRGFIRAAGCSENLKLLQTIIWSAKREHRPLGVVFVDIAKAFDTVSHQHIIHALQQREVDPHIVGLVSNMYENISTYITTKRNTHTDKIQIRVGVKQGDPMSPLLFNLAMDPLLCKLEESGKGYHRGQSSITAMAFADDLVLLSDSWENMNTNISILETFCNLTGLKTQGQKCHGFYIKPTKKSYTINDCAAWTINGTPLNMIDPGESEKYLGLQFDPWIGIARPGLSTKLDFWLQRIDQAPLKPLQKTDILKTYTIPRLIYIADHSEVKSALLETLDQKIRTAVKEWLHLPPCTCDAILYSSTRDGGLGITKLAGLIPSVQARRLHRIAQSSDDTMKCFMEKEKMEQLHKKLWIQAGGDRENIPSIWEAPPSSEPPNNVSTNSEWEAPTQKDKFPKPCNWRKNEFKKWTKLASQGRGIVNFERDKISNHWIQYYRRIPHRKLLTALQLRANVYPTREFLARGRQDQYIKACRHCDADNESCAHIIGNCPVTQDARIKRHNYICELLLEEAKKKDWVVFKEPHIRDSNKELYKPDLIFVKDGRALVVDVTVRYEAAKSSLEEAAAEKVRKYKHLETEVRHLTNAKDVTFVGFPLGARGKWHQDNFKLLTELGLSKSRQVKMAETFSTVALFSSVDIVHMFASRARKSMVM

SEQ ID NO: 924 - protein, 1665 aa, synthetic construct; identical to SEQ ID NO: 814

SEQ ID NO: 925 - protein, 1665 aa, synthetic construct
MAPKKKRKVNISGSSCGSPNSADTSSDFKDLWTKLKECHDREVQGLQVKVTKLKQERILDAQRLEEFFTKNQQLREQQKVLHETIKVLEDRLRAGLCDRCAVTEEHMRKKQQEFENIRQQNLKLITELMNERNTLQEENKKLSEQLQQKIENDQQHQAAELECEEDVIPDSPITAFSFSGVNRLRRKENPHVRYIEQTHTKLEHSVCANEMRKVSKSSTHPQHNPNENEILVADTYDQSQSPMAKAHGTSSYTPDKSSFNLATVVAETLGLGVQEESETQGPMSPLGDELYHCLEGNHKKQPFESGSETPGTSESATPEGSPKRKVSSAEGAAKEEPKRRSARLSAKPPAKVEAKPKKAAAKDKSSDKKVQTKGKRGAKGKQAEVANQETKEDLPAENGETKTEESPASDEAGEKEAKSDSGSETPGTSESATPESYEQLAPQPCVGETLHSSLPRDSELFVPEEGSSEKESEDAPKTSPPTPGKHGLEQTGEEKVMVTVPDKNPPCPCCGTRVNSVLNLIEHLKVSHGKRGVCFRCAKCGKENSNYHSVVCHFKKCRGPETEKAPAGEWICEVCNRDFTTKIGLGQHKRLAHPAVRNQERIVASQPKETSNRGAHKRCWTKEEEELLIRLEAQFEGNKNINKLIAEHITTKTAKQISDKRRLLSRKPAEEPREEPGTCHHTRRAAASLRTEPEMSHHAQAEDRDNGPGRRPLPGRAAAGGRTMDEIRRHPDKGNGQQRPTKQKSEEQLQAYYKKTLEERLSAGALNTFPRAFKQVMEGRDIKLVINQTAQDCFGCLESISQIRTATRDKKDTVTREKHPKKPFQKWMKKRAIKKGNYLRFQRLFYLDRGKLAKIILDDIECLSCDIPLSEIYSVFKTRWETTGSFKSLGDFKTYGKADNTAFRELITAKEIEKNVQEMSKGSAPGPDGITLGDVVKMDPEFSRTMEIFNLWLTTGKIPDMVRGCRTVLIPKSSKPDRLKDINNWRPITIGSILLRLFSRIVTARLSKACPLNPRQRGFIRAAGCSENLKLLQTIIWSAKREHRPLGVVFVDIAKAFDTVSHQHIIHALQQREVDPHIVGLVSNMYENISTYITTKRNTHTDKIQIRVGVKQGDPMSPLLFNLAMDPLLCKLEESGKGYHRGQSSITAMAFADDLVLLSDSWENMNTNISILETFCNLTGLKTQGQKCHGFYIKPTKKSYTINDCAAWTINGTPLNMIDPGESEKYLGLQFDPWIGIARSGLSTKLDKWLQRIDQAPLKPLQKTDILKTYTIPRLIYIADHSEVKSALLETLDQKIRTAVKEWLHLPPCTCDAILYSSTRDGGLGITKLAGLIPSVQARRLHRIAQSSDDTMKCFMEKEKMEQLHKKLWIQAGGDRENIPSIWEAPPSSEPPNNVSTNSEWEAPTQKDKFPKPCNWRKNEFKKWTKLASQGRGIVNFERDKISNHWIQYYRRIPHRKLLTALQLRANVYPTREFLARGRQDQYIKACRHCDADNESCAHIIGNCPVTQDARIKRHNYICELLLEEAKKKDWVVFKEPHIRDSNKELYKPDLIFVKDGRALVVDVTVRYEAAKSSLEEAAAEKVRKYKHLETEVRHLTNAKDVTFVGFPLGARGKWHQDNFKLLTELGLSKSRQVKMAETFSTVALFSSVDIVHMFASRARKSMVM

SEQ ID NO: 926 - protein, 1665 aa, synthetic construct
MAPKKKRKVNISGSSCGSPNSADTSSDFKDLWTKLKECHDREVQGLQVKVTKLKQERILDAQRLEEFFTKNQQLREQQKVLHETIKVLEDRLRAGLCDRCAVTEEHMRKKQQEFENIRQQNLKLITELMNERNTLQEENKKLSEQLQQKIENDQQHQAAELECEEDVIPDSPITAFSFSGVNRLRRKENPHVRYIEQTHTKLEHSVCANEMRKVSKSSTHPQHNPNENEILVADTYDQSQSPMAKAHGTSSYTPDKSSFNLATVVAETLGLGVQEESETQGPMSPLGDELYHCLEGNHKKQPFESGSETPGTSESATPEGSPKRKVSSAEGAAKEEPKRRSARLSAKPPAKVEAKPKKAAAKDKSSDKKVQTKGKRGAKGKQAEVANQETKEDLPAENGETKTEESPASDEAGEKEAKSDSGSETPGTSESATPESYEQLAPQPCVGETLHSSLPRDSELFVPEEGSSEKESEDAPKTSPPTPGKHGLEQTGEEKVMVTVPDKNPPCPCCGTRVNSVLNLIEHLKVSHGKRGVCFRCAKCGKENSNYHSVVCHFKKCRGPETEKAPAGEWICEVCNRDFTTKIGLGQHKRLAHPAVRNQERIVASQPKETSNRGAHKRCWTKEEEELLIRLEAQFEGNKNINKLIAEHITTKTAKQISDKRRLLSRKPAEEPREEPGTCHHTRRAAASLRTEPEMSHHAQAEDRDNGPGRRPLPGRAAAGGRTMDEIRRHPDKGNGQQRPTKQKSEEQLQAYYKKTLEERLSAGALNTFPRAFKQVMEGRDIKLVINQTAQDCFGCLESISQIRTATRDKKDTVTREKHPKKPFQKWMKKRAIKKGNYLRFQRLFYLDRGKLAKIILDDIECLSCDIPLSEIYSVFKTRWETTGSFKSLGDFKTYGKADNTAFRELITAKEIEKNVQEMSKGSAPGPDGITLGDVVKMDPEFSRTMEIFNLWLTTGKIPDMVRGCRTVLIPKSSKPDRLKDINNWRPITIGSILLRLFSRIVTARLSKACPLNPRQRGFIRAAGCSENLKLLQTIIWSAKREHRPLGVVFVDIAKAFDTVSHQHIIHALQQREVDPHIVGLVSNMYENISTYITTKRNTHTDKIQIRVGVKQGDPMSPLLFNLAMDPLLCKLEESGKGYHRGQSSITAMAFADDLVLLSDSWENMNTNISILETFCNLTGLKTQGQKCHGFYIKPTKKSYTINDCAAWTINGTPLNMIDPGESEKYLGLQFDPWIGIARSGLSTKLDFWLKRIDQAPLKPLQKTDILKTYTIPRLIYIADHSEVKSALLETLDQKIRTAVKEWLHLPPCTCDAILYSSTRDGGLGITKLAGLIPSVQARRLHRIAQSSDDTMKCFMEKEKMEQLHKKLWIQAGGDRENIPSIWEAPPSSEPPNNVSTNSEWEAPTQKDKFPKPCNWRKNEFKKWTKLASQGRGIVNFERDKISNHWIQYYRRIPHRKLLTALQLRANVYPTREFLARGRQDQYIKACRHCDADNESCAHIIGNCPVTQDARIKRHNYICELLLEEAKKKDWVVFKEPHIRDSNKELYKPDLIFVKDGRALVVDVTVRYEAAKSSLEEAAAEKVRKYKHLETEVRHLTNAKDVTFVGFPLGARGKWHQDNFKLLTELGLSKSRQVKMAETFSTVALFSSVDIVHMFASRARKSMVM

SEQ ID NO: 927 - protein, 1665 aa, synthetic construct
MAPKKKRKVNISGSSCGSPNSADTSSDFKDLWTKLKECHDREVQGLQVKVTKLKQERILDAQRLEEFFTKNQQLREQQKVLHETIKVLEDRLRAGLCDRCAVTEEHMRKKQQEFENIRQQNLKLITELMNERNTLQEENKKLSEQLQQKIENDQQHQAAELECEEDVIPDSPITAFSFSGVNRLRRKENPHVRYIEQTHTKLEHSVCANEMRKVSKSSTHPQHNPNENEILVADTYDQSQSPMAKAHGTSSYTPDKSSFNLATVVAETLGLGVQEESETQGPMSPLGDELYHCLEGNHKKQPFESGSETPGTSESATPEGSPKRKVSSAEGAAKEEPKRRSARLSAKPPAKVEAKPKKAAAKDKSSDKKVQTKGKRGAKGKQAEVANQETKEDLPAENGETKTEESPASDEAGEKEAKSDSGSETPGTSESATPESYEQLAPQPCVGETLHSSLPRDSELFVPEEGSSEKESEDAPKTSPPTPGKHGLEQTGEEKVMVTVPDKNPPCPCCGTRVNSVLNLIEHLKVSHGKRGVCFRCAKCGKENSNYHSVVCHFKKCRGPETEKAPAGEWICEVCNRDFTTKIGLGQHKRLAHPAVRNQERIVASQPKETSNRGAHKRCWTKEEEELLIRLEAQFEGNKNINKLIAEHITTKTAKQISDKRRLLSRKPAEEPREEPGTCHHTRRAAASLRTEPEMSHHAQAEDRDNGPGRRPLPGRAAAGGRTMDEIRRHPDKGNGQQRPTKQKSEEQLQAYYKKTLEERLSAGALNTFPRAFKQVMEGRDIKLVINQTAQDCFGCLESISQIRTATRDKKDTVTREKHPKKPFQKWMKKRAIKKGNYLRFQRLFYLDRGKLAKIILDDIECLSCDIPLSEIYSVFKTRWETTGSFKSLGDFKTYGKADNTAFRELITAKEIEKNVQEMSKGSAPGPDGITLGDVVKMDPEFSRTMEIFNLWLTTGKIPDMVRGCRTVLIPKSSKPDRLKDINNWRPITIGSILLRLFSRIVTARLSKACPLNPRQRGFIRAAGCSENLKLLQTIIWSAKREHRPLGVVFVDIAKAFDTVSHQHIIHALQQREVDPHIVGLVSNMYENISTYITTKRNTHTDKIQIRVGVKQGDPMSPLLFNLAMDPLLCKLEESGKGYHRGQSSITAMAFADDLVLLSDSWENMNTNISILETFCNLTGLKTQGQKCHGFYIKPTKKSYTINDCAAWTINGTPLNMIDPGESEKYLGLQFDPWIGIARSGLSTKLDFWLQRIDKAPLKPLQKTDILKTYTIPRLIYIADHSEVKSALLETLDQKIRTAVKEWLHLPPCTCDAILYSSTRDGGLGITKLAGLIPSVQARRLHRIAQSSDDTMKCFMEKEKMEQLHKKLWIQAGGDRENIPSIWEAPPSSEPPNNVSTNSEWEAPTQKDKFPKPCNWRKNEFKKWTKLASQGRGIVNFERDKISNHWIQYYRRIPHRKLLTALQLRANVYPTREFLARGRQDQYIKACRHCDADNESCAHIIGNCPVTQDARIKRHNYICELLLEEAKKKDWVVFKEPHIRDSNKELYKPDLIFVKDGRALVVDVTVRYEAAKSSLEEAAAEKVRKYKHLETEVRHLTNAKDVTFVGFPLGARGKWHQDNFKLLTELGLSKSRQVKMAETFSTVALFSSVDIVHMFASRARKSMVM

SEQ ID NO: 928 - protein, 1665 aa, synthetic construct
MAPKKKRKVNISGSSCGSPNSADTSSDFKDLWTKLKECHDREVQGLQVKVTKLKQERILDAQRLEEFFTKNQQLREQQKVLHETIKVLEDRLRAGLCDRCAVTEEHMRKKQQEFENIRQQNLKLITELMNERNTLQEENKKLSEQLQQKIENDQQHQAAELECEEDVIPDSPITAFSFSGVNRLRRKENPHVRYIEQTHTKLEHSVCANEMRKVSKSSTHPQHNPNENEILVADTYDQSQSPMAKAHGTSSYTPDKSSFNLATVVAETLGLGVQEESETQGPMSPLGDELYHCLEGNHKKQPFESGSETPGTSESATPEGSPKRKVSSAEGAAKEEPKRRSARLSAKPPAKVEAKPKKAAAKDKSSDKKVQTKGKRGAKGKQAEVANQETKEDLPAENGETKTEESPASDEAGEKEAKSDSGSETPGTSESATPESYEQLAPQPCVGETLHSSLPRDSELFVPEEGSSEKESEDAPKTSPPTPGKHGLEQTGEEKVMVTVPDKNPPCPCCGTRVNSVLNLIEHLKVSHGKRGVCFRCAKCGKENSNYHSVVCHFKKCRGPETEKAPAGEWICEVCNRDFTTKIGLGQHKRLAHPAVRNQERIVASQPKETSNRGAHKRCWTKEEEELLIRLEAQFEGNKNINKLIAEHITTKTAKQISDKRRLLSRKPAEEPREEPGTCHHTRRAAASLRTEPEMSHHAQAEDRDNGPGRRPLPGRAAAGGRTMDEIRRHPDKGNGQQRPTKQKSEEQLQAYYKKTLEERLSAGALNTFPRAFKQVMEGRDIKLVINQTAQDCFGCLESISQIRTATRDKKDTVTREKHPKKPFQKWMKKRAIKKGNYLRFQRLFYLDRGKLAKIILDDIECLSCDIPLSEIYSVFKTRWETTGSFKSLGDFKTYGKADNTAFRELITAKEIEKNVQEMSKGSAPGPDGITLGDVVKMDPEFSRTMEIFNLWLTTGKIPDMVRGCRTVLIPKSSKPDRLKDINNWRPITIGSILLRLFSRIVTARLSKACPLNPRQRGFIRAAGCSENLKLLQTIIWSAKREHRPLGVVFVDIAKAFDTVSHQHIIHALQQREVDPHIVGLVSNMYENISTYITTKRNTHTDKIQIRVGVKQGDPMSPLLFNLAMDPLLCKLEESGKGYHRGQSSITAMAFADDLVLLSDSWENMNTNISILETFCNLTGLKTQGQKCHGFYIKPTKKSYTINDCAAWTINGTPLNMIDPGESEKYLGLQFDPWIGIARSGLSTKLDFWLQRIDQRPLKPLQKTDILKTYTIPRLIYIADHSEVKSALLETLDQKIRTAVKEWLHLPPCTCDAILYSSTRDGGLGITKLAGLIPSVQARRLHRIAQSSDDTMKCFMEKEKMEQLHKKLWIQAGGDRENIPSIWEAPPSSEPPNNVSTNSEWEAPTQKDKFPKPCNWRKNEFKKWTKLASQGRGIVNFERDKISNHWIQYYRRIPHRKLLTALQLRANVYPTREFLARGRQDQYIKACRHCDADNESCAHIIGNCPVTQDARIKRHNYICELLLEEAKKKDWVVFKEPHIRDSNKELYKPDLIFVKDGRALVVDVTVRYEAAKSSLEEAAAEKVRKYKHLETEVRHLTNAKDVTFVGFPLGARGKWHQDNFKLLTELGLSKSRQVKMAETFSTVALFSSVDIVHMFASRARKSMVM

SEQ ID NO: 929 - protein, 1665 aa, synthetic construct
MAPKKKRKVNISGSSCGSPNSADTSSDFKDLWTKLKECHDREVQGLQVKVTKLKQERILDAQRLEEFFTKNQQLREQQKVLHETIKVLEDRLRAGLCDRCAVTEEHMRKKQQEFENIRQQNLKLITELMNERNTLQEENKKLSEQLQQKIENDQQHQAAELECEEDVIPDSPITAFSFSGVNRLRRKENPHVRYIEQTHTKLEHSVCANEMRKVSKSSTHPQHNPNENEILVADTYDQSQSPMAKAHGTSSYTPDKSSFNLATVVAETLGLGVQEESETQGPMSPLGDELYHCLEGNHKKQPFESGSETPGTSESATPEGSPKRKVSSAEGAAKEEPKRRSARLSAKPPAKVEAKPKKAAAKDKSSDKKVQTKGKRGAKGKQAEVANQETKEDLPAENGETKTEESPASDEAGEKEAKSDSGSETPGTSESATPESYEQLAPQPCVGETLHSSLPRDSELFVPEEGSSEKESEDAPKTSPPTPGKHGLEQTGEEKVMVTVPDKNPPCPCCGTRVNSVLNLIEHLKVSHGKRGVCFRCAKCGKENSNYHSVVCHFKKCRGPETEKAPAGEWICEVCNRDFTTKIGLGQHKRLAHPAVRNQERIVASQPKETSNRGAHKRCWTKEEEELLIRLEAQFEGNKNINKLIAEHITTKTAKQISDKRRLLSRKPAEEPREEPGTCHHTRRAAASLRTEPEMSHHAQAEDRDNGPGRRPLPGRAAAGGRTMDEIRRHPDKGNGQQRPTKQKSEEQLQAYYKKTLEERLSAGALNTFPRAFKQVMEGRDIKLVINQTAQDCFGCLESISQIRTATRDKKDTVTREKHPKKPFQKWMKKRAIKKGNYLRFQRLFYLDRGKLAKIILDDIECLSCDIPLSEIYSVFKTRWETTGSFKSLGDFKTYGKADNTAFRELITAKEIEKNVQEMSKGSAPGPDGITLGDVVKMDPEFSRTMEIFNLWLTTGKIPDMVRGCRTVLIPKSSKPDRLKDINNWRPITIGSILLRLFSRIVTARLSKACPLNPRQRGFIRAAGCSENLKLLQTIIWSAKREHRPLGVVFVDIAKAFDTVSHQHIIHALQQREVDPHIVGLVSNMYENISTYITTKRNTHTDKIQIRVGVKQGDPMSPLLFNLAMDPLLCKLEESGKGYHRGQSSITAMAFADDLVLLSDSWENMNTNISILETFCNLTGLKTQGQKCHGFYIKPTKKSYTINDCAAWTINGTPLNMIDPGESEKYLGLQFDPWIGIARSGLSTKLDFWLQRIDQAKLKPLQKTDILKTYTIPRLIYIADHSEVKSALLETLDQKIRTAVKEWLHLPPCTCDAILYSSTRDGGLGITKLAGLIPSVQARRLHRIAQSSDDTMKCFMEKEKMEQLHKKLWIQAGGDRENIPSIWEAPPSSEPPNNVSTNSEWEAPTQKDKFPKPCNWRKNEFKKWTKLASQGRGIVNFERDKISNHWIQYYRRIPHRKLLTALQLRANVYPTREFLARGRQDQYIKACRHCDADNESCAHIIGNCPVTQDARIKRHNYICELLLEEAKKKDWVVFKEPHIRDSNKELYKPDLIFVKDGRALVVDVTVRYEAAKSSLEEAAAEKVRKYKHLETEVRHLTNAKDVTFVGFPLGARGKWHQDNFKLLTELGLSKSRQVKMAETFSTVALFSSVDIVHMFASRARKSMVM

SEQ ID NO: 930 - protein, 1665 aa, synthetic construct
MAPKKKRKVNISGSSCGSPNSADTSSDFKDLWTKLKECHDREVQGLQVKVTKLKQERILDAQRLEEFFTKNQQLREQQKVLHETIKVLEDRLRAGLCDRCAVTEEHMRKKQQEFENIRQQNLKLITELMNERNTLQEENKKLSEQLQQKIENDQQHQAAELECEEDVIPDSPITAFSFSGVNRLRRKENPHVRYIEQTHTKLEHSVCANEMRKVSKSSTHPQHNPNENEILVADTYDQSQSPMAKAHGTSSYTPDKSSFNLATVVAETLGLGVQEESETQGPMSPLGDELYHCLEGNHKKQPFESGSETPGTSESATPEGSPKRKVSSAEGAAKEEPKRRSARLSAKPPAKVEAKPKKAAAKDKSSDKKVQTKGKRGAKGKQAEVANQETKEDLPAENGETKTEESPASDEAGEKEAKSDSGSETPGTSESATPESYEQLAPQPCVGETLHSSLPRDSELFVPEEGSSEKESEDAPKTSPPTPGKHGLEQTGEEKVMVTVPDKNPPCPCCGTRVNSVLNLIEHLKVSHGKRGVCFRCAKCGKENSNYHSVVCHFKKCRGPETEKAPAGEWICEVCNRDFTTKIGLGQHKRLAHPAVRNQERIVASQPKETSNRGAHKRCWTKEEEELLIRLEAQFEGNKNINKLIAEHITTKTAKQISDKRRLLSRKPAEEPREEPGTCHHTRRAAASLRTEPEMSHHAQAEDRDNGPGRRPLPGRAAAGGRTMDEIRRHPDKGNGQQRPTKQKSEEQLQAYYKKTLEERLSAGALNTFPRAFKQVMEGRDIKLVINQTAQDCFGCLESISQIRTATRDKKDTVTREKHPKKPFQKWMKKRAIKKGNYLRFQRLFYLDRGKLAKIILDDIECLSCDIPLSEIYSVFKTRWETTGSFKSLGDFKTYGKADNTAFRELITAKEIEKNVQEMSKGSAPGPDGITLGDVVKMDPEFSRTMEIFNLWLTTGKIPDMVRGCRTVLIPKSSKPDRLKDINNWRPITIGSILLRLFSRIVTARLSKACPLNPRQRGFIRAAGCSENLKLLQTIIWSAKREHRPLGVVFVDIAKAFDTVSHQHIIHALQQREVDPHIVGLVSNMYENISTYITTKRNTHTDKIQIRVGVKQGDPMSPLLFNLAMDPLLCKLEESGKGYHRGQSSITAMAFADDLVLLSDSWENMNTNISILETFCNLTGLKTQGQKCHGFYIKPTKKSYTINDCAAWTINGTPLNMIDPGESEKYLGLQFDPWIGIARSGLSTKLDFWLQRIDQAPLKPLQKTDILKTFTIPRLIYIADHSEVKSALLETLDQKIRTAVKEWLHLPPCTCDAILYSSTRDGGLGITKLAGLIPSVQARRLHRIAQSSDDTMKCFMEKEKMEQLHKKLWIQAGGDRENIPSIWEAPPSSEPPNNVSTNSEWEAPTQKDKFPKPCNWRKNEFKKWTKLASQGRGIVNFERDKISNHWIQYYRRIPHRKLLTALQLRANVYPTREFLARGRQDQYIKACRHCDADNESCAHIIGNCPVTQDARIKRHNYICELLLEEAKKKDWVVFKEPHIRDSNKELYKPDLIFVKDGRALVVDVTVRYEAAKSSLEEAAAEKVRKYKHLETEVRHLTNAKDVTFVGFPLGARGKWHQDNFKLLTELGLSKSRQVKMAETFSTVALFSSVDIVHMFASRARKSMVM

SEQ ID NO: 931 - protein, 1665 aa, synthetic construct
MAPKKKRKVNISGSSCGSPNSADTSSDFKDLWTKLKECHDREVQGLQVKVTKLKQERILDAQRLEEFFTKNQQLREQQKVLHETIKVLEDRLRAGLCDRCAVTEEHMRKKQQEFENIRQQNLKLITELMNERNTLQEENKKLSEQLQQKIENDQQHQAAELECEEDVIPDSPITAFSFSGVNRLRRKENPHVRYIEQTHTKLEHSVCANEMRKVSKSSTHPQHNPNENEILVADTYDQSQSPMAKAHGTSSYTPDKSSFNLATVVAETLGLGVQEESETQGPMSPLGDELYHCLEGNHKKQPFESGSETPGTSESATPEGSPKRKVSSAEGAAKEEPKRRSARLSAKPPAKVEAKPKKAAAKDKSSDKKVQTKGKRGAKGKQAEVANQETKEDLPAENGETKTEESPASDEAGEKEAKSDSGSETPGTSESATPESYEQLAPQPCVGETLHSSLPRDSELFVPEEGSSEKESEDAPKTSPPTPGKHGLEQTGEEKVMVTVPDKNPPCPCCGTRVNSVLNLIEHLKVSHGKRGVCFRCAKCGKENSNYHSVVCHFKKCRGPETEKAPAGEWICEVCNRDFTTKIGLGQHKRLAHPAVRNQERIVASQPKETSNRGAHKRCWTKEEEELLIRLEAQFEGNKNINKLIAEHITTKTAKQISDKRRLLSRKPAEEPREEPGTCHHTRRAAASLRTEPEMSHHAQAEDRDNGPGRRPLPGRAAAGGRTMDEIRRHPDKGNGQQRPTKQKSEEQLQAYYKKTLEERLSAGALNTFPRAFKQVMEGRDIKLVINQTAQDCFGCLESISQIRTATRDKKDTVTREKHPKKPFQKWMKKRAIKKGNYLRFQRLFYLDRGKLAKIILDDIECLSCDIPLSEIYSVFKTRWETTGSFKSLGDFKTYGKADNTAFRELITAKEIEKNVQEMSKGSAPGPDGITLGDVVKMDPEFSRTMEIFNLWLTTGKIPDMVRGCRTVLIPKSSKPDRLKDINNWRPITIGSILLRLFSRIVTARLSKACPLNPRQRGFIRAAGCSENLKLLQTIIWSAKREHRPLGVVFVDIAKAFDTVSHQHIIHALQQREVDPHIVGLVSNMYENISTYITTKRNTHTDKIQIRVGVKQGDPMSPLLFNLAMDPLLCKLEESGKGYHRGQSSITAMAFADDLVLLSDSWENMNTNISILETFCNLTGLKTQGQKCHGFYIKPTKKSYTINDCAAWTINGTPLNMIDPGESEKYLGLQFDPWIGIARSGLSTKLDFWLQRIDQAPLKPLQKTDILKTYRIPRLIYIADHSEVKSALLETLDQKIRTAVKEWLHLPPCTCDAILYSSTRDGGLGITKLAGLIPSVQARRLHRIAQSSDDTMKCFMEKEKMEQLHKKLWIQAGGDRENIPSIWEAPPSSEPPNNVSTNSEWEAPTQKDKFPKPCNWRKNEFKKWTKLASQGRGIVNFERDKISNHWIQYYRRIPHRKLLTALQLRANVYPTREFLARGRQDQYIKACRHCDADNESCAHIIGNCPVTQDARIKRHNYICELLLEEAKKKDWVVFKEPHIRDSNKELYKPDLIFVKDGRALVVDVTVRYEAAKSSLEEAAAEKVRKYKHLETEVRHLTNAKDVTFVGFPLGARGKWHQDNFKLLTELGLSKSRQVKMAETFSTVALFSSVDIVHMFASRARKSMVM

SEQ ID NO: 932 - protein, 1665 aa, synthetic construct
MAPKKKRKVNISGSSCGSPNSADTSSDFKDLWTKLKECHDREVQGLQVKVTKLKQERILDAQRLEEFFTKNQQLREQQKVLHETIKVLEDRLRAGLCDRCAVTEEHMRKKQQEFENIRQQNLKLITELMNERNTLQEENKKLSEQLQQKIENDQQHQAAELECEEDVIPDSPITAFSFSGVNRLRRKENPHVRYIEQTHTKLEHSVCANEMRKVSKSSTHPQHNPNENEILVADTYDQSQSPMAKAHGTSSYTPDKSSFNLATVVAETLGLGVQEESETQGPMSPLGDELYHCLEGNHKKQPFESGSETPGTSESATPEGSPKRKVSSAEGAAKEEPKRRSARLSAKPPAKVEAKPKKAAAKDKSSDKKVQTKGKRGAKGKQAEVANQETKEDLPAENGETKTEESPASDEAGEKEAKSDSGSETPGTSESATPESYEQLAPQPCVGETLHSSLPRDSELFVPEEGSSEKESEDAPKTSPPTPGKHGLEQTGEEKVMVTVPDKNPPCPCCGTRVNSVLNLIEHLKVSHGKRGVCFRCAKCGKENSNYHSVVCHFKKCRGPETEKAPAGEWICEVCNRDFTTKIGLGQHKRLAHPAVRNQERIVASQPKETSNRGAHKRCWTKEEEELLIRLEAQFEGNKNINKLIAEHITTKTAKQISDKRRLLSRKPAEEPREEPGTCHHTRRAAASLRTEPEMSHHAQAEDRDNGPGRRPLPGRAAAGGRTMDEIRRHPDKGNGQQRPTKQKSEEQLQAYYKKTLEERLSAGALNTFPRAFKQVMEGRDIKLVINQTAQDCFGCLESISQIRTATRDKKDTVTREKHPKKPFQKWMKKRAIKKGNYLRFQRLFYLDRGKLAKIILDDIECLSCDIPLSEIYSVFKTRWETTGSFKSLGDFKTYGKADNTAFRELITAKEIEKNVQEMSKGSAPGPDGITLGDVVKMDPEFSRTMEIFNLWLTTGKIPDMVRGCRTVLIPKSSKPDRLKDINNWRPITIGSILLRLFSRIVTARLSKACPLNPRQRGFIRAAGCSENLKLLQTIIWSAKREHRPLGVVFVDIAKAFDTVSHQHIIHALQQREVDPHIVGLVSNMYENISTYITTKRNTHTDKIQIRVGVKQGDPMSPLLFNLAMDPLLCKLEESGKGYHRGQSSITAMAFADDLVLLSDSWENMNTNISILETFCNLTGLKTQGQKCHGFYIKPTKKSYTINDCAAWTINGTPLNMIDPGESEKYLGLQFDPWIGIARSGLSTKLDFWLQRIDQAPLKPLQKTDILKTYTIPRLIYIADHSEVKSALIETLDQKIRTAVKEWLHLPPCTCDAILYSSTRDGGLGITKLAGLIPSVQARRLHRIAQSSDDTMKCFMEKEKMEQLHKKLWIQAGGDRENIPSIWEAPPSSEPPNNVSTNSEWEAPTQKDKFPKPCNWRKNEFKKWTKLASQGRGIVNFERDKISNHWIQYYRRIPHRKLLTALQLRANVYPTREFLARGRQDQYIKACRHCDADNESCAHIIGNCPVTQDARIKRHNYICELLLEEAKKKDWVVFKEPHIRDSNKELYKPDLIFVKDGRALVVDVTVRYEAAKSSLEEAAAEKVRKYKHLETEVRHLTNAKDVTFVGFPLGARGKWHQDNFKLLTELGLSKSRQVKMAETFSTVALFSSVDIVHMFASRARKSMVM

SEQ ID NO: 933 - protein, 1665 aa, synthetic construct
MAPKKKRKVNISGSSCGSPNSADTSSDFKDLWTKLKECHDREVQGLQVKVTKLKQERILDAQRLEEFFTKNQQLREQQKVLHETIKVLEDRLRAGLCDRCAVTEEHMRKKQQEFENIRQQNLKLITELMNERNTLQEENKKLSEQLQQKIENDQQHQAAELECEEDVIPDSPITAFSFSGVNRLRRKENPHVRYIEQTHTKLEHSVCANEMRKVSKSSTHPQHNPNENEILVADTYDQSQSPMAKAHGTSSYTPDKSSFNLATVVAETLGLGVQEESETQGPMSPLGDELYHCLEGNHKKQPFESGSETPGTSESATPEGSPKRKVSSAEGAAKEEPKRRSARLSAKPPAKVEAKPKKAAAKDKSSDKKVQTKGKRGAKGKQAEVANQETKEDLPAENGETKTEESPASDEAGEKEAKSDSGSETPGTSESATPESYEQLAPQPCVGETLHSSLPRDSELFVPEEGSSEKESEDAPKTSPPTPGKHGLEQTGEEKVMVTVPDKNPPCPCCGTRVNSVLNLIEHLKVSHGKRGVCFRCAKCGKENSNYHSVVCHFKKCRGPETEKAPAGEWICEVCNRDFTTKIGLGQHKRLAHPAVRNQERIVASQPKETSNRGAHKRCWTKEEEELLIRLEAQFEGNKNINKLIAEHITTKTAKQISDKRRLLSRKPAEEPREEPGTCHHTRRAAASLRTEPEMSHHAQAEDRDNGPGRRPLPGRAAAGGRTMDEIRRHPDKGNGQQRPTKQKSEEQLQAYYKKTLEERLSAGALNTFPRAFKQVMEGRDIKLVINQTAQDCFGCLESISQIRTATRDKKDTVTREKHPKKPFQKWMKKRAIKKGNYLRFQRLFYLDRGKLAKIILDDIECLSCDIPLSEIYSVFKTRWETTGSFKSLGDFKTYGKADNTAFRELITAKEIEKNVQEMSKGSAPGPDGITLGDVVKMDPEFSRTMEIFNLWLTTGKIPDMVRGCRTVLIPKSSKPDRLKDINNWRPITIGSILLRLFSRIVTARLSKACPLNPRQRGFIRAAGCSENLKLLQTIIWSAKREHRPLGVVFVDIAKAFDTVSHQHIIHALQQREVDPHIVGLVSNMYENISTYITTKRNTHTDKIQIRVGVKQGDPMSPLLFNLAMDPLLCKLEESGKGYHRGQSSITAMAFADDLVLLSDSWENMNTNISILETFCNLTGLKTQGQKCHGFYIKPTKKSYTINDCAAWTINGTPLNMIDPGESEKYLGLQFDPWIGIARSGLSTKLDFWLQRIDQAPLKPLQKTDILKTYTIPRLIYIADHSEVKSALLETLDQKIRKAVKEWLHLPPCTCDAILYSSTRDGGLGITKLAGLIPSVQARRLHRIAQSSDDTMKCFMEKEKMEQLHKKLWIQAGGDRENIPSIWEAPPSSEPPNNVSTNSEWEAPTQKDKFPKPCNWRKNEFKKWTKLASQGRGIVNFERDKISNHWIQYYRRIPHRKLLTALQLRANVYPTREFLARGRQDQYIKACRHCDADNESCAHIIGNCPVTQDARIKRHNYICELLLEEAKKKDWVVFKEPHIRDSNKELYKPDLIFVKDGRALVVDVTVRYEAAKSSLEEAAAEKVRKYKHLETEVRHLTNAKDVTFVGFPLGARGKWHQDNFKLLTELGLSKSRQVKMAETFSTVALFSSVDIVHMFASRARKSMVM

SEQ ID NO: 934 - protein, 1665 aa, synthetic construct
MAPKKKRKVNISGSSCGSPNSADTSSDFKDLWTKLKECHDREVQGLQVKVTKLKQERILDAQRLEEFFTKNQQLREQQKVLHETIKVLEDRLRAGLCDRCAVTEEHMRKKQQEFENIRQQNLKLITELMNERNTLQEENKKLSEQLQQKIENDQQHQAAELECEEDVIPDSPITAFSFSGVNRLRRKENPHVRYIEQTHTKLEHSVCANEMRKVSKSSTHPQHNPNENEILVADTYDQSQSPMAKAHGTSSYTPDKSSFNLATVVAETLGLGVQEESETQGPMSPLGDELYHCLEGNHKKQPFESGSETPGTSESATPEGSPKRKVSSAEGAAKEEPKRRSARLSAKPPAKVEAKPKKAAAKDKSSDKKVQTKGKRGAKGKQAEVANQETKEDLPAENGETKTEESPASDEAGEKEAKSDSGSETPGTSESATPESYEQLAPQPCVGETLHSSLPRDSELFVPEEGSSEKESEDAPKTSPPTPGKHGLEQTGEEKVMVTVPDKNPPCPCCGTRVNSVLNLIEHLKVSHGKRGVCFRCAKCGKENSNYHSVVCHFKKCRGPETEKAPAGEWICEVCNRDFTTKIGLGQHKRLAHPAVRNQERIVASQPKETSNRGAHKRCWTKEEEELLIRLEAQFEGNKNINKLIAEHITTKTAKQISDKRRLLSRKPAEEPREEPGTCHHTRRAAASLRTEPEMSHHAQAEDRDNGPGRRPLPGRAAAGGRTMDEIRRHPDKGNGQQRPTKQKSEEQLQAYYKKTLEERLSAGALNTFPRAFKQVMEGRDIKLVINQTAQDCFGCLESISQIRTATRDKKDTVTREKHPKKPFQKWMKKRAIKKGNYLRFQRLFYLDRGKLAKIILDDIECLSCDIPLSEIYSVFKTRWETTGSFKSLGDFKTYGKADNTAFRELITAKEIEKNVQEMSKGSAPGPDGITLGDVVKMDPEFSRTMEIFNLWLTTGKIPDMVRGCRTVLIPKSSKPDRLKDINNWRPITIGSILLRLFSRIVTARLSKACPLNPRQRGFIRAAGCSENLKLLQTIIWSAKREHRPLGVVFVDIAKAFDTVSHQHIIHALQQREVDPHIVGLVSNMYENISTYITTKRNTHTDKIQIRVGVKQGDPMSPLLFNLAMDPLLCKLEESGKGYHRGQSSITAMAFADDLVLLSDSWENMNTNISILETFCNLTGLKTQGQKCHGFYIKPTKKSYTINDCAAWTINGTPLNMIDPGESEKYLGLQFDPWIGIARSGLSTKLDFWLQRIDQAPLKPLQKTDILKTYTIPRLIYIADHSEVKSALLETLDQKIRTAVKKWLHLPPCTCDAILYSSTRDGGLGITKLAGLIPSVQARRLHRIAQSSDDTMKCFMEKEKMEQLHKKLWIQAGGDRENIPSIWEAPPSSEPPNNVSTNSEWEAPTQKDKFPKPCNWRKNEFKKWTKLASQGRGIVNFERDKISNHWIQYYRRIPHRKLLTALQLRANVYPTREFLARGRQDQYIKACRHCDADNESCAHIIGNCPVTQDARIKRHNYICELLLEEAKKKDWVVFKEPHIRDSNKELYKPDLIFVKDGRALVVDVTVRYEAAKSSLEEAAAEKVRKYKHLETEVRHLTNAKDVTFVGFPLGARGKWHQDNFKLLTELGLSKSRQVKMAETFSTVALFSSVDIVHMFASRARKSMVM

SEQ ID NO: 935 - protein, 1665 aa, synthetic construct
MAPKKKRKVNISGSSCGSPNSADTSSDFKDLWTKLKECHDREVQGLQVKVTKLKQERILDAQRLEEFFTKNQQLREQQKVLHETIKVLEDRLRAGLCDRCAVTEEHMRKKQQEFENIRQQNLKLITELMNERNTLQEENKKLSEQLQQKIENDQQHQAAELECEEDVIPDSPITAFSFSGVNRLRRKENPHVRYIEQTHTKLEHSVCANEMRKVSKSSTHPQHNPNENEILVADTYDQSQSPMAKAHGTSSYTPDKSSFNLATVVAETLGLGVQEESETQGPMSPLGDELYHCLEGNHKKQPFESGSETPGTSESATPEGSPKRKVSSAEGAAKEEPKRRSARLSAKPPAKVEAKPKKAAAKDKSSDKKVQTKGKRGAKGKQAEVANQETKEDLPAENGETKTEESPASDEAGEKEAKSDSGSETPGTSESATPESYEQLAPQPCVGETLHSSLPRDSELFVPEEGSSEKESEDAPKTSPPTPGKHGLEQTGEEKVMVTVPDKNPPCPCCGTRVNSVLNLIEHLKVSHGKRGVCFRCAKCGKENSNYHSVVCHFKKCRGPETEKAPAGEWICEVCNRDFTTKIGLGQHKRLAHPAVRNQERIVASQPKETSNRGAHKRCWTKEEEELLIRLEAQFEGNKNINKLIAEHITTKTAKQISDKRRLLSRKPAEEPREEPGTCHHTRRAAASLRTEPEMSHHAQAEDRDNGPGRRPLPGRAAAGGRTMDEIRRHPDKGNGQQRPTKQKSEEQLQAYYKKTLEERLSAGALNTFPRAFKQVMEGRDIKLVINQTAQDCFGCLESISQIRTATRDKKDTVTREKHPKKPFQKWMKKRAIKKGNYLRFQRLFYLDRGKLAKIILDDIECLSCDIPLSEIYSVFKTRWETTGSFKSLGDFKTYGKADNTAFRELITAKEIEKNVQEMSKGSAPGPDGITLGDVVKMDPEFSRTMEIFNLWLTTGKIPDMVRGCRTVLIPKSSKPDRLKDINNWRPITIGSILLRLFSRIVTARLSKACPLNPRQRGFIRAAGCSENLKLLQTIIWSAKREHRPLGVVFVDIAKAFDTVSHQHIIHALQQREVDPHIVGLVSNMYENISTYITTKRNTHTDKIQIRVGVKQGDPMSPLLFNLAMDPLLCKLEESGKGYHRGQSSITAMAFADDLVLLSDSWENMNTNISILETFCNLTGLKTQGQKCHGFYIKPTKKSYTINDCAAWTINGTPLNMIDPGESEKYLGLQFDPWIGIARSGLSTKLDFWLQRIDQAPLKPLQKTDILKTYTIPRLIYIADHSEVKSALLETLDQKIRTAVKEWLHLPPCTCNAILYSSTRDGGLGITKLAGLIPSVQARRLHRIAQSSDDTMKCFMEKEKMEQLHKKLWIQAGGDRENIPSIWEAPPSSEPPNNVSTNSEWEAPTQKDKFPKPCNWRKNEFKKWTKLASQGRGIVNFERDKISNHWIQYYRRIPHRKLLTALQLRANVYPTREFLARGRQDQYIKACRHCDADNESCAHIIGNCPVTQDARIKRHNYICELLLEEAKKKDWVVFKEPHIRDSNKELYKPDLIFVKDGRALVVDVTVRYEAAKSSLEEAAAEKVRKYKHLETEVRHLTNAKDVTFVGFPLGARGKWHQDNFKLLTELGLSKSRQVKMAETFSTVALFSSVDIVHMFASRARKSMVM

SEQ ID NO: 936 - protein, 1665 aa, synthetic construct
MAPKKKRKVNISGSSCGSPNSADTSSDFKDLWTKLKECHDREVQGLQVKVTKLKQERILDAQRLEEFFTKNQQLREQQKVLHETIKVLEDRLRAGLCDRCAVTEEHMRKKQQEFENIRQQNLKLITELMNERNTLQEENKKLSEQLQQKIENDQQHQAAELECEEDVIPDSPITAFSFSGVNRLRRKENPHVRYIEQTHTKLEHSVCANEMRKVSKSSTHPQHNPNENEILVADTYDQSQSPMAKAHGTSSYTPDKSSFNLATVVAETLGLGVQEESETQGPMSPLGDELYHCLEGNHKKQPFESGSETPGTSESATPEGSPKRKVSSAEGAAKEEPKRRSARLSAKPPAKVEAKPKKAAAKDKSSDKKVQTKGKRGAKGKQAEVANQETKEDLPAENGETKTEESPASDEAGEKEAKSDSGSETPGTSESATPESYEQLAPQPCVGETLHSSLPRDSELFVPEEGSSEKESEDAPKTSPPTPGKHGLEQTGEEKVMVTVPDKNPPCPCCGTRVNSVLNLIEHLKVSHGKRGVCFRCAKCGKENSNYHSVVCHFKKCRGPETEKAPAGEWICEVCNRDFTTKIGLGQHKRLAHPAVRNQERIVASQPKETSNRGAHKRCWTKEEEELLIRLEAQFEGNKNINKLIAEHITTKTAKQISDKRRLLSRKPAEEPREEPGTCHHTRRAAASLRTEPEMSHHAQAEDRDNGPGRRPLPGRAAAGGRTMDEIRRHPDKGNGQQRPTKQKSEEQLQAYYKKTLEERLSAGALNTFPRAFKQVMEGRDIKLVINQTAQDCFGCLESISQIRTATRDKKDTVTREKHPKKPFQKWMKKRAIKKGNYLRFQRLFYLDRGKLAKIILDDIECLSCDIPLSEIYSVFKTRWETTGSFKSLGDFKTYGKADNTAFRELITAKEIEKNVQEMSKGSAPGPDGITLGDVVKMDPEFSRTMEIFNLWLTTGKIPDMVRGCRTVLIPKSSKPDRLKDINNWRPITIGSILLRLFSRIVTARLSKACPLNPRQRGFIRAAGCSENLKLLQTIIWSAKREHRPLGVVFVDIAKAFDTVSHQHIIHALQQREVDPHIVGLVSNMYENISTYITTKRNTHTDKIQIRVGVKQGDPMSPLLFNLAMDPLLCKLEESGKGYHRGQSSITAMAFADDLVLLSDSWENMNTNISILETFCNLTGLKTQGQKCHGFYIKPTKKSYTINDCAAWTINGTPLNMIDPGESEKYLGLQFDPWIGIARSGLSTKLDFWLQRIDQAPLKPLQKTDILKTYTIPRLIYIADHSEVKSALLETLDQKIRTAVKEWLHLPPCTCDGILYSSTRDGGLGITKLAGLIPSVQARRLHRIAQSSDDTMKCFMEKEKMEQLHKKLWIQAGGDRENIPSIWEAPPSSEPPNNVSTNSEWEAPTQKDKFPKPCNWRKNEFKKWTKLASQGRGIVNFERDKISNHWIQYYRRIPHRKLLTALQLRANVYPTREFLARGRQDQYIKACRHCDADNESCAHIIGNCPVTQDARIKRHNYICELLLEEAKKKDWVVFKEPHIRDSNKELYKPDLIFVKDGRALVVDVTVRYEAAKSSLEEAAAEKVRKYKHLETEVRHLTNAKDVTFVGFPLGARGKWHQDNFKLLTELGLSKSRQVKMAETFSTVALFSSVDIVHMFASRARKSMVM

SEQ ID NO: 937 - protein, 1665 aa, synthetic construct
MAPKKKRKVNISGSSCGSPNSADTSSDFKDLWTKLKECHDREVQGLQVKVTKLKQERILDAQRLEEFFTKNQQLREQQKVLHETIKVLEDRLRAGLCDRCAVTEEHMRKKQQEFENIRQQNLKLITELMNERNTLQEENKKLSEQLQQKIENDQQHQAAELECEEDVIPDSPITAFSFSGVNRLRRKENPHVRYIEQTHTKLEHSVCANEMRKVSKSSTHPQHNPNENEILVADTYDQSQSPMAKAHGTSSYTPDKSSFNLATVVAETLGLGVQEESETQGPMSPLGDELYHCLEGNHKKQPFESGSETPGTSESATPEGSPKRKVSSAEGAAKEEPKRRSARLSAKPPAKVEAKPKKAAAKDKSSDKKVQTKGKRGAKGKQAEVANQETKEDLPAENGETKTEESPASDEAGEKEAKSDSGSETPGTSESATPESYEQLAPQPCVGETLHSSLPRDSELFVPEEGSSEKESEDAPKTSPPTPGKHGLEQTGEEKVMVTVPDKNPPCPCCGTRVNSVLNLIEHLKVSHGKRGVCFRCAKCGKENSNYHSVVCHFKKCRGPETEKAPAGEWICEVCNRDFTTKIGLGQHKRLAHPAVRNQERIVASQPKETSNRGAHKRCWTKEEEELLIRLEAQFEGNKNINKLIAEHITTKTAKQISDKRRLLSRKPAEEPREEPGTCHHTRRAAASLRTEPEMSHHAQAEDRDNGPGRRPLPGRAAAGGRTMDEIRRHPDKGNGQQRPTKQKSEEQLQAYYKKTLEERLSAGALNTFPRAFKQVMEGRDIKLVINQTAQDCFGCLESISQIRTATRDKKDTVTREKHPKKPFQKWMKKRAIKKGNYLRFQRLFYLDRGKLAKIILDDIECLSCDIPLSEIYSVFKTRWETTGSFKSLGDFKTYGKADNTAFRELITAKEIEKNVQEMSKGSAPGPDGITLGDVVKMDPEFSRTMEIFNLWLTTGKIPDMVRGCRTVLIPKSSKPDRLKDINNWRPITIGSILLRLFSRIVTARLSKACPLNPRQRGFIRAAGCSENLKLLQTIIWSAKREHRPLGVVFVDIAKAFDTVSHQHIIHALQQREVDPHIVGLVSNMYENISTYITTKRNTHTDKIQIRVGVKQGDPMSPLLFNLAMDPLLCKLEESGKGYHRGQSSITAMAFADDLVLLSDSWENMNTNISILETFCNLTGLKTQGQKCHGFYIKPTKKSYTINDCAAWTINGTPLNMIDPGESEKYLGLQFDPWIGIARSGLSTKLDFWLQRIDQAPLKPLQKTDILKTYTIPRLIYIADHSEVKSALLETLDQKIRTAVKEWLHLPPCTCDAILHSSTRDGGLGITKLAGLIPSVQARRLHRIAQSSDDTMKCFMEKEKMEQLHKKLWIQAGGDRENIPSIWEAPPSSEPPNNVSTNSEWEAPTQKDKFPKPCNWRKNEFKKWTKLASQGRGIVNFERDKISNHWIQYYRRIPHRKLLTALQLRANVYPTREFLARGRQDQYIKACRHCDADNESCAHIIGNCPVTQDARIKRHNYICELLLEEAKKKDWVVFKEPHIRDSNKELYKPDLIFVKDGRALVVDVTVRYEAAKSSLEEAAAEKVRKYKHLETEVRHLTNAKDVTFVGFPLGARGKWHQDNFKLLTELGLSKSRQVKMAETFSTVALFSSVDIVHMFASRARKSMVM

SEQ ID NO: 938 - protein, 1665 aa, synthetic construct
MAPKKKRKVNISGSSCGSPNSADTSSDFKDLWTKLKECHDREVQGLQVKVTKLKQERILDAQRLEEFFTKNQQLREQQKVLHETIKVLEDRLRAGLCDRCAVTEEHMRKKQQEFENIRQQNLKLITELMNERNTLQEENKKLSEQLQQKIENDQQHQAAELECEEDVIPDSPITAFSFSGVNRLRRKENPHVRYIEQTHTKLEHSVCANEMRKVSKSSTHPQHNPNENEILVADTYDQSQSPMAKAHGTSSYTPDKSSFNLATVVAETLGLGVQEESETQGPMSPLGDELYHCLEGNHKKQPFESGSETPGTSESATPEGSPKRKVSSAEGAAKEEPKRRSARLSAKPPAKVEAKPKKAAAKDKSSDKKVQTKGKRGAKGKQAEVANQETKEDLPAENGETKTEESPASDEAGEKEAKSDSGSETPGTSESATPESYEQLAPQPCVGETLHSSLPRDSELFVPEEGSSEKESEDAPKTSPPTPGKHGLEQTGEEKVMVTVPDKNPPCPCCGTRVNSVLNLIEHLKVSHGKRGVCFRCAKCGKENSNYHSVVCHFKKCRGPETEKAPAGEWICEVCNRDFTTKIGLGQHKRLAHPAVRNQERIVASQPKETSNRGAHKRCWTKEEEELLIRLEAQFEGNKNINKLIAEHITTKTAKQISDKRRLLSRKPAEEPREEPGTCHHTRRAAASLRTEPEMSHHAQAEDRDNGPGRRPLPGRAAAGGRTMDEIRRHPDKGNGQQRPTKQKSEEQLQAYYKKTLEERLSAGALNTFPRAFKQVMEGRDIKLVINQTAQDCFGCLESISQIRTATRDKKDTVTREKHPKKPFQKWMKKRAIKKGNYLRFQRLFYLDRGKLAKIILDDIECLSCDIPLSEIYSVFKTRWETTGSFKSLGDFKTYGKADNTAFRELITAKEIEKNVQEMSKGSAPGPDGITLGDVVKMDPEFSRTMEIFNLWLTTGKIPDMVRGCRTVLIPKSSKPDRLKDINNWRPITIGSILLRLFSRIVTARLSKACPLNPRQRGFIRAAGCSENLKLLQTIIWSAKREHRPLGVVFVDIAKAFDTVSHQHIIHALQQREVDPHIVGLVSNMYENISTYITTKRNTHTDKIQIRVGVKQGDPMSPLLFNLAMDPLLCKLEESGKGYHRGQSSITAMAFADDLVLLSDSWENMNTNISILETFCNLTGLKTQGQKCHGFYIKPTKKSYTINDCAAWTINGTPLNMIDPGESEKYLGLQFDPWIGIARSGLSTKLDFWLQRIDQAPLKPLQKTDILKTYTIPRLIYIADHSEVKSALLETLDQKIRTAVKEWLHLPPCTCDAILYSRTRDGGLGITKLAGLIPSVQARRLHRIAQSSDDTMKCFMEKEKMEQLHKKLWIQAGGDRENIPSIWEAPPSSEPPNNVSTNSEWEAPTQKDKFPKPCNWRKNEFKKWTKLASQGRGIVNFERDKISNHWIQYYRRIPHRKLLTALQLRANVYPTREFLARGRQDQYIKACRHCDADNESCAHIIGNCPVTQDARIKRHNYICELLLEEAKKKDWVVFKEPHIRDSNKELYKPDLIFVKDGRALVVDVTVRYEAAKSSLEEAAAEKVRKYKHLETEVRHLTNAKDVTFVGFPLGARGKWHQDNFKLLTELGLSKSRQVKMAETFSTVALFSSVDIVHMFASRARKSMVM

SEQ ID NO: 939 - protein, 1665 aa, synthetic construct
MAPKKKRKVNISGSSCGSPNSADTSSDFKDLWTKLKECHDREVQGLQVKVTKLKQERILDAQRLEEFFTKNQQLREQQKVLHETIKVLEDRLRAGLCDRCAVTEEHMRKKQQEFENIRQQNLKLITELMNERNTLQEENKKLSEQLQQKIENDQQHQAAELECEEDVIPDSPITAFSFSGVNRLRRKENPHVRYIEQTHTKLEHSVCANEMRKVSKSSTHPQHNPNENEILVADTYDQSQSPMAKAHGTSSYTPDKSSFNLATVVAETLGLGVQEESETQGPMSPLGDELYHCLEGNHKKQPFESGSETPGTSESATPEGSPKRKVSSAEGAAKEEPKRRSARLSAKPPAKVEAKPKKAAAKDKSSDKKVQTKGKRGAKGKQAEVANQETKEDLPAENGETKTEESPASDEAGEKEAKSDSGSETPGTSESATPESYEQLAPQPCVGETLHSSLPRDSELFVPEEGSSEKESEDAPKTSPPTPGKHGLEQTGEEKVMVTVPDKNPPCPCCGTRVNSVLNLIEHLKVSHGKRGVCFRCAKCGKENSNYHSVVCHFKKCRGPETEKAPAGEWICEVCNRDFTTKIGLGQHKRLAHPAVRNQERIVASQPKETSNRGAHKRCWTKEEEELLIRLEAQFEGNKNINKLIAEHITTKTAKQISDKRRLLSRKPAEEPREEPGTCHHTRRAAASLRTEPEMSHHAQAEDRDNGPGRRPLPGRAAAGGRTMDEIRRHPDKGNGQQRPTKQKSEEQLQAYYKKTLEERLSAGALNTFPRAFKQVMEGRDIKLVINQTAQDCFGCLESISQIRTATRDKKDTVTREKHPKKPFQKWMKKRAIKKGNYLRFQRLFYLDRGKLAKIILDDIECLSCDIPLSEIYSVFKTRWETTGSFKSLGDFKTYGKADNTAFRELITAKEIEKNVQEMSKGSAPGPDGITLGDVVKMDPEFSRTMEIFNLWLTTGKIPDMVRGCRTVLIPKSSKPDRLKDINNWRPITIGSILLRLFSRIVTARLSKACPLNPRQRGFIRAAGCSENLKLLQTIIWSAKREHRPLGVVFVDIAKAFDTVSHQHIIHALQQREVDPHIVGLVSNMYENISTYITTKRNTHTDKIQIRVGVKQGDPMSPLLFNLAMDPLLCKLEESGKGYHRGQSSITAMAFADDLVLLSDSWENMNTNISILETFCNLTGLKTQGQKCHGFYIKPTKKSYTINDCAAWTINGTPLNMIDPGESEKYLGLQFDPWIGIARSGLSTKLDFWLQRIDQAPLKPLQKTDILKTYTIPRLIYIADHSEVKSALLETLDQKIRTAVKEWLHLPPCTCDAILYSSTRDGGLGITRLAGLIPSVQARRLHRIAQSSDDTMKCFMEKEKMEQLHKKLWIQAGGDRENIPSIWEAPPSSEPPNNVSTNSEWEAPTQKDKFPKPCNWRKNEFKKWTKLASQGRGIVNFERDKISNHWIQYYRRIPHRKLLTALQLRANVYPTREFLARGRQDQYIKACRHCDADNESCAHIIGNCPVTQDARIKRHNYICELLLEEAKKKDWVVFKEPHIRDSNKELYKPDLIFVKDGRALVVDVTVRYEAAKSSLEEAAAEKVRKYKHLETEVRHLTNAKDVTFVGFPLGARGKWHQDNFKLLTELGLSKSRQVKMAETFSTVALFSSVDIVHMFASRARKSMVM

SEQ ID NO: 940 - protein, 1665 aa, synthetic construct
MAPKKKRKVNISGSSCGSPNSADTSSDFKDLWTKLKECHDREVQGLQVKVTKLKQERILDAQRLEEFFTKNQQLREQQKVLHETIKVLEDRLRAGLCDRCAVTEEHMRKKQQEFENIRQQNLKLITELMNERNTLQEENKKLSEQLQQKIENDQQHQAAELECEEDVIPDSPITAFSFSGVNRLRRKENPHVRYIEQTHTKLEHSVCANEMRKVSKSSTHPQHNPNENEILVADTYDQSQSPMAKAHGTSSYTPDKSSFNLATVVAETLGLGVQEESETQGPMSPLGDELYHCLEGNHKKQPFESGSETPGTSESATPEGSPKRKVSSAEGAAKEEPKRRSARLSAKPPAKVEAKPKKAAAKDKSSDKKVQTKGKRGAKGKQAEVANQETKEDLPAENGETKTEESPASDEAGEKEAKSDSGSETPGTSESATPESYEQLAPQPCVGETLHSSLPRDSELFVPEEGSSEKESEDAPKTSPPTPGKHGLEQTGEEKVMVTVPDKNPPCPCCGTRVNSVLNLIEHLKVSHGKRGVCFRCAKCGKENSNYHSVVCHFKKCRGPETEKAPAGEWICEVCNRDFTTKIGLGQHKRLAHPAVRNQERIVASQPKETSNRGAHKRCWTKEEEELLIRLEAQFEGNKNINKLIAEHITTKTAKQISDKRRLLSRKPAEEPREEPGTCHHTRRAAASLRTEPEMSHHAQAEDRDNGPGRRPLPGRAAAGGRTMDEIRRHPDKGNGQQRPTKQKSEEQLQAYYKKTLEERLSAGALNTFPRAFKQVMEGRDIKLVINQTAQDCFGCLESISQIRTATRDKKDTVTREKHPKKPFQKWMKKRAIKKGNYLRFQRLFYLDRGKLAKIILDDIECLSCDIPLSEIYSVFKTRWETTGSFKSLGDFKTYGKADNTAFRELITAKEIEKNVQEMSKGSAPGPDGITLGDVVKMDPEFSRTMEIFNLWLTTGKIPDMVRGCRTVLIPKSSKPDRLKDINNWRPITIGSILLRLFSRIVTARLSKACPLNPRQRGFIRAAGCSENLKLLQTIIWSAKREHRPLGVVFVDIAKAFDTVSHQHIIHALQQREVDPHIVGLVSNMYENISTYITTKRNTHTDKIQIRVGVKQGDPMSPLLFNLAMDPLLCKLEESGKGYHRGQSSITAMAFADDLVLLSDSWENMNTNISILETFCNLTGLKTQGQKCHGFYIKPTKKSYTINDCAAWTINGTPLNMIDPGESEKYLGLQFDPWIGIARSGLSTKLDFWLQRIDQAPLKPLQKTDILKTYTIPRLIYIADHSEVKSALLETLDQKIRTAVKEWLHLPPCTCDAILYSSTRDGGLGITKLAGLIPSRQARRLHRIAQSSDDTMKCFMEKEKMEQLHKKLWIQAGGDRENIPSIWEAPPSSEPPNNVSTNSEWEAPTQKDKFPKPCNWRKNEFKKWTKLASQGRGIVNFERDKISNHWIQYYRRIPHRKLLTALQLRANVYPTREFLARGRQDQYIKACRHCDADNESCAHIIGNCPVTQDARIKRHNYICELLLEEAKKKDWVVFKEPHIRDSNKELYKPDLIFVKDGRALVVDVTVRYEAAKSSLEEAAAEKVRKYKHLETEVRHLTNAKDVTFVGFPLGARGKWHQDNFKLLTELGLSKSRQVKMAETFSTVALFSSVDIVHMFASRARKSMVM

SEQ ID NO: 941 - protein, 1665 aa, synthetic construct
MAPKKKRKVNISGSSCGSPNSADTSSDFKDLWTKLKECHDREVQGLQVKVTKLKQERILDAQRLEEFFTKNQQLREQQKVLHETIKVLEDRLRAGLCDRCAVTEEHMRKKQQEFENIRQQNLKLITELMNERNTLQEENKKLSEQLQQKIENDQQHQAAELECEEDVIPDSPITAFSFSGVNRLRRKENPHVRYIEQTHTKLEHSVCANEMRKVSKSSTHPQHNPNENEILVADTYDQSQSPMAKAHGTSSYTPDKSSFNLATVVAETLGLGVQEESETQGPMSPLGDELYHCLEGNHKKQPFESGSETPGTSESATPEGSPKRKVSSAEGAAKEEPKRRSARLSAKPPAKVEAKPKKAAAKDKSSDKKVQTKGKRGAKGKQAEVANQETKEDLPAENGETKTEESPASDEAGEKEAKSDSGSETPGTSESATPESYEQLAPQPCVGETLHSSLPRDSELFVPEEGSSEKESEDAPKTSPPTPGKHGLEQTGEEKVMVTVPDKNPPCPCCGTRVNSVLNLIEHLKVSHGKRGVCFRCAKCGKENSNYHSVVCHFKKCRGPETEKAPAGEWICEVCNRDFTTKIGLGQHKRLAHPAVRNQERIVASQPKETSNRGAHKRCWTKEEEELLIRLEAQFEGNKNINKLIAEHITTKTAKQISDKRRLLSRKPAEEPREEPGTCHHTRRAAASLRTEPEMSHHAQAEDRDNGPGRRPLPGRAAAGGRTMDEIRRHPDKGNGQQRPTKQKSEEQLQAYYKKTLEERLSAGALNTFPRAFKQVMEGRDIKLVINQTAQDCFGCLESISQIRTATRDKKDTVTREKHPKKPFQKWMKKRAIKKGNYLRFQRLFYLDRGKLAKIILDDIECLSCDIPLSEIYSVFKTRWETTGSFKSLGDFKTYGKADNTAFRELITAKEIEKNVQEMSKGSAPGPDGITLGDVVKMDPEFSRTMEIFNLWLTTGKIPDMVRGCRTVLIPKSSKPDRLKDINNWRPITIGSILLRLFSRIVTARLSKACPLNPRQRGFIRAAGCSENLKLLQTIIWSAKREHRPLGVVFVDIAKAFDTVSHQHIIHALQQREVDPHIVGLVSNMYENISTYITTKRNTHTDKIQIRVGVKQGDPMSPLLFNLAMDPLLCKLEESGKGYHRGQSSITAMAFADDLVLLSDSWENMNTNISILETFCNLTGLKTQGQKCHGFYIKPTKKSYTINDCAAWTINGTPLNMIDPGESEKYLGLQFDPWIGIARSGLSTKLDFWLQRIDQAPLKPLQKTDILKTYTIPRLIYIADHSEVKSALLETLDQKIRTAVKEWLHLPPCTCDAILYSSTRDGGLGITKLAGLIPSVQARRLHRIAQSSDDTMRCFMEKEKMEQLHKKLWIQAGGDRENIPSIWEAPPSSEPPNNVSTNSEWEAPTQKDKFPKPCNWRKNEFKKWTKLASQGRGIVNFERDKISNHWIQYYRRIPHRKLLTALQLRANVYPTREFLARGRQDQYIKACRHCDADNESCAHIIGNCPVTQDARIKRHNYICELLLEEAKKKDWVVFKEPHIRDSNKELYKPDLIFVKDGRALVVDVTVRYEAAKSSLEEAAAEKVRKYKHLETEVRHLTNAKDVTFVGFPLGARGKWHQDNFKLLTELGLSKSRQVKMAETFSTVALFSSVDIVHMFASRARKSMVM

SEQ ID NO: 942 - protein, 1665 aa, synthetic construct
MAPKKKRKVNISGSSCGSPNSADTSSDFKDLWTKLKECHDREVQGLQVKVTKLKQERILDAQRLEEFFTKNQQLREQQKVLHETIKVLEDRLRAGLCDRCAVTEEHMRKKQQEFENIRQQNLKLITELMNERNTLQEENKKLSEQLQQKIENDQQHQAAELECEEDVIPDSPITAFSFSGVNRLRRKENPHVRYIEQTHTKLEHSVCANEMRKVSKSSTHPQHNPNENEILVADTYDQSQSPMAKAHGTSSYTPDKSSFNLATVVAETLGLGVQEESETQGPMSPLGDELYHCLEGNHKKQPFESGSETPGTSESATPEGSPKRKVSSAEGAAKEEPKRRSARLSAKPPAKVEAKPKKAAAKDKSSDKKVQTKGKRGAKGKQAEVANQETKEDLPAENGETKTEESPASDEAGEKEAKSDSGSETPGTSESATPESYEQLAPQPCVGETLHSSLPRDSELFVPEEGSSEKESEDAPKTSPPTPGKHGLEQTGEEKVMVTVPDKNPPCPCCGTRVNSVLNLIEHLKVSHGKRGVCFRCAKCGKENSNYHSVVCHFKKCRGPETEKAPAGEWICEVCNRDFTTKIGLGQHKRLAHPAVRNQERIVASQPKETSNRGAHKRCWTKEEEELLIRLEAQFEGNKNINKLIAEHITTKTAKQISDKRRLLSRKPAEEPREEPGTCHHTRRAAASLRTEPEMSHHAQAEDRDNGPGRRPLPGRAAAGGRTMDEIRRHPDKGNGQQRPTKQKSEEQLQAYYKKTLEERLSAGALNTFPRAFKQVMEGRDIKLVINQTAQDCFGCLESISQIRTATRDKKDTVTREKHPKKPFQKWMKKRAIKKGNYLRFQRLFYLDRGKLAKIILDDIECLSCDIPLSEIYSVFKTRWETTGSFKSLGDFKTYGKADNTAFRELITAKEIEKNVQEMSKGSAPGPDGITLGDVVKMDPEFSRTMEIFNLWLTTGKIPDMVRGCRTVLIPKSSKPDRLKDINNWRPITIGSILLRLFSRIVTARLSKACPLNPRQRGFIRAAGCSENLKLLQTIIWSAKREHRPLGVVFVDIAKAFDTVSHQHIIHALQQREVDPHIVGLVSNMYENISTYITTKRNTHTDKIQIRVGVKQGDPMSPLLFNLAMDPLLCKLEESGKGYHRGQSSITAMAFADDLVLLSDSWENMNTNISILETFCNLTGLKTQGQKCHGFYIKPTKKSYTINDCAAWTINGTPLNMIDPGESEKYLGLQFDPWIGIARSGLSTKLDFWLQRIDQAPLKPLQKTDILKTYTIPRLIYIADHSEVKSALLETLDQKIRTAVKEWLHLPPCTCDAILYSSTRDGGLGITKLAGLIPSVQARRLHRIAQSSDDTMKCLMEKEKMEQLHKKLWIQAGGDRENIPSIWEAPPSSEPPNNVSTNSEWEAPTQKDKFPKPCNWRKNEFKKWTKLASQGRGIVNFERDKISNHWIQYYRRIPHRKLLTALQLRANVYPTREFLARGRQDQYIKACRHCDADNESCAHIIGNCPVTQDARIKRHNYICELLLEEAKKKDWVVFKEPHIRDSNKELYKPDLIFVKDGRALVVDVTVRYEAAKSSLEEAAAEKVRKYKHLETEVRHLTNAKDVTFVGFPLGARGKWHQDNFKLLTELGLSKSRQVKMAETFSTVALFSSVDIVHMFASRARKSMVM

SEQ ID NO: 943 - protein, 1665 aa, synthetic construct
MAPKKKRKVNISGSSCGSPNSADTSSDFKDLWTKLKECHDREVQGLQVKVTKLKQERILDAQRLEEFFTKNQQLREQQKVLHETIKVLEDRLRAGLCDRCAVTEEHMRKKQQEFENIRQQNLKLITELMNERNTLQEENKKLSEQLQQKIENDQQHQAAELECEEDVIPDSPITAFSFSGVNRLRRKENPHVRYIEQTHTKLEHSVCANEMRKVSKSSTHPQHNPNENEILVADTYDQSQSPMAKAHGTSSYTPDKSSFNLATVVAETLGLGVQEESETQGPMSPLGDELYHCLEGNHKKQPFESGSETPGTSESATPEGSPKRKVSSAEGAAKEEPKRRSARLSAKPPAKVEAKPKKAAAKDKSSDKKVQTKGKRGAKGKQAEVANQETKEDLPAENGETKTEESPASDEAGEKEAKSDSGSETPGTSESATPESYEQLAPQPCVGETLHSSLPRDSELFVPEEGSSEKESEDAPKTSPPTPGKHGLEQTGEEKVMVTVPDKNPPCPCCGTRVNSVLNLIEHLKVSHGKRGVCFRCAKCGKENSNYHSVVCHFKKCRGPETEKAPAGEWICEVCNRDFTTKIGLGQHKRLAHPAVRNQERIVASQPKETSNRGAHKRCWTKEEEELLIRLEAQFEGNKNINKLIAEHITTKTAKQISDKRRLLSRKPAEEPREEPGTCHHTRRAAASLRTEPEMSHHAQAEDRDNGPGRRPLPGRAAAGGRTMDEIRRHPDKGNGQQRPTKQKSEEQLQAYYKKTLEERLSAGALNTFPRAFKQVMEGRDIKLVINQTAQDCFGCLESISQIRTATRDKKDTVTREKHPKKPFQKWMKKRAIKKGNYLRFQRLFYLDRGKLAKIILDDIECLSCDIPLSEIYSVFKTRWETTGSFKSLGDFKTYGKADNTAFRELITAKEIEKNVQEMSKGSAPGPDGITLGDVVKMDPEFSRTMEIFNLWLTTGKIPDMVRGCRTVLIPKSSKPDRLKDINNWRPITIGSILLRLFSRIVTARLSKACPLNPRQRGFIRAAGCSENLKLLQTIIWSAKREHRPLGVVFVDIAKAFDTVSHQHIIHALQQREVDPHIVGLVSNMYENISTYITTKRNTHTDKIQIRVGVKQGDPMSPLLFNLAMDPLLCKLEESGKGYHRGQSSITAMAFADDLVLLSDSWENMNTNISILETFCNLTGLKTQGQKCHGFYIKPTKKSYTINDCAAWTINGTPLNMIDPGESEKYLGLQFDPWIGIARSGLSTKLDFWLQRIDQAPLKPLQKTDILKTYTIPRLIYIADHSEVKSALLETLDQKIRTAVKEWLHLPPCTCDAILYSSTRDGGLGITKLAGLIPSVQARRLHRIAQSSDDTMKCFMKKEKMEQLHKKLWIQAGGDRENIPSIWEAPPSSEPPNNVSTNSEWEAPTQKDKFPKPCNWRKNEFKKWTKLASQGRGIVNFERDKISNHWIQYYRRIPHRKLLTALQLRANVYPTREFLARGRQDQYIKACRHCDADNESCAHIIGNCPVTQDARIKRHNYICELLLEEAKKKDWVVFKEPHIRDSNKELYKPDLIFVKDGRALVVDVTVRYEAAKSSLEEAAAEKVRKYKHLETEVRHLTNAKDVTFVGFPLGARGKWHQDNFKLLTELGLSKSRQVKMAETFSTVALFSSVDIVHMFASRARKSMVM

SEQ ID NO: 944 - protein, 1665 aa, synthetic construct
MAPKKKRKVNISGSSCGSPNSADTSSDFKDLWTKLKECHDREVQGLQVKVTKLKQERILDAQRLEEFFTKNQQLREQQKVLHETIKVLEDRLRAGLCDRCAVTEEHMRKKQQEFENIRQQNLKLITELMNERNTLQEENKKLSEQLQQKIENDQQHQAAELECEEDVIPDSPITAFSFSGVNRLRRKENPHVRYIEQTHTKLEHSVCANEMRKVSKSSTHPQHNPNENEILVADTYDQSQSPMAKAHGTSSYTPDKSSFNLATVVAETLGLGVQEESETQGPMSPLGDELYHCLEGNHKKQPFESGSETPGTSESATPEGSPKRKVSSAEGAAKEEPKRRSARLSAKPPAKVEAKPKKAAAKDKSSDKKVQTKGKRGAKGKQAEVANQETKEDLPAENGETKTEESPASDEAGEKEAKSDSGSETPGTSESATPESYEQLAPQPCVGETLHSSLPRDSELFVPEEGSSEKESEDAPKTSPPTPGKHGLEQTGEEKVMVTVPDKNPPCPCCGTRVNSVLNLIEHLKVSHGKRGVCFRCAKCGKENSNYHSVVCHFKKCRGPETEKAPAGEWICEVCNRDFTTKIGLGQHKRLAHPAVRNQERIVASQPKETSNRGAHKRCWTKEEEELLIRLEAQFEGNKNINKLIAEHITTKTAKQISDKRRLLSRKPAEEPREEPGTCHHTRRAAASLRTEPEMSHHAQAEDRDNGPGRRPLPGRAAAGGRTMDEIRRHPDKGNGQQRPTKQKSEEQLQAYYKKTLEERLSAGALNTFPRAFKQVMEGRDIKLVINQTAQDCFGCLESISQIRTATRDKKDTVTREKHPKKPFQKWMKKRAIKKGNYLRFQRLFYLDRGKLAKIILDDIECLSCDIPLSEIYSVFKTRWETTGSFKSLGDFKTYGKADNTAFRELITAKEIEKNVQEMSKGSAPGPDGITLGDVVKMDPEFSRTMEIFNLWLTTGKIPDMVRGCRTVLIPKSSKPDRLKDINNWRPITIGSILLRLFSRIVTARLSKACPLNPRQRGFIRAAGCSENLKLLQTIIWSAKREHRPLGVVFVDIAKAFDTVSHQHIIHALQQREVDPHIVGLVSNMYENISTYITTKRNTHTDKIQIRVGVKQGDPMSPLLFNLAMDPLLCKLEESGKGYHRGQSSITAMAFADDLVLLSDSWENMNTNISILETFCNLTGLKTQGQKCHGFYIKPTKKSYTINDCAAWTINGTPLNMIDPGESEKYLGLQFDPWIGIARSGLSTKLDFWLQRIDQAPLKPLQKTDILKTYTIPRLIYIADHSEVKSALLETLDQKIRTAVKEWLHLPPCTCDAILYSSTRDGGLGITKLAGLIPSVQARRLHRIAQSSDDTMKCFMEKEKMEQLHKRLWIQAGGDRENIPSIWEAPPSSEPPNNVSTNSEWEAPTQKDKFPKPCNWRKNEFKKWTKLASQGRGIVNFERDKISNHWIQYYRRIPHRKLLTALQLRANVYPTREFLARGRQDQYIKACRHCDADNESCAHIIGNCPVTQDARIKRHNYICELLLEEAKKKDWVVFKEPHIRDSNKELYKPDLIFVKDGRALVVDVTVRYEAAKSSLEEAAAEKVRKYKHLETEVRHLTNAKDVTFVGFPLGARGKWHQDNFKLLTELGLSKSRQVKMAETFSTVALFSSVDIVHMFASRARKSMVM

SEQ ID NO: 945 - protein, 1665 aa, synthetic construct
MAPKKKRKVNISGSSCGSPNSADTSSDFKDLWTKLKECHDREVQGLQVKVTKLKQERILDAQRLEEFFTKNQQLREQQKVLHETIKVLEDRLRAGLCDRCAVTEEHMRKKQQEFENIRQQNLKLITELMNERNTLQEENKKLSEQLQQKIENDQQHQAAELECEEDVIPDSPITAFSFSGVNRLRRKENPHVRYIEQTHTKLEHSVCANEMRKVSKSSTHPQHNPNENEILVADTYDQSQSPMAKAHGTSSYTPDKSSFNLATVVAETLGLGVQEESETQGPMSPLGDELYHCLEGNHKKQPFESGSETPGTSESATPEGSPKRKVSSAEGAAKEEPKRRSARLSAKPPAKVEAKPKKAAAKDKSSDKKVQTKGKRGAKGKQAEVANQETKEDLPAENGETKTEESPASDEAGEKEAKSDSGSETPGTSESATPESYEQLAPQPCVGETLHSSLPRDSELFVPEEGSSEKESEDAPKTSPPTPGKHGLEQTGEEKVMVTVPDKNPPCPCCGTRVNSVLNLIEHLKVSHGKRGVCFRCAKCGKENSNYHSVVCHFKKCRGPETEKAPAGEWICEVCNRDFTTKIGLGQHKRLAHPAVRNQERIVASQPKETSNRGAHKRCWTKEEEELLIRLEAQFEGNKNINKLIAEHITTKTAKQISDKRRLLSRKPAEEPREEPGTCHHTRRAAASLRTEPEMSHHAQAEDRDNGPGRRPLPGRAAAGGRTMDEIRRHPDKGNGQQRPTKQKSEEQLQAYYKKTLEERLSAGALNTFPRAFKQVMEGRDIKLVINQTAQDCFGCLESISQIRTATRDKKDTVTREKHPKKPFQKWMKKRAIKKGNYLRFQRLFYLDRGKLAKIILDDIECLSCDIPLSEIYSVFKTRWETTGSFKSLGDFKTYGKADNTAFRELITAKEIEKNVQEMSKGSAPGPDGITLGDVVKMDPEFSRTMEIFNLWLTTGKIPDMVRGCRTVLIPKSSKPDRLKDINNWRPITIGSILLRLFSRIVTARLSKACPLNPRQRGFIRAAGCSENLKLLQTIIWSAKREHRPLGVVFVDIAKAFDTVSHQHIIHALQQREVDPHIVGLVSNMYENISTYITTKRNTHTDKIQIRVGVKQGDPMSPLLFNLAMDPLLCKLEESGKGYHRGQSSITAMAFADDLVLLSDSWENMNTNISILETFCNLTGLKTQGQKCHGFYIKPTKKSYTINDCAAWTINGTPLNMIDPGESEKYLGLQFDPWIGIARSGLSTKLDFWLQRIDQAPLKPLQKTDILKTYTIPRLIYIADHSEVKSALLETLDQKIRTAVKEWLHLPPCTCDAILYSSTRDGGLGITKLAGLIPSVQARRLHRIAQSSDDTMKCFMEKEKMEQLHKKLWIQARGDRENIPSIWEAPPSSEPPNNVSTNSEWEAPTQKDKFPKPCNWRKNEFKKWTKLASQGRGIVNFERDKISNHWIQYYRRIPHRKLLTALQLRANVYPTREFLARGRQDQYIKACRHCDADNESCAHIIGNCPVTQDARIKRHNYICELLLEEAKKKDWVVFKEPHIRDSNKELYKPDLIFVKDGRALVVDVTVRYEAAKSSLEEAAAEKVRKYKHLETEVRHLTNAKDVTFVGFPLGARGKWHQDNFKLLTELGLSKSRQVKMAETFSTVALFSSVDIVHMFASRARKSMVM

SEQ ID NO: 946 - protein, 1665 aa, synthetic construct
MAPKKKRKVNISGSSCGSPNSADTSSDFKDLWTKLKECHDREVQGLQVKVTKLKQERILDAQRLEEFFTKNQQLREQQKVLHETIKVLEDRLRAGLCDRCAVTEEHMRKKQQEFENIRQQNLKLITELMNERNTLQEENKKLSEQLQQKIENDQQHQAAELECEEDVIPDSPITAFSFSGVNRLRRKENPHVRYIEQTHTKLEHSVCANEMRKVSKSSTHPQHNPNENEILVADTYDQSQSPMAKAHGTSSYTPDKSSFNLATVVAETLGLGVQEESETQGPMSPLGDELYHCLEGNHKKQPFESGSETPGTSESATPEGSPKRKVSSAEGAAKEEPKRRSARLSAKPPAKVEAKPKKAAAKDKSSDKKVQTKGKRGAKGKQAEVANQETKEDLPAENGETKTEESPASDEAGEKEAKSDSGSETPGTSESATPESYEQLAPQPCVGETLHSSLPRDSELFVPEEGSSEKESEDAPKTSPPTPGKHGLEQTGEEKVMVTVPDKNPPCPCCGTRVNSVLNLIEHLKVSHGKRGVCFRCAKCGKENSNYHSVVCHFKKCRGPETEKAPAGEWICEVCNRDFTTKIGLGQHKRLAHPAVRNQERIVASQPKETSNRGAHKRCWTKEEEELLIRLEAQFEGNKNINKLIAEHITTKTAKQISDKRRLLSRKPAEEPREEPGTCHHTRRAAASLRTEPEMSHHAQAEDRDNGPGRRPLPGRAAAGGRTMDEIRRHPDKGNGQQRPTKQKSEEQLQAYYKKTLEERLSAGALNTFPRAFKQVMEGRDIKLVINQTAQDCFGCLESISQIRTATRDKKDTVTREKHPKKPFQKWMKKRAIKKGNYLRFQRLFYLDRGKLAKIILDDIECLSCDIPLSEIYSVFKTRWETTGSFKSLGDFKTYGKADNTAFRELITAKEIEKNVQEMSKGSAPGPDGITLGDVVKMDPEFSRTMEIFNLWLTTGKIPDMVRGCRTVLIPKSSKPDRLKDINNWRPITIGSILLRLFSRIVTARLSKACPLNPRQRGFIRAAGCSENLKLLQTIIWSAKREHRPLGVVFVDIAKAFDTVSHQHIIHALQQREVDPHIVGLVSNMYENISTYITTKRNTHTDKIQIRVGVKQGDPMSPLLFNLAMDPLLCKLEESGKGYHRGQSSITAMAFADDLVLLSDSWENMNTNISILETFCNLTGLKTQGQKCHGFYIKPTKKSYTINDCAAWTINGTPLNMIDPGESEKYLGLQFDPWIGIARSGLSTKLDFWLQRIDQAPLKPLQKTDILKTYTIPRLIYIADHSEVKSALLETLDQKIRTAVKEWLHLPPCTCDAILYSSTRDGGLGITKLAGLIPSVQARRLHRIAQSSDDTMKCFMEKEKMEQLHKKLWIQAGGDRENIPSIWEAPPSSEPPNNVSTNSEWKAPTQKDKFPKPCNWRKNEFKKWTKLASQGRGIVNFERDKISNHWIQYYRRIPHRKLLTALQLRANVYPTREFLARGRQDQYIKACRHCDADNESCAHIIGNCPVTQDARIKRHNYICELLLEEAKKKDWVVFKEPHIRDSNKELYKPDLIFVKDGRALVVDVTVRYEAAKSSLEEAAAEKVRKYKHLETEVRHLTNAKDVTFVGFPLGARGKWHQDNFKLLTELGLSKSRQVKMAETFSTVALFSSVDIVHMFASRARKSMVM

SEQ ID NO: 947 - protein, 1665 aa, synthetic construct
MAPKKKRKVNISGSSCGSPNSADTSSDFKDLWTKLKECHDREVQGLQVKVTKLKQERILDAQRLEEFFTKNQQLREQQKVLHETIKVLEDRLRAGLCDRCAVTEEHMRKKQQEFENIRQQNLKLITELMNERNTLQEENKKLSEQLQQKIENDQQHQAAELECEEDVIPDSPITAFSFSGVNRLRRKENPHVRYIEQTHTKLEHSVCANEMRKVSKSSTHPQHNPNENEILVADTYDQSQSPMAKAHGTSSYTPDKSSFNLATVVAETLGLGVQEESETQGPMSPLGDELYHCLEGNHKKQPFESGSETPGTSESATPEGSPKRKVSSAEGAAKEEPKRRSARLSAKPPAKVEAKPKKAAAKDKSSDKKVQTKGKRGAKGKQAEVANQETKEDLPAENGETKTEESPASDEAGEKEAKSDSGSETPGTSESATPESYEQLAPQPCVGETLHSSLPRDSELFVPEEGSSEKESEDAPKTSPPTPGKHGLEQTGEEKVMVTVPDKNPPCPCCGTRVNSVLNLIEHLKVSHGKRGVCFRCAKCGKENSNYHSVVCHFKKCRGPETEKAPAGEWICEVCNRDFTTKIGLGQHKRLAHPAVRNQERIVASQPKETSNRGAHKRCWTKEEEELLIRLEAQFEGNKNINKLIAEHITTKTAKQISDKRRLLSRKPAEEPREEPGTCHHTRRAAASLRTEPEMSHHAQAEDRDNGPGRRPLPGRAAAGGRTMDEIRRHPDKGNGQQRPTKQKSEEQLQAYYKKTLEERLSAGALNTFPRAFKQVMEGRDIKLVINQTAQDCFGCLESISQIRTATRDKKDTVTREKHPKKPFQKWMKKRAIKKGNYLRFQRLFYLDRGKLAKIILDDIECLSCDIPLSEIYSVFKTRWETTGSFKSLGDFKTYGKADNTAFRELITAKEIEKNVQEMSKGSAPGPDGITLGDVVKMDPEFSRTMEIFNLWLTTGKIPDMVRGCRTVLIPKSSKPDRLKDINNWRPITIGSILLRLFSRIVTARLSKACPLNPRQRGFIRAAGCSENLKLLQTIIWSAKREHRPLGVVFVDIAKAFDTVSHQHIIHALQQREVDPHIVGLVSNMYENISTYITTKRNTHTDKIQIRVGVKQGDPMSPLLFNLAMDPLLCKLEESGKGYHRGQSSITAMAFADDLVLLSDSWENMNTNISILETFCNLTGLKTQGQKCHGFYIKPTKKSYTINDCAAWTINGTPLNMIDPGESEKYLGLQFDPWIGIARSGLSTKLDFWLQRIDQAPLKPLQKTDILKTYTIPRLIYIADHSEVKSALLETLDQKIRTAVKEWLHLPPCTCDAILYSSTRDGGLGITKLAGLIPSVQARRLHRIAQSSDDTMKCFMEKEKMEQLHKKLWIQAGGDRENIPSIWEAPPSSEPPNNVSTNSEWEAPTQRDKFPKPCNWRKNEFKKWTKLASQGRGIVNFERDKISNHWIQYYRRIPHRKLLTALQLRANVYPTREFLARGRQDQYIKACRHCDADNESCAHIIGNCPVTQDARIKRHNYICELLLEEAKKKDWVVFKEPHIRDSNKELYKPDLIFVKDGRALVVDVTVRYEAAKSSLEEAAAEKVRKYKHLETEVRHLTNAKDVTFVGFPLGARGKWHQDNFKLLTELGLSKSRQVKMAETFSTVALFSSVDIVHMFASRARKSMVM

SEQ ID NO: 948 - protein, 1665 aa, synthetic construct
MAPKKKRKVNISGSSCGSPNSADTSSDFKDLWTKLKECHDREVQGLQVKVTKLKQERILDAQRLEEFFTKNQQLREQQKVLHETIKVLEDRLRAGLCDRCAVTEEHMRKKQQEFENIRQQNLKLITELMNERNTLQEENKKLSEQLQQKIENDQQHQAAELECEEDVIPDSPITAFSFSGVNRLRRKENPHVRYIEQTHTKLEHSVCANEMRKVSKSSTHPQHNPNENEILVADTYDQSQSPMAKAHGTSSYTPDKSSFNLATVVAETLGLGVQEESETQGPMSPLGDELYHCLEGNHKKQPFESGSETPGTSESATPEGSPKRKVSSAEGAAKEEPKRRSARLSAKPPAKVEAKPKKAAAKDKSSDKKVQTKGKRGAKGKQAEVANQETKEDLPAENGETKTEESPASDEAGEKEAKSDSGSETPGTSESATPESYEQLAPQPCVGETLHSSLPRDSELFVPEEGSSEKESEDAPKTSPPTPGKHGLEQTGEEKVMVTVPDKNPPCPCCGTRVNSVLNLIEHLKVSHGKRGVCFRCAKCGKENSNYHSVVCHFKKCRGPETEKAPAGEWICEVCNRDFTTKIGLGQHKRLAHPAVRNQERIVASQPKETSNRGAHKRCWTKEEEELLIRLEAQFEGNKNINKLIAEHITTKTAKQISDKRRLLSRKPAEEPREEPGTCHHTRRAAASLRTEPEMSHHAQAEDRDNGPGRRPLPGRAAAGGRTMDEIRRHPDKGNGQQRPTKQKSEEQLQAYYKKTLEERLSAGALNTFPRAFKQVMEGRDIKLVINQTAQDCFGCLESISQIRTATRDKKDTVTREKHPKKPFQKWMKKRAIKKGNYLRFQRLFYLDRGKLAKIILDDIECLSCDIPLSEIYSVFKTRWETTGSFKSLGDFKTYGKADNTAFRELITAKEIEKNVQEMSKGSAPGPDGITLGDVVKMDPEFSRTMEIFNLWLTTGKIPDMVRGCRTVLIPKSSKPDRLKDINNWRPITIGSILLRLFSRIVTARLSKACPLNPRQRGFIRAAGCSENLKLLQTIIWSAKREHRPLGVVFVDIAKAFDTVSHQHIIHALQQREVDPHIVGLVSNMYENISTYITTKRNTHTDKIQIRVGVKQGDPMSPLLFNLAMDPLLCKLEESGKGYHRGQSSITAMAFADDLVLLSDSWENMNTNISILETFCNLTGLKTQGQKCHGFYIKPTKKSYTINDCAAWTINGTPLNMIDPGESEKYLGLQFDPWIGIARSGLSTKLDFWLQRIDQAPLKPLQKTDILKTYTIPRLIYIADHSEVKSALLETLDQKIRTAVKEWLHLPPCTCDAILYSSTRDGGLGITKLAGLIPSVQARRLHRIAQSSDDTMKCFMEKEKMEQLHKKLWIQAGGDRENIPSIWEAPPSSEPPNNVSTNSEWEAPTQKDKFPKPCNWRKNEFKKWTKLASHGRGIVNFERDKISNHWIQYYRRIPHRKLLTALQLRANVYPTREFLARGRQDQYIKACRHCDADNESCAHIIGNCPVTQDARIKRHNYICELLLEEAKKKDWVVFKEPHIRDSNKELYKPDLIFVKDGRALVVDVTVRYEAAKSSLEEAAAEKVRKYKHLETEVRHLTNAKDVTFVGFPLGARGKWHQDNFKLLTELGLSKSRQVKMAETFSTVALFSSVDIVHMFASRARKSMVM

SEQ ID NO: 949 - protein, 1665 aa, synthetic construct
MAPKKKRKVNISGSSCGSPNSADTSSDFKDLWTKLKECHDREVQGLQVKVTKLKQERILDAQRLEEFFTKNQQLREQQKVLHETIKVLEDRLRAGLCDRCAVTEEHMRKKQQEFENIRQQNLKLITELMNERNTLQEENKKLSEQLQQKIENDQQHQAAELECEEDVIPDSPITAFSFSGVNRLRRKENPHVRYIEQTHTKLEHSVCANEMRKVSKSSTHPQHNPNENEILVADTYDQSQSPMAKAHGTSSYTPDKSSFNLATVVAETLGLGVQEESETQGPMSPLGDELYHCLEGNHKKQPFESGSETPGTSESATPEGSPKRKVSSAEGAAKEEPKRRSARLSAKPPAKVEAKPKKAAAKDKSSDKKVQTKGKRGAKGKQAEVANQETKEDLPAENGETKTEESPASDEAGEKEAKSDSGSETPGTSESATPESYEQLAPQPCVGETLHSSLPRDSELFVPEEGSSEKESEDAPKTSPPTPGKHGLEQTGEEKVMVTVPDKNPPCPCCGTRVNSVLNLIEHLKVSHGKRGVCFRCAKCGKENSNYHSVVCHFKKCRGPETEKAPAGEWICEVCNRDFTTKIGLGQHKRLAHPAVRNQERIVASQPKETSNRGAHKRCWTKEEEELLIRLEAQFEGNKNINKLIAEHITTKTAKQISDKRRLLSRKPAEEPREEPGTCHHTRRAAASLRTEPEMSHHAQAEDRDNGPGRRPLPGRAAAGGRTMDEIRRHPDKGNGQQRPTKQKSEEQLQAYYKKTLEERLSAGALNTFPRAFKQVMEGRDIKLVINQTAQDCFGCLESISQIRTATRDKKDTVTREKHPKKPFQKWMKKRAIKKGNYLRFQRLFYLDRGKLAKIILDDIECLSCDIPLSEIYSVFKTRWETTGSFKSLGDFKTYGKADNTAFRELITAKEIEKNVQEMSKGSAPGPDGITLGDVVKMDPEFSRTMEIFNLWLTTGKIPDMVRGCRTVLIPKSSKPDRLKDINNWRPITIGSILLRLFSRIVTARLSKACPLNPRQRGFIRAAGCSENLKLLQTIIWSAKREHRPLGVVFVDIAKAFDTVSHQHIIHALQQREVDPHIVGLVSNMYENISTYITTKRNTHTDKIQIRVGVKQGDPMSPLLFNLAMDPLLCKLEESGKGYHRGQSSITAMAFADDLVLLSDSWENMNTNISILETFCNLTGLKTQGQKCHGFYIKPTKKSYTINDCAAWTINGTPLNMIDPGESEKYLGLQFDPWIGIARSGLSTKLDFWLQRIDQAPLKPLQKTDILKTYTIPRLIYIADHSEVKSALLETLDQKIRTAVKEWLHLPPCTCDAILYSSTRDGGLGITKLAGLIPSVQARRLHRIAQSSDDTMKCFMEKEKMEQLHKKLWIQAGGDRENIPSIWEAPPSSEPPNNVSTNSEWEAPTQKDKFPKPCNWRKNEFKKWTKLASQGRGIVNFERDKISNHWIQYYRRIPHRKLLTALKLRANVYPTREFLARGRQDQYIKACRHCDADNESCAHIIGNCPVTQDARIKRHNYICELLLEEAKKKDWVVFKEPHIRDSNKELYKPDLIFVKDGRALVVDVTVRYEAAKSSLEEAAAEKVRKYKHLETEVRHLTNAKDVTFVGFPLGARGKWHQDNFKLLTELGLSKSRQVKMAETFSTVALFSSVDIVHMFASRARKSMVM

SEQ ID NO: 950 - protein, 1665 aa, synthetic construct
MAPKKKRKVNISGSSCGSPNSADTSSDFKDLWTKLKECHDREVQGLQVKVTKLKQERILDAQRLEEFFTKNQQLREQQKVLHETIKVLEDRLRAGLCDRCAVTEEHMRKKQQEFENIRQQNLKLITELMNERNTLQEENKKLSEQLQQKIENDQQHQAAELECEEDVIPDSPITAFSFSGVNRLRRKENPHVRYIEQTHTKLEHSVCANEMRKVSKSSTHPQHNPNENEILVADTYDQSQSPMAKAHGTSSYTPDKSSFNLATVVAETLGLGVQEESETQGPMSPLGDELYHCLEGNHKKQPFESGSETPGTSESATPEGSPKRKVSSAEGAAKEEPKRRSARLSAKPPAKVEAKPKKAAAKDKSSDKKVQTKGKRGAKGKQAEVANQETKEDLPAENGETKTEESPASDEAGEKEAKSDSGSETPGTSESATPESYEQLAPQPCVGETLHSSLPRDSELFVPEEGSSEKESEDAPKTSPPTPGKHGLEQTGEEKVMVTVPDKNPPCPCCGTRVNSVLNLIEHLKVSHGKRGVCFRCAKCGKENSNYHSVVCHFKKCRGPETEKAPAGEWICEVCNRDFTTKIGLGQHKRLAHPAVRNQERIVASQPKETSNRGAHKRCWTKEEEELLIRLEAQFEGNKNINKLIAEHITTKTAKQISDKRRLLSRKPAEEPREEPGTCHHTRRAAASLRTEPEMSHHAQAEDRDNGPGRRPLPGRAAAGGRTMDEIRRHPDKGNGQQRPTKQKSEEQLQAYYKKTLEERLSAGALNTFPRAFKQVMEGRDIKLVINQTAQDCFGCLESISQIRTATRDKKDTVTREKHPKKPFQKWMKKRAIKKGNYLRFQRLFYLDRGKLAKIILDDIECLSCDIPLSEIYSVFKTRWETTGSFKSLGDFKTYGKADNTAFRELITAKEIEKNVQEMSKGSAPGPDGITLGDVVKMDPEFSRTMEIFNLWLTTGKIPDMVRGCRTVLIPKSSKPDRLKDINNWRPITIGSILLRLFSRIVTARLSKACPLNPRQRGFIRAAGCSENLKLLQTIIWSAKREHRPLGVVFVDIAKAFDTVSHQHIIHALQQREVDPHIVGLVSNMYENISTYITTKRNTHTDKIQIRVGVKQGDPMSPLLFNLAMDPLLCKLEESGKGYHRGQSSITAMAFADDLVLLSDSWENMNTNISILETFCNLTGLKTQGQKCHGFYIKPTKKSYTINDCAAWTINGTPLNMIDPGESEKYLGLQFDPWIGIARSGLSTKLDFWLQRIDQAPLKPLQKTDILKTYTIPRLIYIADHSEVKSALLETLDQKIRTAVKEWLHLPPCTCDAILYSSTRDGGLGITKLAGLIPSVQARRLHRIAQSSDDTMKCFMEKEKMEQLHKKLWIQAGGDRENIPSIWEAPPSSEPPNNVSTNSEWEAPTQKDKFPKPCNWRKNEFKKWTKLASQGRGIVNFERDKISNHWIQYYRRIPHRKLLTALQLRANVYPTREFLARGRQDQYIKACRHCDADNESCAHIIGNCPVTKDARIKRHNYICELLLEEAKKKDWVVFKEPHIRDSNKELYKPDLIFVKDGRALVVDVTVRYEAAKSSLEEAAAEKVRKYKHLETEVRHLTNAKDVTFVGFPLGARGKWHQDNFKLLTELGLSKSRQVKMAETFSTVALFSSVDIVHMFASRARKSMVM

SEQ ID NO: 951 - protein, 1665 aa, synthetic construct
MAPKKKRKVNISGSSCGSPNSADTSSDFKDLWTKLKECHDREVQGLQVKVTKLKQERILDAQRLEEFFTKNQQLREQQKVLHETIKVLEDRLRAGLCDRCAVTEEHMRKKQQEFENIRQQNLKLITELMNERNTLQEENKKLSEQLQQKIENDQQHQAAELECEEDVIPDSPITAFSFSGVNRLRRKENPHVRYIEQTHTKLEHSVCANEMRKVSKSSTHPQHNPNENEILVADTYDQSQSPMAKAHGTSSYTPDKSSFNLATVVAETLGLGVQEESETQGPMSPLGDELYHCLEGNHKKQPFESGSETPGTSESATPEGSPKRKVSSAEGAAKEEPKRRSARLSAKPPAKVEAKPKKAAAKDKSSDKKVQTKGKRGAKGKQAEVANQETKEDLPAENGETKTEESPASDEAGEKEAKSDSGSETPGTSESATPESYEQLAPQPCVGETLHSSLPRDSELFVPEEGSSEKESEDAPKTSPPTPGKHGLEQTGEEKVMVTVPDKNPPCPCCGTRVNSVLNLIEHLKVSHGKRGVCFRCAKCGKENSNYHSVVCHFKKCRGPETEKAPAGEWICEVCNRDFTTKIGLGQHKRLAHPAVRNQERIVASQPKETSNRGAHKRCWTKEEEELLIRLEAQFEGNKNINKLIAEHITTKTAKQISDKRRLLSRKPAEEPREEPGTCHHTRRAAASLRTEPEMSHHAQAEDRDNGPGRRPLPGRAAAGGRTMDEIRRHPDKGNGQQRPTKQKSEEQLQAYYKKTLEERLSAGALNTFPRAFKQVMEGRDIKLVINQTAQDCFGCLESISQIRTATRDKKDTVTREKHPKKPFQKWMKKRAIKKGNYLRFQRLFYLDRGKLAKIILDDIECLSCDIPLSEIYSVFKTRWETTGSFKSLGDFKTYGKADNTAFRELITAKEIEKNVQEMSKGSAPGPDGITLGDVVKMDPEFSRTMEIFNLWLTTGKIPDMVRGCRTVLIPKSSKPDRLKDINNWRPITIGSILLRLFSRIVTARLSKACPLNPRQRGFIRAAGCSENLKLLQTIIWSAKREHRPLGVVFVDIAKAFDTVSHQHIIHALQQREVDPHIVGLVSNMYENISTYITTKRNTHTDKIQIRVGVKQGDPMSPLLFNLAMDPLLCKLEESGKGYHRGQSSITAMAFADDLVLLSDSWENMNTNISILETFCNLTGLKTQGQKCHGFYIKPTKKSYTINDCAAWTINGTPLNMIDPGESEKYLGLQFDPWIGIARSGLSTKLDFWLQRIDQAPLKPLQKTDILKTYTIPRLIYIADHSEVKSALLETLDQKIRTAVKEWLHLPPCTCDAILYSSTRDGGLGITKLAGLIPSVQARRLHRIAQSSDDTMKCFMEKEKMEQLHKKLWIQAGGDRENIPSIWEAPPSSEPPNNVSTNSEWEAPTQKDKFPKPCNWRKNEFKKWTKLASQGRGIVNFERDKISNHWIQYYRRIPHRKLLTALQLRANVYPTREFLARGRQDQYIKACRHCDADNESCAHIIGNCPVTQDARIKRHNYICELLLKEAKKKDWVVFKEPHIRDSNKELYKPDLIFVKDGRALVVDVTVRYEAAKSSLEEAAAEKVRKYKHLETEVRHLTNAKDVTFVGFPLGARGKWHQDNFKLLTELGLSKSRQVKMAETFSTVALFSSVDIVHMFASRARKSMVM

SEQ ID NO: 952 - protein, 1665 aa, synthetic construct
MAPKKKRKVNISGSSCGSPNSADTSSDFKDLWTKLKECHDREVQGLQVKVTKLKQERILDAQRLEEFFTKNQQLREQQKVLHETIKVLEDRLRAGLCDRCAVTEEHMRKKQQEFENIRQQNLKLITELMNERNTLQEENKKLSEQLQQKIENDQQHQAAELECEEDVIPDSPITAFSFSGVNRLRRKENPHVRYIEQTHTKLEHSVCANEMRKVSKSSTHPQHNPNENEILVADTYDQSQSPMAKAHGTSSYTPDKSSFNLATVVAETLGLGVQEESETQGPMSPLGDELYHCLEGNHKKQPFESGSETPGTSESATPEGSPKRKVSSAEGAAKEEPKRRSARLSAKPPAKVEAKPKKAAAKDKSSDKKVQTKGKRGAKGKQAEVANQETKEDLPAENGETKTEESPASDEAGEKEAKSDSGSETPGTSESATPESYEQLAPQPCVGETLHSSLPRDSELFVPEEGSSEKESEDAPKTSPPTPGKHGLEQTGEEKVMVTVPDKNPPCPCCGTRVNSVLNLIEHLKVSHGKRGVCFRCAKCGKENSNYHSVVCHFKKCRGPETEKAPAGEWICEVCNRDFTTKIGLGQHKRLAHPAVRNQERIVASQPKETSNRGAHKRCWTKEEEELLIRLEAQFEGNKNINKLIAEHITTKTAKQISDKRRLLSRKPAEEPREEPGTCHHTRRAAASLRTEPEMSHHAQAEDRDNGPGRRPLPGRAAAGGRTMDEIRRHPDKGNGQQRPTKQKSEEQLQAYYKKTLEERLSAGALNTFPRAFKQVMEGRDIKLVINQTAQDCFGCLESISQIRTATRDKKDTVTREKHPKKPFQKWMKKRAIKKGNYLRFQRLFYLDRGKLAKIILDDIECLSCDIPLSEIYSVFKTRWETTGSFKSLGDFKTYGKADNTAFRELITAKEIEKNVQEMSKGSAPGPDGITLGDVVKMDPEFSRTMEIFNLWLTTGKIPDMVRGCRTVLIPKSSKPDRLKDINNWRPITIGSILLRLFSRIVTARLSKACPLNPRQRGFIRAAGCSENLKLLQTIIWSAKREHRPLGVVFVDIAKAFDTVSHQHIIHALQQREVDPHIVGLVSNMYENISTYITTKRNTHTDKIQIRVGVKQGDPMSPLLFNLAMDPLLCKLEESGKGYHRGQSSITAMAFADDLVLLSDSWENMNTNISILETFCNLTGLKTQGQKCHGFYIKPTKKSYTINDCAAWTINGTPLNMIDPGESEKYLGLQFDPWIGIARSGLSTKLDFWLQRIDQAPLKPLQKTDILKTYTIPRLIYIADHSEVKSALLETLDQKIRTAVKEWLHLPPCTCDAILYSSTRDGGLGITKLAGLIPSVQARRLHRIAQSSDDTMKCFMEKEKMEQLHKKLWIQAGGDRENIPSIWEAPPSSEPPNNVSTNSEWEAPTQKDKFPKPCNWRKNEFKKWTKLASQGRGIVNFERDKISNHWIQYYRRIPHRKLLTALQLRANVYPTREFLARGRQDQYIKACRHCDADNESCAHIIGNCPVTQDARIKRHNYICELLLEEAKKKDWTVFKEPHIRDSNKELYKPDLIFVKDGRALVVDVTVRYEAAKSSLEEAAAEKVRKYKHLETEVRHLTNAKDVTFVGFPLGARGKWHQDNFKLLTELGLSKSRQVKMAETFSTVALFSSVDIVHMFASRARKSMVM

SEQ ID NO: 953 - protein, 1665 aa, synthetic construct
MAPKKKRKVNISGSSCGSPNSADTSSDFKDLWTKLKECHDREVQGLQVKVTKLKQERILDAQRLEEFFTKNQQLREQQKVLHETIKVLEDRLRAGLCDRCAVTEEHMRKKQQEFENIRQQNLKLITELMNERNTLQEENKKLSEQLQQKIENDQQHQAAELECEEDVIPDSPITAFSFSGVNRLRRKENPHVRYIEQTHTKLEHSVCANEMRKVSKSSTHPQHNPNENEILVADTYDQSQSPMAKAHGTSSYTPDKSSFNLATVVAETLGLGVQEESETQGPMSPLGDELYHCLEGNHKKQPFESGSETPGTSESATPEGSPKRKVSSAEGAAKEEPKRRSARLSAKPPAKVEAKPKKAAAKDKSSDKKVQTKGKRGAKGKQAEVANQETKEDLPAENGETKTEESPASDEAGEKEAKSDSGSETPGTSESATPESYEQLAPQPCVGETLHSSLPRDSELFVPEEGSSEKESEDAPKTSPPTPGKHGLEQTGEEKVMVTVPDKNPPCPCCGTRVNSVLNLIEHLKVSHGKRGVCFRCAKCGKENSNYHSVVCHFKKCRGPETEKAPAGEWICEVCNRDFTTKIGLGQHKRLAHPAVRNQERIVASQPKETSNRGAHKRCWTKEEEELLIRLEAQFEGNKNINKLIAEHITTKTAKQISDKRRLLSRKPAEEPREEPGTCHHTRRAAASLRTEPEMSHHAQAEDRDNGPGRRPLPGRAAAGGRTMDEIRRHPDKGNGQQRPTKQKSEEQLQAYYKKTLEERLSAGALNTFPRAFKQVMEGRDIKLVINQTAQDCFGCLESISQIRTATRDKKDTVTREKHPKKPFQKWMKKRAIKKGNYLRFQRLFYLDRGKLAKIILDDIECLSCDIPLSEIYSVFKTRWETTGSFKSLGDFKTYGKADNTAFRELITAKEIEKNVQEMSKGSAPGPDGITLGDVVKMDPEFSRTMEIFNLWLTTGKIPDMVRGCRTVLIPKSSKPDRLKDINNWRPITIGSILLRLFSRIVTARLSKACPLNPRQRGFIRAAGCSENLKLLQTIIWSAKREHRPLGVVFVDIAKAFDTVSHQHIIHALQQREVDPHIVGLVSNMYENISTYITTKRNTHTDKIQIRVGVKQGDPMSPLLFNLAMDPLLCKLEESGKGYHRGQSSITAMAFADDLVLLSDSWENMNTNISILETFCNLTGLKTQGQKCHGFYIKPTKKSYTINDCAAWTINGTPLNMIDPGESEKYLGLQFDPWIGIARSGLSTKLDFWLQRIDQAPLKPLQKTDILKTYTIPRLIYIADHSEVKSALLETLDQKIRTAVKEWLHLPPCTCDAILYSSTRDGGLGITKLAGLIPSVQARRLHRIAQSSDDTMKCFMEKEKMEQLHKKLWIQAGGDRENIPSIWEAPPSSEPPNNVSTNSEWEAPTQKDKFPKPCNWRKNEFKKWTKLASQGRGIVNFERDKISNHWIQYYRRIPHRKLLTALQLRANVYPTREFLARGRQDQYIKACRHCDADNESCAHIIGNCPVTQDARIKRHNYICELLLEEAKKKDWVVFKEPHIRDSNKELYKPDLIFVKDGRALVIDVTVRYEAAKSSLEEAAAEKVRKYKHLETEVRHLTNAKDVTFVGFPLGARGKWHQDNFKLLTELGLSKSRQVKMAETFSTVALFSSVDIVHMFASRARKSMVM

SEQ ID NO: 954 - protein, 1665 aa, synthetic construct
MAPKKKRKVNISGSSCGSPNSADTSSDFKDLWTKLKECHDREVQGLQVKVTKLKQERILDAQRLEEFFTKNQQLREQQKVLHETIKVLEDRLRAGLCDRCAVTEEHMRKKQQEFENIRQQNLKLITELMNERNTLQEENKKLSEQLQQKIENDQQHQAAELECEEDVIPDSPITAFSFSGVNRLRRKENPHVRYIEQTHTKLEHSVCANEMRKVSKSSTHPQHNPNENEILVADTYDQSQSPMAKAHGTSSYTPDKSSFNLATVVAETLGLGVQEESETQGPMSPLGDELYHCLEGNHKKQPFESGSETPGTSESATPEGSPKRKVSSAEGAAKEEPKRRSARLSAKPPAKVEAKPKKAAAKDKSSDKKVQTKGKRGAKGKQAEVANQETKEDLPAENGETKTEESPASDEAGEKEAKSDSGSETPGTSESATPESYEQLAPQPCVGETLHSSLPRDSELFVPEEGSSEKESEDAPKTSPPTPGKHGLEQTGEEKVMVTVPDKNPPCPCCGTRVNSVLNLIEHLKVSHGKRGVCFRCAKCGKENSNYHSVVCHFKKCRGPETEKAPAGEWICEVCNRDFTTKIGLGQHKRLAHPAVRNQERIVASQPKETSNRGAHKRCWTKEEEELLIRLEAQFEGNKNINKLIAEHITTKTAKQISDKRRLLSRKPAEEPREEPGTCHHTRRAAASLRTEPEMSHHAQAEDRDNGPGRRPLPGRAAAGGRTMDEIRRHPDKGNGQQRPTKQKSEEQLQAYYKKTLEERLSAGALNTFPRAFKQVMEGRDIKLVINQTAQDCFGCLESISQIRTATRDKKDTVTREKHPKKPFQKWMKKRAIKKGNYLRFQRLFYLDRGKLAKIILDDIECLSCDIPLSEIYSVFKTRWETTGSFKSLGDFKTYGKADNTAFRELITAKEIEKNVQEMSKGSAPGPDGITLGDVVKMDPEFSRTMEIFNLWLTTGKIPDMVRGCRTVLIPKSSKPDRLKDINNWRPITIGSILLRLFSRIVTARLSKACPLNPRQRGFIRAAGCSENLKLLQTIIWSAKREHRPLGVVFVDIAKAFDTVSHQHIIHALQQREVDPHIVGLVSNMYENISTYITTKRNTHTDKIQIRVGVKQGDPMSPLLFNLAMDPLLCKLEESGKGYHRGQSSITAMAFADDLVLLSDSWENMNTNISILETFCNLTGLKTQGQKCHGFYIKPTKKSYTINDCAAWTINGTPLNMIDPGESEKYLGLQFDPWIGIARSGLSTKLDFWLQRIDQAPLKPLQKTDILKTYTIPRLIYIADHSEVKSALLETLDQKIRTAVKEWLHLPPCTCDAILYSSTRDGGLGITKLAGLIPSVQARRLHRIAQSSDDTMKCFMEKEKMEQLHKKLWIQAGGDRENIPSIWEAPPSSEPPNNVSTNSEWEAPTQKDKFPKPCNWRKNEFKKWTKLASQGRGIVNFERDKISNHWIQYYRRIPHRKLLTALQLRANVYPTREFLARGRQDQYIKACRHCDADNESCAHIIGNCPVTQDARIKRHNYICELLLEEAKKKDWVVFKEPHIRDSNKELYKPDLIFVKDGRALVVDVTIRYEAAKSSLEEAAAEKVRKYKHLETEVRHLTNAKDVTFVGFPLGARGKWHQDNFKLLTELGLSKSRQVKMAETFSTVALFSSVDIVHMFASRARKSMVM

SEQ ID NO: 955 - protein, 1665 aa, synthetic construct
MAPKKKRKVNISGSSCGSPNSADTSSDFKDLWTKLKECHDREVQGLQVKVTKLKQERILDAQRLEEFFTKNQQLREQQKVLHETIKVLEDRLRAGLCDRCAVTEEHMRKKQQEFENIRQQNLKLITELMNERNTLQEENKKLSEQLQQKIENDQQHQAAELECEEDVIPDSPITAFSFSGVNRLRRKENPHVRYIEQTHTKLEHSVCANEMRKVSKSSTHPQHNPNENEILVADTYDQSQSPMAKAHGTSSYTPDKSSFNLATVVAETLGLGVQEESETQGPMSPLGDELYHCLEGNHKKQPFESGSETPGTSESATPEGSPKRKVSSAEGAAKEEPKRRSARLSAKPPAKVEAKPKKAAAKDKSSDKKVQTKGKRGAKGKQAEVANQETKEDLPAENGETKTEESPASDEAGEKEAKSDSGSETPGTSESATPESYEQLAPQPCVGETLHSSLPRDSELFVPEEGSSEKESEDAPKTSPPTPGKHGLEQTGEEKVMVTVPDKNPPCPCCGTRVNSVLNLIEHLKVSHGKRGVCFRCAKCGKENSNYHSVVCHFKKCRGPETEKAPAGEWICEVCNRDFTTKIGLGQHKRLAHPAVRNQERIVASQPKETSNRGAHKRCWTKEEEELLIRLEAQFEGNKNINKLIAEHITTKTAKQISDKRRLLSRKPAEEPREEPGTCHHTRRAAASLRTEPEMSHHAQAEDRDNGPGRRPLPGRAAAGGRTMDEIRRHPDKGNGQQRPTKQKSEEQLQAYYKKTLEERLSAGALNTFPRAFKQVMEGRDIKLVINQTAQDCFGCLESISQIRTATRDKKDTVTREKHPKKPFQKWMKKRAIKKGNYLRFQRLFYLDRGKLAKIILDDIECLSCDIPLSEIYSVFKTRWETTGSFKSLGDFKTYGKADNTAFRELITAKEIEKNVQEMSKGSAPGPDGITLGDVVKMDPEFSRTMEIFNLWLTTGKIPDMVRGCRTVLIPKSSKPDRLKDINNWRPITIGSILLRLFSRIVTARLSKACPLNPRQRGFIRAAGCSENLKLLQTIIWSAKREHRPLGVVFVDIAKAFDTVSHQHIIHALQQREVDPHIVGLVSNMYENISTYITTKRNTHTDKIQIRVGVKQGDPMSPLLFNLAMDPLLCKLEESGKGYHRGQSSITAMAFADDLVLLSDSWENMNTNISILETFCNLTGLKTQGQKCHGFYIKPTKKSYTINDCAAWTINGTPLNMIDPGESEKYLGLQFDPWIGIARSGLSTKLDFWLQRIDQAPLKPLQKTDILKTYTIPRLIYIADHSEVKSALLETLDQKIRTAVKEWLHLPPCTCDAILYSSTRDGGLGITKLAGLIPSVQARRLHRIAQSSDDTMKCFMEKEKMEQLHKKLWIQAGGDRENIPSIWEAPPSSEPPNNVSTNSEWEAPTQKDKFPKPCNWRKNEFKKWTKLASQGRGIVNFERDKISNHWIQYYRRIPHRKLLTALQLRANVYPTREFLARGRQDQYIKACRHCDADNESCAHIIGNCPVTQDARIKRHNYICELLLEEAKKKDWVVFKEPHIRDSNKELYKPDLIFVKDGRALVVDVTVRYEAAKSSLEEAAAEKVRKYKPLETEVRHLTNAKDVTFVGFPLGARGKWHQDNFKLLTELGLSKSRQVKMAETFSTVALFSSVDIVHMFASRARKSMVM

SEQ ID NO: 956 - protein, 1665 aa, synthetic construct
MAPKKKRKVNISGSSCGSPNSADTSSDFKDLWTKLKECHDREVQGLQVKVTKLKQERILDAQRLEEFFTKNQQLREQQKVLHETIKVLEDRLRAGLCDRCAVTEEHMRKKQQEFENIRQQNLKLITELMNERNTLQEENKKLSEQLQQKIENDQQHQAAELECEEDVIPDSPITAFSFSGVNRLRRKENPHVRYIEQTHTKLEHSVCANEMRKVSKSSTHPQHNPNENEILVADTYDQSQSPMAKAHGTSSYTPDKSSFNLATVVAETLGLGVQEESETQGPMSPLGDELYHCLEGNHKKQPFESGSETPGTSESATPEGSPKRKVSSAEGAAKEEPKRRSARLSAKPPAKVEAKPKKAAAKDKSSDKKVQTKGKRGAKGKQAEVANQETKEDLPAENGETKTEESPASDEAGEKEAKSDSGSETPGTSESATPESYEQLAPQPCVGETLHSSLPRDSELFVPEEGSSEKESEDAPKTSPPTPGKHGLEQTGEEKVMVTVPDKNPPCPCCGTRVNSVLNLIEHLKVSHGKRGVCFRCAKCGKENSNYHSVVCHFKKCRGPETEKAPAGEWICEVCNRDFTTKIGLGQHKRLAHPAVRNQERIVASQPKETSNRGAHKRCWTKEEEELLIRLEAQFEGNKNINKLIAEHITTKTAKQISDKRRLLSRKPAEEPREEPGTCHHTRRAAASLRTEPEMSHHAQAEDRDNGPGRRPLPGRAAAGGRTMDEIRRHPDKGNGQQRPTKQKSEEQLQAYYKKTLEERLSAGALNTFPRAFKQVMEGRDIKLVINQTAQDCFGCLESISQIRTATRDKKDTVTREKHPKKPFQKWMKKRAIKKGNYLRFQRLFYLDRGKLAKIILDDIECLSCDIPLSEIYSVFKTRWETTGSFKSLGDFKTYGKADNTAFRELITAKEIEKNVQEMSKGSAPGPDGITLGDVVKMDPEFSRTMEIFNLWLTTGKIPDMVRGCRTVLIPKSSKPDRLKDINNWRPITIGSILLRLFSRIVTARLSKACPLNPRQRGFIRAAGCSENLKLLQTIIWSAKREHRPLGVVFVDIAKAFDTVSHQHIIHALQQREVDPHIVGLVSNMYENISTYITTKRNTHTDKIQIRVGVKQGDPMSPLLFNLAMDPLLCKLEESGKGYHRGQSSITAMAFADDLVLLSDSWENMNTNISILETFCNLTGLKTQGQKCHGFYIKPTKKSYTINDCAAWTINGTPLNMIDPGESEKYLGLQFDPWIGIARSGLSTKLDFWLQRIDQAPLKPLQKTDILKTYTIPRLIYIADHSEVKSALLETLDQKIRTAVKEWLHLPPCTCDAILYSSTRDGGLGITKLAGLIPSVQARRLHRIAQSSDDTMKCFMEKEKMEQLHKKLWIQAGGDRENIPSIWEAPPSSEPPNNVSTNSEWEAPTQKDKFPKPCNWRKNEFKKWTKLASQGRGIVNFERDKISNHWIQYYRRIPHRKLLTALQLRANVYPTREFLARGRQDQYIKACRHCDADNESCAHIIGNCPVTQDARIKRHNYICELLLEEAKKKDWVVFKEPHIRDSNKELYKPDLIFVKDGRALVVDVTVRYEAAKSSLEEAAAEKVRKYKHLETEIRHLTNAKDVTFVGFPLGARGKWHQDNFKLLTELGLSKSRQVKMAETFSTVALFSSVDIVHMFASRARKSMVM

SEQ ID NO: 957 - protein, 1665 aa, synthetic construct
MAPKKKRKVNISGSSCGSPNSADTSSDFKDLWTKLKECHDREVQGLQVKVTKLKQERILDAQRLEEFFTKNQQLREQQKVLHETIKVLEDRLRAGLCDRCAVTEEHMRKKQQEFENIRQQNLKLITELMNERNTLQEENKKLSEQLQQKIENDQQHQAAELECEEDVIPDSPITAFSFSGVNRLRRKENPHVRYIEQTHTKLEHSVCANEMRKVSKSSTHPQHNPNENEILVADTYDQSQSPMAKAHGTSSYTPDKSSFNLATVVAETLGLGVQEESETQGPMSPLGDELYHCLEGNHKKQPFESGSETPGTSESATPEGSPKRKVSSAEGAAKEEPKRRSARLSAKPPAKVEAKPKKAAAKDKSSDKKVQTKGKRGAKGKQAEVANQETKEDLPAENGETKTEESPASDEAGEKEAKSDSGSETPGTSESATPESYEQLAPQPCVGETLHSSLPRDSELFVPEEGSSEKESEDAPKTSPPTPGKHGLEQTGEEKVMVTVPDKNPPCPCCGTRVNSVLNLIEHLKVSHGKRGVCFRCAKCGKENSNYHSVVCHFKKCRGPETEKAPAGEWICEVCNRDFTTKIGLGQHKRLAHPAVRNQERIVASQPKETSNRGAHKRCWTKEEEELLIRLEAQFEGNKNINKLIAEHITTKTAKQISDKRRLLSRKPAEEPREEPGTCHHTRRAAASLRTEPEMSHHAQAEDRDNGPGRRPLPGRAAAGGRTMDEIRRHPDKGNGQQRPTKQKSEEQLQAYYKKTLEERLSAGALNTFPRAFKQVMEGRDIKLVINQTAQDCFGCLESISQIRTATRDKKDTVTREKHPKKPFQKWMKKRAIKKGNYLRFQRLFYLDRGKLAKIILDDIECLSCDIPLSEIYSVFKTRWETTGSFKSLGDFKTYGKADNTAFRELITAKEIEKNVQEMSKGSAPGPDGITLGDVVKMDPEFSRTMEIFNLWLTTGKIPDMVRGCRTVLIPKSSKPDRLKDINNWRPITIGSILLRLFSRIVTARLSKACPLNPRQRGFIRAAGCSENLKLLQTIIWSAKREHRPLGVVFVDIAKAFDTVSHQHIIHALQQREVDPHIVGLVSNMYENISTYITTKRNTHTDKIQIRVGVKQGDPMSPLLFNLAMDPLLCKLEESGKGYHRGQSSITAMAFADDLVLLSDSWENMNTNISILETFCNLTGLKTQGQKCHGFYIKPTKKSYTINDCAAWTINGTPLNMIDPGESEKYLGLQFDPWIGIARSGLSTKLDFWLQRIDQAPLKPLQKTDILKTYTIPRLIYIADHSEVKSALLETLDQKIRTAVKEWLHLPPCTCDAILYSSTRDGGLGITKLAGLIPSVQARRLHRIAQSSDDTMKCFMEKEKMEQLHKKLWIQAGGDRENIPSIWEAPPSSEPPNNVSTNSEWEAPTQKDKFPKPCNWRKNEFKKWTKLASQGRGIVNFERDKISNHWIQYYRRIPHRKLLTALQLRANVYPTREFLARGRQDQYIKACRHCDADNESCAHIIGNCPVTQDARIKRHNYICELLLEEAKKKDWVVFKEPHIRDSNKELYKPDLIFVKDGRALVVDVTVRYEAAKSSLEEAAAEKVRKYKHLETEVRHLTNAKDVTFVGFPLGARGKWHQDNFKLLTELGLSRSRQVKMAETFSTVALFSSVDIVHMFASRARKSMVM

SEQ ID NO: 958 - protein, 1665 aa, synthetic construct; identical to SEQ ID NO: 746

SEQ ID NO: 959 - protein, 1665 aa, synthetic construct
MAPKKKRKVNISGSSCGSPNSADTSSDFKDLWTKLKECHDREVQGLQVKVTKLKQERILDAQRLEEFFTKNQQLREQQKVLHETIKVLEDRLRAGLCDRCAVTEEHMRKKQQEFENIRQQNLKLITELMNERNTLQEENKKLSEQLQQKIENDQQHQAAELECEEDVIPDSPITAFSFSGVNRLRRKENPHVRYIEQTHTKLEHSVCANEMRKVSKSSTHPQHNPNENEILVADTYDQSQSPMAKAHGTSSYTPDKSSFNLATVVAETLGLGVQEESETQGPMSPLGDELYHCLEGNHKKQPFESGSETPGTSESATPEGSPKRKVSSAEGAAKEEPKRRSARLSAKPPAKVEAKPKKAAAKDKSSDKKVQTKGKRGAKGKQAEVANQETKEDLPAENGETKTEESPASDEAGEKEAKSDSGSETPGTSESATPESYEQLAPQPCVGETLHSSLPRDSELFVPEEGSSEKESEDAPKTSPPTPGKHGLEQTGEEKVMVTVPDKNPPCPCCGTRVNSVLNLIEHLKVSHGKRGVCFRCAKCGKENSNYHSVVCHFKKCRGPETEKAPAGEWICEVCNRDFTTKIGLGQHKRLAHPAVRNQERIVASQPKETSNRGAHKRCWTKEEEELLIRLEAQFEGNKNINKLIAEHITTKTAKQISDKRRLLSRKPAEEPREEPGTCHHTRRAAASLRTEPEMSHHAQAEDRDNGPGRRPLPGRAAAGGRTMDEIRRHPDKGNGQQRPTKQKSEEQLQAYYKKTLEERLSAGALNTFPRAFKQVMEGRDIKLVINQTAQDCFGCLESISQIRTATRDKKDTVTREKHPKKPFQKWMKKRAIKKGNYLRFQRLFYLDRGKLAKIILDDIECLSCDIPLSEIYSVFKTRWETTGSFKSLGDFKTYGKADNTAFRELITAKEIEKNVQEMSKGSAPGPDGITLGDVVKMDPEFSRTMEIFNLWLTTGKIPDMVRGCRTVLIPKSSKPDRLKDINNWRPITIGSILLRLFSRIVTARLSKACPLNPRQRGFIRAAGCSENLKLLQTIIWSAKREHRPLGVVFVDIAKAFDTVSHQHIIHALQQREVDPHIVGLVSNMYENISTYITTKRNTHTDKIQIRVGVKQGDPMSPLLFNLAMDPLLCKLEESGKGYHRGQSSITAMAFADDLVLLSDSWENMNTNISILETFCNLTGLKTQGQKCHGFYIKPTKKSYTINDCAAWTINGTPLNMIDPGESEKYLGLQFDPWIGIARSGLSTKLDFWLQRIDQAPLKPLQKTDILKTYTIPRLIYIADHSEVKSALLETLDQKIRTAVKEWLHLPPCTCDAILYSSTRDGGLGITKLAGLIPSVQARRLHRIAQSSDDTMKCFMEKEKMEQLHKKLWIQAGGDRENIPSIWEAPPSSEPPNNVSTNSEWEAPTQKDKFPKPCNWRKNEFKKWTKLASQGRGIVNFERDKISNHWIQYYRRIPHRKLLTALQLRANVYPTREFLARGRQDQYIKACRHCDADNESCAHIIGNCPVTQDARIKRHNYICELLLEEAKKKDWVVFKEPHIRDSNKELYKPDLIFVKDGRALVVDVTVRYEAAKSSLEEAAAEKVRKYKHLETEVRHLTNAKDVTFVGFPLGARGKWHQDNFKLLTELGLSKSRQVKMAETFSRVALFSSVDIVHMFASRARKSMVM

SEQ ID NO: 960 - protein, 1665 aa, synthetic construct
MAPKKKRKVNISGSSCGSPNSADTSSDFKDLWTKLKECHDREVQGLQVKVTKLKQERILDAQRLEEFFTKNQQLREQQKVLHETIKVLEDRLRAGLCDRCAVTEEHMRKKQQEFENIRQQNLKLITELMNERNTLQEENKKLSEQLQQKIENDQQHQAAELECEEDVIPDSPITAFSFSGVNRLRRKENPHVRYIEQTHTKLEHSVCANEMRKVSKSSTHPQHNPNENEILVADTYDQSQSPMAKAHGTSSYTPDKSSFNLATVVAETLGLGVQEESETQGPMSPLGDELYHCLEGNHKKQPFESGSETPGTSESATPEGSPKRKVSSAEGAAKEEPKRRSARLSAKPPAKVEAKPKKAAAKDKSSDKKVQTKGKRGAKGKQAEVANQETKEDLPAENGETKTEESPASDEAGEKEAKSDSGSETPGTSESATPESYEQLAPQPCVGETLHSSLPRDSELFVPEEGSSEKESEDAPKTSPPTPGKHGLEQTGEEKVMVTVPDKNPPCPCCGTRVNSVLNLIEHLKVSHGKRGVCFRCAKCGKENSNYHSVVCHFKKCRGPETEKAPAGEWICEVCNRDFTTKIGLGQHKRLAHPAVRNQERIVASQPKETSNRGAHKRCWTKEEEELLIRLEAQFEGNKNINKLIAEHITTKTAKQISDKRRLLSRKPAEEPREEPGTCHHTRRAAASLRTEPEMSHHAQAEDRDNGPGRRPLPGRAAAGGRTMDEIRRHPDKGNGQQRPTKQKSEEQLQAYYKKTLEERLSAGALNTFPRAFKQVMEGRDIKLVINQTAQDCFGCLESISQIRTATRDKKDTVTREKHPKKPFQKWMKKRAIKKGNYLRFQRLFYLDRGKLAKIILDDIECLSCDIPLSEIYSVFKTRWETTGSFKSLGDFKTYGKADNTAFRELITAKEIEKNVQEMSKGSAPGPDGITLGDVVKMDPEFSRTMEIFNLWLTTGKIPDMVRGCRTVLIPKSSKPDRLKDINNWRPITIGSILLRLFSRIVTARLSKACPLNPRQRGFIRAAGCSENLKLLQTIIWSAKREHRPLGVVFVDIAKAFDTVSHQHIIHALQQREVDPHIVGLVSNMYENISTYITTKRNTHTDKIQIRVGVKQGDPMSPLLFNLAMDPLLCKLEESGKGYHRGQSSITAMAFADDLVLLSDSWENMNTNISILETFCNLTGLKTQGQKCHGFYIKPTKKSYTINDCAAWTINGTPLNMIDPGESEKYLGLQFDPWIGIARSGLSTKLDFWLQRIDQAPLKPLQKTDILKTYTIPRLIYIADHSEVKSALLETLDQKIRTAVKEWLHLPPCTCDAILYSSTRDGGLGITKLAGLIPSVQARRLHRIAQSSDDTMKCFMEKEKMEQLHKKLWIQAGGDRENIPSIWEAPPSSEPPNNVSTNSEWEAPTQKDKFPKPCNWRKNEFKKWTKLASQGRGIVNFERDKISNHWIQYYRRIPHRKLLTALQLRANVYPTREFLARGRQDQYIKACRHCDADNESCAHIIGNCPVTQDARIKRHNYICELLLEEAKKKDWVVFKEPHIRDSNKELYKPDLIFVKDGRALVVDVTVRYEAAKSSLEEAAAEKVRKYKHLETEVRHLTNAKDVTFVGFPLGARGKWHQDNFKLLTELGLSKSRQVKMAETFSTVALFSSVDIVRMFASRARKSMVM

SEQ ID NO: 961 - protein, 1665 aa, synthetic construct
MAPKKKRKVNISGSSCGSPNSADTSSDFKDLWTKLKECHDREVQGLQVKVTKLKQERILDAQRLEEFFTKNQQLREQQKVLHETIKVLEDRLRAGLCDRCAVTEEHMRKKQQEFENIRQQNLKLITELMNERNTLQEENKKLSEQLQQKIENDQQHQAAELECEEDVIPDSPITAFSFSGVNRLRRKENPHVRYIEQTHTKLEHSVCANEMRKVSKSSTHPQHNPNENEILVADTYDQSQSPMAKAHGTSSYTPDKSSFNLATVVAETLGLGVQEESETQGPMSPLGDELYHCLEGNHKKQPFESGSETPGTSESATPEGSPKRKVSSAEGAAKEEPKRRSARLSAKPPAKVEAKPKKAAAKDKSSDKKVQTKGKRGAKGKQAEVANQETKEDLPAENGETKTEESPASDEAGEKEAKSDSGSETPGTSESATPESYEQLAPQPCVGETLHSSLPRDSELFVPEEGSSEKESEDAPKTSPPTPGKHGLEQTGEEKVMVTVPDKNPPCPCCGTRVNSVLNLIEHLKVSHGKRGVCFRCAKCGKENSNYHSVVCHFKKCRGPETEKAPAGEWICEVCNRDFTTKIGLGQHKRLAHPAVRNQERIVASQPKETSNRGAHKRCWTKEEEELLIRLEAQFEGNKNINKLIAEHITTKTAKQISDKRRLLSRKPAEEPREEPGTCHHTRRAAASLRTEPEMSHHAQAEDRDNGPGRRPLPGRAAAGGRTMDEIRRHPDKGNGQQRPTKQKSEEQLQAYYKKTLEERLSAGALNTFPRAFKQVMEGRDIKLVINQTAQDCFGCLESISQIRTATRDKKDTVTREKHPKKPFQKWMKKRAIKKGNYLRFQRLFYLDRGKLAKIILDDIECLSCDIPLSEIYSVFKTRWETTGSFKSLGDFKTYGKADNTAFRELITAKEIEKNVQEMSKGSAPGPDGITLGDVVKMDPEFSRTMEIFNLWLTTGKIPDMVRGCRTVLIPKSSKPDRLKDINNWRPITIGSILLRLFSRIVTARLSKACPLNPRQRGFIRAAGCSENLKLLQTIIWSAKREHRPLGVVFVDIAKAFDTVSHQHIIHALQQREVDPHIVGLVSNMYENISTYITTKRNTHTDKIQIRVGVKQGDPMSPLLFNLAMDPLLCKLEESGKGYHRGQSSITAMAFADDLVLLSDSWENMNTNISILETFCNLTGLKTQGQKCHGFYIKPTKKSYTINDCAAWTINGTPLNMIDPGESEKYLGLQFDPWIGIARSGLSTKLDFWLQRIDQAPLKPLQKTDILKTYTIPRLIYIADHSEVKSALLETLDQKIRTAVKEWLHLPPCTCDAILYSSTRDGGLGITKLAGLIPSVQARRLHRIAQSSDDTMKCFMEKEKMEQLHKKLWIQAGGDRENIPSIWEAPPSSEPPNNVSTNSEWEAPTQKDKFPKPCNWRKNEFKKWTKLASQGRGIVNFERDKISNHWIQYYRRIPHRKLLTALQLRANVYPTREFLARGRQDQYIKACRHCDADNESCAHIIGNCPVTQDARIKRHNYICELLLEEAKKKDWVVFKEPHIRDSNKELYKPDLIFVKDGRALVVDVTVRYEAAKSSLEEAAAEKVRKYKHLETEVRHLTNAKDVTFVGFPLGARGKWHQDNFKLLTELGLSKSRQVKMAETFSTVALFSSVDIVHMYASRARKSMVM

SEQ ID NO: 962 - protein, 1665 aa, synthetic construct
MAPKKKRKVNISGSSCGSPNSADTSSDFKDLWTKLKECHDREVQGLQVKVTKLKQERILDAQRLEEFFTKNQQLREQQKVLHETIKVLEDRLRAGLCDRCAVTEEHMRKKQQEFENIRQQNLKLITELMNERNTLQEENKKLSEQLQQKIENDQQHQAAELECEEDVIPDSPITAFSFSGVNRLRRKENPHVRYIEQTHTKLEHSVCANEMRKVSKSSTHPQHNPNENEILVADTYDQSQSPMAKAHGTSSYTPDKSSFNLATVVAETLGLGVQEESETQGPMSPLGDELYHCLEGNHKKQPFESGSETPGTSESATPEGSPKRKVSSAEGAAKEEPKRRSARLSAKPPAKVEAKPKKAAAKDKSSDKKVQTKGKRGAKGKQAEVANQETKEDLPAENGETKTEESPASDEAGEKEAKSDSGSETPGTSESATPESYEQLAPQPCVGETLHSSLPRDSELFVPEEGSSEKESEDAPKTSPPTPGKHGLEQTGEEKVMVTVPDKNPPCPCCGTRVNSVLNLIEHLKVSHGKRGVCFRCAKCGKENSNYHSVVCHFKKCRGPETEKAPAGEWICEVCNRDFTTKIGLGQHKRLAHPAVRNQERIVASQPKETSNRGAHKRCWTKEEEELLIRLEAQFEGNKNINKLIAEHITTKTAKQISDKRRLLSRKPAEEPREEPGTCHHTRRAAASLRTEPEMSHHAQAEDRDNGPGRRPLPGRAAAGGRTMDEIRRHPDKGNGQQRPTKQKSEEQLQAYYKKTLEERLSAGALNTFPRAFKQVMEGRDIKLVINQTAQDCFGCLESISQIRTATRDKKDTVTREKHPKKPFQKWMKKRAIKKGNYLRFQRLFYLDRGKLAKIILDDIECLSCDIPLSEIYSVFKTRWETTGSFKSLGDFKTYGKADNTAFRELITAKEIEKNVQEMSKGSAPGPDGITLGDVVKMDPEFSRTMEIFNLWLTTGKIPDMVRGCRTVLIPKSSKPDRLKDINNWRPITIGSILLRLFSRIVTARLSKACPLNPRQRGFIRAAGCSENLKLLQTIIWSAKREHRPLGVVFVDIAKAFDTVSHQHIIHALQQREVDPHIVGLVSNMYENISTYITTKRNTHTDKIQIRVGVKQGDPMSPLLFNLAMDPLLCKLEESGKGYHRGQSSITAMAFADDLVLLSDSWENMNTNISILETFCNLTGLKTQGQKCHGFYIKPTKKSYTINDCAAWTINGTPLNMIDPGESEKYLGLQFDPWIGIARSGLSTKLDFWLQRIDQAPLKPLQKTDILKTYTIPRLIYIADHSEVKSALLETLDQKIRTAVKEWLHLPPCTCDAILYSSTRDGGLGITKLAGLIPSVQARRLHRIAQSSDETMKCFMEKEKMEQLHKKLWIQAGGDRENIPSIWEAPPSSEPPNNVSTNSEWEAPTQKDKFPKPCNWRKNEFKKWTKLASQGRGIVNFERDKISNHWIQYYRRIPHRKLLTALQLRANVYPTREFLARGRQDQYIKACRHCDADNESCAHIIGNCPVTQDARIKRHNYICELLLEEAKKKDWVVFKEPHIRDSNKELYKPDLIFVKDGRALVVDVTVRYEAAKSSLEEAAAEKVRKYKHLETEVRHLTNAKDVTFVGFPLGARGKWHQDNFKLLTELGLSKSRQVKMAETFSTVALFSSVDIVHMFASRARKSMVM

SEQ ID NO: 963 - protein, 1665 aa, synthetic construct
MAPKKKRKVNISGSSCGSPNSADTSSDFKDLWTKLKECHDREVQGLQVKVTKLKQERILDAQRLEEFFTKNQQLREQQKVLHETIKVLEDRLRAGLCDRCAVTEEHMRKKQQEFENIRQQNLKLITELMNERNTLQEENKKLSEQLQQKIENDQQHQAAELECEEDVIPDSPITAFSFSGVNRLRRKENPHVRYIEQTHTKLEHSVCANEMRKVSKSSTHPQHNPNENEILVADTYDQSQSPMAKAHGTSSYTPDKSSFNLATVVAETLGLGVQEESETQGPMSPLGDELYHCLEGNHKKQPFESGSETPGTSESATPEGSPKRKVSSAEGAAKEEPKRRSARLSAKPPAKVEAKPKKAAAKDKSSDKKVQTKGKRGAKGKQAEVANQETKEDLPAENGETKTEESPASDEAGEKEAKSDSGSETPGTSESATPESYEQLAPQPCVGETLHSSLPRDSELFVPEEGSSEKESEDAPKTSPPTPGKHGLEQTGEEKVMVTVPDKNPPCPCCGTRVNSVLNLIEHLKVSHGKRGVCFRCAKCGKENSNYHSVVCHFKKCRGPETEKAPAGEWICEVCNRDFTTKIGLGQHKRLAHPAVRNQERIVASQPKETSNRGAHKRCWTKEEEELLIRLEAQFEGNKNINKLIAEHITTKTAKQISDKRRLLSRKPAEEPREEPGTCHHTRRAAASLRTEPEMSHHAQAEDRDNGPGRRPLPGRAAAGGRTMDEIRRHPDKGNGQQRPTKQKSEEQLQAYYKKTLEERLSAGALNTFPRAFKQVMEGRDIKLVINQTAQDCFGCLESISQIRTATRDKKDTVTREKHPKKPFQKWMKKRAIKKGNYLRFQRLFYLDRGKLAKIILDDIECLSCDIPLSEIYSVFKTRWETTGSFKSLGDFKTYGKADNTAFRELITAKEIEKNVQEMSKGSAPGPDGITLGDVVKMDPEFSRLMEIFNLWLTTGKIPDMVRGCRTVLIPKSSKPDRLKDINNWRPITIGSILLRLFSRIVTARLSKACPLNPRQRGFIRAAGCSENLKLLQTIIWSAKREHRPLGVVFVDIAKAFDTVSHQHIIHALQQREVDPHIVGLVSNMYENISTYITTKRNTHTDKIQIRVGVKQGDPMSPLLFNLAMDPLLCKLEESGKGYHRGQSSITAMAFADDLVLLSDSWENMNTNISILETFCNLTGLKTQGQKCHGFYIKPTKKSYTINDCAAWTINGTPLNMIDPGESEKYLGLQFDPWIGIARSGLSTKLDFWLQRIDQAPLKPLQKTDILKTYTIPRLIYIADHSEVKSALLETLDQKIRTAVKEWLHLPPCTCDAILYSSTRDGGLGITKLAGLIPSVQARRLHRIAQSSDDTMKCFMEKEKMEQLHKKLWIQAGGDRENIPSIWEAPPSSEPPNNVSTNSEWEAPTQKDKFPKPCNWRKNEFKKWTKLASQGRGIVNFERDKISNHWIQYYRRIPHRKLLTALQLRANVYPTREFLARGRQDQYIKACRHCDADNESCAHIIGNCPVTQDARIKRHNYICELLLEEAKKKDWVVFKEPHIRDSNKELYKPDLIFVKDGRALVVDVTVRYEAAKSSLEEAAAEKVRKYKHLETEVRHLTNAKDVTFVGFPLGARGKWHQDNFKLLTELGLSKSRQVKMAETFSTVALFSSVDIVHMFASRARKSMVM

SEQ ID NO: 964 - protein, 1665 aa, synthetic construct
MAPKKKRKVNISGSSCGSPNSADTSSDFKDLWTKLKECHDREVQGLQVKVTKLKQERILDAQRLEEFFTKNQQLREQQKVLHETIKVLEDRLRAGLCDRCAVTEEHMRKKQQEFENIRQQNLKLITELMNERNTLQEENKKLSEQLQQKIENDQQHQAAELECEEDVIPDSPITAFSFSGVNRLRRKENPHVRYIEQTHTKLEHSVCANEMRKVSKSSTHPQHNPNENEILVADTYDQSQSPMAKAHGTSSYTPDKSSFNLATVVAETLGLGVQEESETQGPMSPLGDELYHCLEGNHKKQPFESGSETPGTSESATPEGSPKRKVSSAEGAAKEEPKRRSARLSAKPPAKVEAKPKKAAAKDKSSDKKVQTKGKRGAKGKQAEVANQETKEDLPAENGETKTEESPASDEAGEKEAKSDSGSETPGTSESATPESYEQLAPQPCVGETLHSSLPRDSELFVPEEGSSEKESEDAPKTSPPTPGKHGLEQTGEEKVMVTVPDKNPPCPCCGTRVNSVLNLIEHLKVSHGKRGVCFRCAKCGKENSNYHSVVCHFKKCRGPETEKAPAGEWICEVCNRDFTTKIGLGQHKRLAHPAVRNQERIVASQPKETSNRGAHKRCWTKEEEELLIRLEAQFEGNKNINKLIAEHITTKTAKQISDKRRLLSRKPAEEPREEPGTCHHTRRAAASLRTEPEMSHHAQAEDRDNGPGRRPLPGRAAAGGRTMDEIRRHPDKGNGQQRPTKQKSEEQLQAYYKKTLEERLSAGALNTFPRAFKQVMEGRDIKLVINQTAQDCFGCLESISQIRTATRDKKDTVTREKHPKKPFQKWMKKRAIKKGNYLRFQRLFYLDRGKLAKIILDDIECLSCDIPLSEIYSVFKTRWETTGSFKSLGDFKTYGKADNTAFRELITAKEIEKNVQEMSKGSAPGPDGITLGDVVKMDPEFSRTMEIFNLWLTTGKIPDMVRGCRTVLIPKSSKPDRLKDINNWRPITIGSILLRLFSRIVTARLSKACPLNPRQRGFIRAAGCSENLKLLQTIIWSAKREHRPLGVVFVDIAKAFDTVSHQHIIHALQQREVDPHIVGLVSNMYENISTYITTKRNTHTDKIQIRVGVKQGDPMSPLLFNLAMDPLLCKLEESGKGYHRGQSSITAMAFADDLVLLSDSWENMNTNISILETFCNLTGLKTQGQKCHGFYIKPTKKSYTINDCAAWTINGTPLNMIDPGESEKYLGLQFDPWIGIARSGLSTKLRFWLQRIDQAPLKPLQKTDILKTYTIPRLIYIADHSEVKSALLETLDQKIRTAVKEWLHLPPCTCDAILYSSTRDGGLGITKLAGLIPSVQARRLHRIAQSSDDTMKCFMEKEKMEQLHKKLWIQAGGDRENIPSIWEAPPSSEPPNNVSTNSEWEAPTQKDKFPKPCNWRKNEFKKWTKLASQGRGIVNFERDKISNHWIQYYRRIPHRKLLTALQLRANVYPTREFLARGRQDQYIKACRHCDADNESCAHIIGNCPVTQDARIKRHNYICELLLEEAKKKDWVVFKEPHIRDSNKELYKPDLIFVKDGRALVVDVTVRYEAAKSSLEEAAAEKVRKYKHLETEVRHLTNAKDVTFVGFPLGARGKWHQDNFKLLTELGLSKSRQVKMAETFSTVALFSSVDIVHMFASRARKSMVM

SEQ ID NO: 965 - protein, 1665 aa, synthetic construct
MAPKKKRKVNISGSSCGSPNSADTSSDFKDLWTKLKECHDREVQGLQVKVTKLKQERILDAQRLEEFFTKNQQLREQQKVLHETIKVLEDRLRAGLCDRCAVTEEHMRKKQQEFENIRQQNLKLITELMNERNTLQEENKKLSEQLQQKIENDQQHQAAELECEEDVIPDSPITAFSFSGVNRLRRKENPHVRYIEQTHTKLEHSVCANEMRKVSKSSTHPQHNPNENEILVADTYDQSQSPMAKAHGTSSYTPDKSSFNLATVVAETLGLGVQEESETQGPMSPLGDELYHCLEGNHKKQPFESGSETPGTSESATPEGSPKRKVSSAEGAAKEEPKRRSARLSAKPPAKVEAKPKKAAAKDKSSDKKVQTKGKRGAKGKQAEVANQETKEDLPAENGETKTEESPASDEAGEKEAKSDSGSETPGTSESATPESYEQLAPQPCVGETLHSSLPRDSELFVPEEGSSEKESEDAPKTSPPTPGKHGLEQTGEEKVMVTVPDKNPPCPCCGTRVNSVLNLIEHLKVSHGKRGVCFRCAKCGKENSNYHSVVCHFKKCRGPETEKAPAGEWICEVCNRDFTTKIGLGQHKRLAHPAVRNQERIVASQPKETSNRGAHKRCWTKEEEELLIRLEAQFEGNKNINKLIAEHITTKTAKQISDKRRLLSRKPAEEPREEPGTCHHTRRAAASLRTEPEMSHHAQAEDRDNGPGRRPLPGRAAAGGRTMDEIRRHPDKGNGQQRPTKQKSEEQLQAYYKKTLEERLSAGALNTFPRAFKQVMEGRDIKLVINQTAQDCFGCLESISQIRTATRDKKDTVTREKHPKKPFQKWMKKRAIKKGNYLRFQRLFYLDRGKLAKIILDDIECLSCDIPLSEIYSVFKTRWETTGSFKSLGDFKTYGKADNTAFRELITAKEIEKNVQEMSKGSAPGPDGITLGDVVKMDPEFSRTMEIFNLWLTTGKIPDMVRGCRTVLIPKSSKPDRLKDINNWRPITIGSILLRLFSRIVTARLSKACPLNPRQRGFIRAAGCSENLKLLQTIIWSAKREHRPLGVVFVDIAKAFDTVSHQHIIHALQQREVDPHIVGLVSNMYENISTYITTKRNTHTDKIQIRVGVKQGDPMSPLLFNLAMDPLLCKLEESGKGYHRGQSSITAMAFADDLVLLSDSWENMNTNISILETFCNLTGLKTQGQKCHGFYIKPTKKSYTINDCAAWTINGTPLNMIDPGESEKYLGLQFDPWIGIARSGLSTKLDFWLQRIDQAPLKPLQKTDILKTYTIPRLIYIADHSEVKSALLETLDQKIRTAVKEYLHLPPCTCDAILYSSTRDGGLGITKLAGLIPSVQARRLHRIAQSSDDTMKCFMEKEKMEQLHKKLWIQAGGDRENIPSIWEAPPSSEPPNNVSTNSEWEAPTQKDKFPKPCNWRKNEFKKWTKLASQGRGIVNFERDKISNHWIQYYRRIPHRKLLTALQLRANVYPTREFLARGRQDQYIKACRHCDADNESCAHIIGNCPVTQDARIKRHNYICELLLEEAKKKDWVVFKEPHIRDSNKELYKPDLIFVKDGRALVVDVTVRYEAAKSSLEEAAAEKVRKYKHLETEVRHLTNAKDVTFVGFPLGARGKWHQDNFKLLTELGLSKSRQVKMAETFSTVALFSSVDIVHMFASRARKSMVM

SEQ ID NO: 966 - protein, 1665 aa, synthetic construct
MAPKKKRKVNISGSSCGSPNSADTSSDFKDLWTKLKECHDREVQGLQVKVTKLKQERILDAQRLEEFFTKNQQLREQQKVLHETIKVLEDRLRAGLCDRCAVTEEHMRKKQQEFENIRQQNLKLITELMNERNTLQEENKKLSEQLQQKIENDQQHQAAELECEEDVIPDSPITAFSFSGVNRLRRKENPHVRYIEQTHTKLEHSVCANEMRKVSKSSTHPQHNPNENEILVADTYDQSQSPMAKAHGTSSYTPDKSSFNLATVVAETLGLGVQEESETQGPMSPLGDELYHCLEGNHKKQPFESGSETPGTSESATPEGSPKRKVSSAEGAAKEEPKRRSARLSAKPPAKVEAKPKKAAAKDKSSDKKVQTKGKRGAKGKQAEVANQETKEDLPAENGETKTEESPASDEAGEKEAKSDSGSETPGTSESATPESYEQLAPQPCVGETLHSSLPRDSELFVPEEGSSEKESEDAPKTSPPTPGKHGLEQTGEEKVMVTVPDKNPPCPCCGTRVNSVLNLIEHLKVSHGKRGVCFRCAKCGKENSNYHSVVCHFKKCRGPETEKAPAGEWICEVCNRDFTTKIGLGQHKRLAHPAVRNQERIVASQPKETSNRGAHKRCWTKEEEELLIRLEAQFEGNKNINKLIAEHITTKTAKQISDKRRLLSRKPAEEPREEPGTCHHTRRAAASLRTEPEMSHHAQAEDRDNGPGRRPLPGRAAAGGRTMDEIRRHPDKGNGQQRPTKQKSEEQLQAYYKKTLEERLSAGALNTFPRAFKQVMEGRDIKLVINQTAQDCFGCLESISQIRTATRDKKDTVTREKHPKKPFQKWMKKRAIKKGNYLRFQRLFYLDRGKLAKIILDDIECLSCDIPLSEIYSVFKTRWETTGSFKSLGDFKTYGKADNTAFRELITAKEIEKNVQRMSKGSAPGPDGITLGDVVKMDPEFSRTMEIFNLWLTTGKIPDMVRGCRTVLIPKSSKPDRLKDINNWRPITIGSILLRLFSRIVTARLSKACPLNPRQRGFIRAAGCSENLKLLQTIIWSAKREHRPLGVVFVDIAKAFDTVSHQHIIHALQQREVDPHIVGLVSNMYENISTYITTKRNTHTDKIQIRVGVKQGDPMSPLLFNLAMDPLLCKLEESGKGYHRGQSSITAMAFADDLVLLSDSWENMNTNISILETFCNLTGLKTQGQKCHGFYIKPTKKSYTINDCAAWTINGTPLNMIDPGESEKYLGLQFDPWIGIARSGLSTKLDFWLQRIDQAPLKPLQKTDILKTYTIPRLIYIADHSEVKSALLETLDQKIRTAVKEWLHLPPCTCDAILYSSTRDGGLGITKLAGLIPSVQARRLHRIAQSSDDTMKCFMEKEKMEQLHKKLWIQAGGDRENIPSIWEAPPSSEPPNNVSTNSEWEAPTQKDKFPKPCNWRKNEFKKWTKLASQGRGIVNFERDKISNHWIQYYRRIPHRKLLTALQLRANVYPTREFLARGRQDQYIKACRHCDADNESCAHIIGNCPVTQDARIKRHNYICELLLEEAKKKDWVVFKEPHIRDSNKELYKPDLIFVKDGRALVVDVTVRYEAAKSSLEEAAAEKVRKYKHLETEVRHLTNAKDVTFVGFPLGARGKWHQDNFKLLTELGLSKSRQVKMAETFSTVALFSSVDIVHMFASRARKSMVM

SEQ ID NO: 967 - protein, 1665 aa, synthetic construct
MAPKKKRKVNISGSSCGSPNSADTSSDFKDLWTKLKECHDREVQGLQVKVTKLKQERILDAQRLEEFFTKNQQLREQQKVLHETIKVLEDRLRAGLCDRCAVTEEHMRKKQQEFENIRQQNLKLITELMNERNTLQEENKKLSEQLQQKIENDQQHQAAELECEEDVIPDSPITAFSFSGVNRLRRKENPHVRYIEQTHTKLEHSVCANEMRKVSKSSTHPQHNPNENEILVADTYDQSQSPMAKAHGTSSYTPDKSSFNLATVVAETLGLGVQEESETQGPMSPLGDELYHCLEGNHKKQPFESGSETPGTSESATPEGSPKRKVSSAEGAAKEEPKRRSARLSAKPPAKVEAKPKKAAAKDKSSDKKVQTKGKRGAKGKQAEVANQETKEDLPAENGETKTEESPASDEAGEKEAKSDSGSETPGTSESATPESYEQLAPQPCVGETLHSSLPRDSELFVPEEGSSEKESEDAPKTSPPTPGKHGLEQTGEEKVMVTVPDKNPPCPCCGTRVNSVLNLIEHLKVSHGKRGVCFRCAKCGKENSNYHSVVCHFKKCRGPETEKAPAGEWICEVCNRDFTTKIGLGQHKRLAHPAVRNQERIVASQPKETSNRGAHKRCWTKEEEELLIRLEAQFEGNKNINKLIAEHITTKTAKQISDKRRLLSRKPAEEPREEPGTCHHTRRAAASLRTEPEMSHHAQAEDRDNGPGRRPLPGRAAAGGRTMDEIRRHPDKGNGQQRPTKQKSEEQLQAYYKKTLEERLSAGALNTFPRAFKQVMEGRDIKLVINQTAQDCFGCLESISQIRTATRDKKDTVTREKHPKKPFQKWMKKRAIKKGNYLRFQRLFYLDRGKLAKIILDDIECLSCDIPLSEIYSVFKTRWETTGSFKSLGDFKTYGKADNTAFRELITAKEIEKNVQEMSKGSAPGPDGITLGDVVKMDPEFSRTMEIFNLWLTTGKIPDMVRGCRTVLIPKSSKPDRLKDINNWRPITIGSILLRLFSRIVTARLSKACPLNPRQRGFIRAAGCSENLKLLQTIIWSAKREHRPLGVVFVDIAKAFDTVSHQHIIHALQQREVDPHIVGLVSNMYENISTYITTKRNTHTDKIQIRVGVKQGDPMSPLLFNLAMDPLLCKLEESGKGYHRGQSSITAMAFADDLVLLSDSWENMNTNISILETFCNLTGLKTQGQKCHGFYIKPTKKSYTINDCAAWTINGTPLNMIDPGESEKYLGLQFDPWIGIARSGLSTKLDFWLQRIDQAPLKPLQKTDILKWYTIPRLIYIADHSEVKSALLETLDQKIRTAVKEWLHLPPCTCDAILYSSTRDGGLGITKLAGLIPSVQARRLHRIAQSSDDTMKCFMEKEKMEQLHKKLWIQAGGDRENIPSIWEAPPSSEPPNNVSTNSEWEAPTQKDKFPKPCNWRKNEFKKWTKLASQGRGIVNFERDKISNHWIQYYRRIPHRKLLTALQLRANVYPTREFLARGRQDQYIKACRHCDADNESCAHIIGNCPVTQDARIKRHNYICELLLEEAKKKDWVVFKEPHIRDSNKELYKPDLIFVKDGRALVVDVTVRYEAAKSSLEEAAAEKVRKYKHLETEVRHLTNAKDVTFVGFPLGARGKWHQDNFKLLTELGLSKSRQVKMAETFSTVALFSSVDIVHMFASRARKSMVM

SEQ ID NO: 968 - protein, 1665 aa, synthetic construct
MAPKKKRKVNISGSSCGSPNSADTSSDFKDLWTKLKECHDREVQGLQVKVTKLKQERILDAQRLEEFFTKNQQLREQQKVLHETIKVLEDRLRAGLCDRCAVTEEHMRKKQQEFENIRQQNLKLITELMNERNTLQEENKKLSEQLQQKIENDQQHQAAELECEEDVIPDSPITAFSFSGVNRLRRKENPHVRYIEQTHTKLEHSVCANEMRKVSKSSTHPQHNPNENEILVADTYDQSQSPMAKAHGTSSYTPDKSSFNLATVVAETLGLGVQEESETQGPMSPLGDELYHCLEGNHKKQPFESGSETPGTSESATPEGSPKRKVSSAEGAAKEEPKRRSARLSAKPPAKVEAKPKKAAAKDKSSDKKVQTKGKRGAKGKQAEVANQETKEDLPAENGETKTEESPASDEAGEKEAKSDSGSETPGTSESATPESYEQLAPQPCVGETLHSSLPRDSELFVPEEGSSEKESEDAPKTSPPTPGKHGLEQTGEEKVMVTVPDKNPPCPCCGTRVNSVLNLIEHLKVSHGKRGVCFRCAKCGKENSNYHSVVCHFKKCRGPETEKAPAGEWICEVCNRDFTTKIGLGQHKRLAHPAVRNQERIVASQPKETSNRGAHKRCWTKEEEELLIRLEAQFEGNKNINKLIAEHITTKTAKQISDKRRLLSRKPAEEPREEPGTCHHTRRAAASLRTEPEMSHHAQAEDRDNGPGRRPLPGRAAAGGRTMDEIRRHPDKGNGQQRPTKQKSEEQLQAYYKKTLEERLSAGALNTFPRAFKQVMEGRDIKLVINQTAQDCFGCLESISQIRTATRDKKDTVTREKHPKKPFQKWMKKRAIKKGNYLRFQRLFYLDRGKLAKIILDDIECLSCDIPLSEIYSVFKTRWETTGSFKSLGDFKTYGKADNTAFRELITAKEIEKNVQEMSKGSAPGPDGITLGDVVKMDPEFSRTMEIFNLWLTTGKIPDMVRGCRTVLIPKSSKPDRLKDINNWRPITIGSILLRLFSRIVTARLSKACPLNPRQRGFIRAAGCSENLKLLQTIIWSAKREHRPLGVVFVDIAKAFDTVSHQHIIHALQQREVDPHIVGLVSNMYENISTYITTKRNTHTDKIQIRVGVKQGDPMSPLLFNLAMDPLLCKLEESGKGYHRGQSSITAMAFARDLVLLSDSWENMNTNISILETFCNLTGLKTQGQKCHGFYIKPTKKSYTINDCAAWTINGTPLNMIDPGESEKYLGLQFDPWIGIARSGLSTKLDFWLQRIDQAPLKPLQKTDILKTYTIPRLIYIADHSEVKSALLETLDQKIRTAVKEWLHLPPCTCDAILYSSTRDGGLGITKLAGLIPSVQARRLHRIAQSSDDTMKCFMEKEKMEQLHKKLWIQAGGDRENIPSIWEAPPSSEPPNNVSTNSEWEAPTQKDKFPKPCNWRKNEFKKWTKLASQGRGIVNFERDKISNHWIQYYRRIPHRKLLTALQLRANVYPTREFLARGRQDQYIKACRHCDADNESCAHIIGNCPVTQDARIKRHNYICELLLEEAKKKDWVVFKEPHIRDSNKELYKPDLIFVKDGRALVVDVTVRYEAAKSSLEEAAAEKVRKYKHLETEVRHLTNAKDVTFVGFPLGARGKWHQDNFKLLTELGLSKSRQVKMAETFSTVALFSSVDIVHMFASRARKSMVM

SEQ ID NO: 969 - protein, 1665 aa, synthetic construct
MAPKKKRKVNISGSSCGSPNSADTSSDFKDLWTKLKECHDREVQGLQVKVTKLKQERILDAQRLEEFFTKNQQLREQQKVLHETIKVLEDRLRAGLCDRCAVTEEHMRKKQQEFENIRQQNLKLITELMNERNTLQEENKKLSEQLQQKIENDQQHQAAELECEEDVIPDSPITAFSFSGVNRLRRKENPHVRYIEQTHTKLEHSVCANEMRKVSKSSTHPQHNPNENEILVADTYDQSQSPMAKAHGTSSYTPDKSSFNLATVVAETLGLGVQEESETQGPMSPLGDELYHCLEGNHKKQPFESGSETPGTSESATPEGSPKRKVSSAEGAAKEEPKRRSARLSAKPPAKVEAKPKKAAAKDKSSDKKVQTKGKRGAKGKQAEVANQETKEDLPAENGETKTEESPASDEAGEKEAKSDSGSETPGTSESATPESYEQLAPQPCVGETLHSSLPRDSELFVPEEGSSEKESEDAPKTSPPTPGKHGLEQTGEEKVMVTVPDKNPPCPCCGTRVNSVLNLIEHLKVSHGKRGVCFRCAKCGKENSNYHSVVCHFKKCRGPETEKAPAGEWICEVCNRDFTTKIGLGQHKRLAHPAVRNQERIVASQPKETSNRGAHKRCWTKEEEELLIRLEAQFEGNKNINKLIAEHITTKTAKQISDKRRLLSRKPAEEPREEPGTCHHTRRAAASLRTEPEMSHHAQAEDRDNGPGRRPLPGRAAAGGRTMDEIRRHPDKGNGQQRPTKQKSEEQLQAYYKKTLEERLSAGALNTFPRAFKQVMEGRDIKLVINQTAQDCFGCLESISQIRTATRDKKDTVTREKHPKKPFQKWMKKRAIKKGNYLRFQRLFYLDRGKLKKIILDDIECLSCDIPLSEIYSVFKTRWETTGSFKSLGDFKTYGKADNTAFRELITAKEIEKNVQEMSKGSAPGPDGITLGDVVKMDPEFSRTMEIFNLWLTTGKIPDMVRGCRTVLIPKSSKPDRLKDINNWRPITIGSILLRLFSRIVTARLSKACPLNPRQRGFIRAAGCSENLKLLQTIIWSAKREHRPLGVVFVDIAKAFDTVSHQHIIHALQQREVDPHIVGLVSNMYENISTYITTKRNTHTDKIQIRVGVKQGDPMSPLLFNLAMDPLLCKLEESGKGYHRGQSSITAMAFADDLVLLSDSWENMNTNISILETFCNLTGLKTQGQKCHGFYIKPTKKSYTINDCAAWTINGTPLNMIDPGESEKYLGLQFDPWIGIARSGLSTKLDFWLQRIDQAPLKPLQKTDILKTYTIPRLIYIADHSEVKSALLETLDQKIRTAVKEWLHLPPCTCDAILYSSTRDGGLGITKLAGLIPSVQARRLHRIAQSSDDTMKCFMEKEKMEQLHKKLWIQAGGDRENIPSIWEAPPSSEPPNNVSTNSEWEAPTQKDKFPKPCNWRKNEFKKWTKLASQGRGIVNFERDKISNHWIQYYRRIPHRKLLTALQLRANVYPTREFLARGRQDQYIKACRHCDADNESCAHIIGNCPVTQDARIKRHNYICELLLEEAKKKDWVVFKEPHIRDSNKELYKPDLIFVKDGRALVVDVTVRYEAAKSSLEEAAAEKVRKYKHLETEVRHLTNAKDVTFVGFPLGARGKWHQDNFKLLTELGLSKSRQVKMAETFSTVALFSSVDIVHMFASRARKSMVM

SEQ ID NO: 970 - protein, 1665 aa, synthetic construct
MAPKKKRKVNISGSSCGSPNSADTSSDFKDLWTKLKECHDREVQGLQVKVTKLKQERILDAQRLEEFFTKNQQLREQQKVLHETIKVLEDRLRAGLCDRCAVTEEHMRKKQQEFENIRQQNLKLITELMNERNTLQEENKKLSEQLQQKIENDQQHQAAELECEEDVIPDSPITAFSFSGVNRLRRKENPHVRYIEQTHTKLEHSVCANEMRKVSKSSTHPQHNPNENEILVADTYDQSQSPMAKAHGTSSYTPDKSSFNLATVVAETLGLGVQEESETQGPMSPLGDELYHCLEGNHKKQPFESGSETPGTSESATPEGSPKRKVSSAEGAAKEEPKRRSARLSAKPPAKVEAKPKKAAAKDKSSDKKVQTKGKRGAKGKQAEVANQETKEDLPAENGETKTEESPASDEAGEKEAKSDSGSETPGTSESATPESYEQLAPQPCVGETLHSSLPRDSELFVPEEGSSEKESEDAPKTSPPTPGKHGLEQTGEEKVMVTVPDKNPPCPCCGTRVNSVLNLIEHLKVSHGKRGVCFRCAKCGKENSNYHSVVCHFKKCRGPETEKAPAGEWICEVCNRDFTTKIGLGQHKRLAHPAVRNQERIVASQPKETSNRGAHKRCWTKEEEELLIRLEAQFEGNKNINKLLAEHITTKTAKQISDKRRLLSRKPAEEPREEPGTCHHTRRAAASLRTEPEMSHHAQAEDRDNGPGRRPLPGRAAAGGRTMDEIRRHPDKGNGQQRPTKQKSEEQLQAYYKKTLEERLSAGALNTFPRAFKQVMEGRDIKLVINQTAQDCFGCLESISQIRTATRDKKDTVTREKHPKKPFQKWMKKRAIKKGNYLRFQRLFYLDRGKLAKIILDDIECLSCDIPLSEIYSVFKTRWETTGSFKSLGDFKTYGKADNTAFRELITAKEIEKNVQEMSKGSAPGPDGITLGDVVKMDPEFSRTMEIFNLWLTTGKIPDMVRGCRTVLIPKSSKPDRLKDINNWRPITIGSILLRLFSRIVTARLSKACPLNPRQRGFIRAAGCSENLKLLQTIIWSAKREHRPLGVVFVDIAKAFDTVSHQHIIHALQQREVDPHIVGLVSNMYENISTYITTKRNTHTDKIQIRVGVKQGDPMSPLLFNLAMDPLLCKLEESGKGYHRGQSSITAMAFADDLVLLSDSWENMNTNISILETFCNLTGLKTQGQKCHGFYIKPTKKSYTINDCAAWTINGTPLNMIDPGESEKYLGLQFDPWIGIARSGLSTKLDFWLQRIDQAPLKPLQKTDILKTYTIPRLIYIADHSEVKSALLETLDQKIRTAVKEWLHLPPCTCDAILYSSTRDGGLGITKLAGLIPSVQARRLHRIAQSSDDTMKCFMEKEKMEQLHKKLWIQAGGDRENIPSIWEAPPSSEPPNNVSTNSEWEAPTQKDKFPKPCNWRKNEFKKWTKLASQGRGIVNFERDKISNHWIQYYRRIPHRKLLTALQLRANVYPTREFLARGRQDQYIKACRHCDADNESCAHIIGNCPVTQDARIKRHNYICELLLEEAKKKDWVVFKEPHIRDSNKELYKPDLIFVKDGRALVVDVTVRYEAAKSSLEEAAAEKVRKYKHLETEVRHLTNAKDVTFVGFPLGARGKWHQDNFKLLTELGLSKSRQVKMAETFSTVALFSSVDIVHMFASRARKSMVM

SEQ ID NO: 971 - protein, 1665 aa, synthetic construct
MAPKKKRKVNISGSSCGSPNSADTSSDFKDLWTKLKECHDREVQGLQVKVTKLKQERILDAQRLEEFFTKNQQLREQQKVLHETIKVLEDRLRAGLCDRCAVTEEHMRKKQQEFENIRQQNLKLITELMNERNTLQEENKKLSEQLQQKIENDQQHQAAELECEEDVIPDSPITAFSFSGVNRLRRKENPHVRYIEQTHTKLEHSVCANEMRKVSKSSTHPQHNPNENEILVADTYDQSQSPMAKAHGTSSYTPDKSSFNLATVVAETLGLGVQEESETQGPMSPLGDELYHCLEGNHKKQPFESGSETPGTSESATPEGSPKRKVSSAEGAAKEEPKRRSARLSAKPPAKVEAKPKKAAAKDKSSDKKVQTKGKRGAKGKQAEVANQETKEDLPAENGETKTEESPASDEAGEKEAKSDSGSETPGTSESATPESYEQLAPQPCVGETLHSSLPRDSELFVPEEGSSEKESEDAPKTSPPTPGKHGLEQTGEEKVMVTVPDKNPPCPCCGTRVNSVLNLIEHLKVSHGKRGVCFRCAKCGKENSNYHSVVCHFKKCRGPETEKAPAGEWICEVCNRDFTTKIGLGQHKRLAHPAVRNQERIVASQPKETSNRGAHKRCWTKEEEELLIRLEAQFEGNKNINKLIAEHLTTKTAKQISDKRRLLSRKPAEEPREEPGTCHHTRRAAASLRTEPEMSHHAQAEDRDNGPGRRPLPGRAAAGGRTMDEIRRHPDKGNGQQRPTKQKSEEQLQAYYKKTLEERLSAGALNTFPRAFKQVMEGRDIKLVINQTAQDCFGCLESISQIRTATRDKKDTVTREKHPKKPFQKWMKKRAIKKGNYLRFQRLFYLDRGKLAKIILDDIECLSCDIPLSEIYSVFKTRWETTGSFKSLGDFKTYGKADNTAFRELITAKEIEKNVQEMSKGSAPGPDGITLGDVVKMDPEFSRTMEIFNLWLTTGKIPDMVRGCRTVLIPKSSKPDRLKDINNWRPITIGSILLRLFSRIVTARLSKACPLNPRQRGFIRAAGCSENLKLLQTIIWSAKREHRPLGVVFVDIAKAFDTVSHQHIIHALQQREVDPHIVGLVSNMYENISTYITTKRNTHTDKIQIRVGVKQGDPMSPLLFNLAMDPLLCKLEESGKGYHRGQSSITAMAFADDLVLLSDSWENMNTNISILETFCNLTGLKTQGQKCHGFYIKPTKKSYTINDCAAWTINGTPLNMIDPGESEKYLGLQFDPWIGIARSGLSTKLDFWLQRIDQAPLKPLQKTDILKTYTIPRLIYIADHSEVKSALLETLDQKIRTAVKEWLHLPPCTCDAILYSSTRDGGLGITKLAGLIPSVQARRLHRIAQSSDDTMKCFMEKEKMEQLHKKLWIQAGGDRENIPSIWEAPPSSEPPNNVSTNSEWEAPTQKDKFPKPCNWRKNEFKKWTKLASQGRGIVNFERDKISNHWIQYYRRIPHRKLLTALQLRANVYPTREFLARGRQDQYIKACRHCDADNESCAHIIGNCPVTQDARIKRHNYICELLLEEAKKKDWVVFKEPHIRDSNKELYKPDLIFVKDGRALVVDVTVRYEAAKSSLEEAAAEKVRKYKHLETEVRHLTNAKDVTFVGFPLGARGKWHQDNFKLLTELGLSKSRQVKMAETFSTVALFSSVDIVHMFASRARKSMVM

SEQ ID NO: 972 - protein, 1665 aa, synthetic construct
MAPKKKRKVNISGSSCGSPNSADTSSDFKDLWTKLKECHDREVQGLQVKVTKLKQERILDAQRLEEFFTKNQQLREQQKVLHETIKVLEDRLRAGLCDRCAVTEEHMRKKQQEFENIRQQNLKLITELMNERNTLQEENKKLSEQLQQKIENDQQHQAAELECEEDVIPDSPITAFSFSGVNRLRRKENPHVRYIEQTHTKLEHSVCANEMRKVSKSSTHPQHNPNENEILVADTYDQSQSPMAKAHGTSSYTPDKSSFNLATVVAETLGLGVQEESETQGPMSPLGDELYHCLEGNHKKQPFESGSETPGTSESATPEGSPKRKVSSAEGAAKEEPKRRSARLSAKPPAKVEAKPKKAAAKDKSSDKKVQTKGKRGAKGKQAEVANQETKEDLPAENGETKTEESPASDEAGEKEAKSDSGSETPGTSESATPESYEQLAPQPCVGETLHSSLPRDSELFVPEEGSSEKESEDAPKTSPPTPGKHGLEQTGEEKVMVTVPDKNPPCPCCGTRVNSVLNLIEHLKVSHGKRGVCFRCAKCGKENSNYHSVVCHFKKCRGPETEKAPAGEWICEVCNRDFTTKIGLGQHKRLAHPAVRNQERIVASQPKETSNRGAHKRCWTKEEEELLIRLEAQFEGNKNINKLIAEHITTKTAKQISDKRRLLSRKPAEEPREEPGTCHHTRRAAASLRTEPEMSHHAQAEDRDNGPGRRPLPGRAAAGGRTMDEIRRHPDKGNGQQRPTKQKSEEQLQAYYKKTLEERLSAGALNTFPRAFKQVMEGRDIKLVINQTAQDCFGCLESISQIRTATRDKKDTVTREKHPKKPFQKWMKKRAIKKGNYLRFQRLYYLDRGKLAKIILDDIECLSCDIPLSEIYSVFKTRWETTGSFKSLGDFKTYGKADNTAFRELITAKEIEKNVQEMSKGSAPGPDGITLGDVVKMDPEFSRTMEIFNLWLTTGKIPDMVRGCRTVLIPKSSKPDRLKDINNWRPITIGSILLRLFSRIVTARLSKACPLNPRQRGFIRAAGCSENLKLLQTIIWSAKREHRPLGVVFVDIAKAFDTVSHQHIIHALQQREVDPHIVGLVSNMYENISTYITTKRNTHTDKIQIRVGVKQGDPMSPLLFNLAMDPLLCKLEESGKGYHRGQSSITAMAFADDLVLLSDSWENMNTNISILETFCNLTGLKTQGQKCHGFYIKPTKKSYTINDCAAWTINGTPLNMIDPGESEKYLGLQFDPWIGIARSGLSTKLDFWLQRIDQAPLKPLQKTDILKTYTIPRLIYIADHSEVKSALLETLDQKIRTAVKEWLHLPPCTCDAILYSSTRDGGLGITKLAGLIPSVQARRLHRIAQSSDDTMKCFMEKEKMEQLHKKLWIQAGGDRENIPSIWEAPPSSEPPNNVSTNSEWEAPTQKDKFPKPCNWRKNEFKKWTKLASQGRGIVNFERDKISNHWIQYYRRIPHRKLLTALQLRANVYPTREFLARGRQDQYIKACRHCDADNESCAHIIGNCPVTQDARIKRHNYICELLLEEAKKKDWVVFKEPHIRDSNKELYKPDLIFVKDGRALVVDVTVRYEAAKSSLEEAAAEKVRKYKHLETEVRHLTNAKDVTFVGFPLGARGKWHQDNFKLLTELGLSKSRQVKMAETFSTVALFSSVDIVHMFASRARKSMVM

SEQ ID NO: 973 - skipped

SEQ ID NO: 974 - protein, 1665 aa, synthetic construct
MAPKKKRKVNISGSSCGSPNSADTSSDFKDLWTKLKECHDREVQGLQVKVTKLKQERILDAQRLEEFFTKNQQLREQQKVLHETIKVLEDRLRAGLCDRCAVTEEHMRKKQQEFENIRQQNLKLITELMNERNTLQEENKKLSEQLQQKIENDQQHQAAELECEEDVIPDSPITAFSFSGVNRLRRKENPHVRYIEQTHTKLEHSVCANEMRKVSKSSTHPQHNPNENEILVADTYDQSQSPMAKAHGTSSYTPDKSSFNLATVVAETLGLGVQEESETQGPMSPLGDELYHCLEGNHKKQPFESGSETPGTSESATPEGSPKRKVSSAEGAAKEEPKRRSARLSAKPPAKVEAKPKKAAAKDKSSDKKVQTKGKRGAKGKQAEVANQETKEDLPAENGETKTEESPASDEAGEKEAKSDSGSETPGTSESATPESYEQLAPQPCVGETLHSSLPRDSELFVPEEGSSEKESEDAPKTSPPTPGKHGLEQTGEEKVMVTVPDKNPPCPCCGTRVNSVLNLIEHLKVSHGKRGVCFRCAKCGKENSNYHSVVCHFKKCRGPETEKAPAGEWICEVCNRDFTTKIGLGQHKRLAHPAVRNQERIVASQPKETSNRGAHKRCWTKEEEELLIRLEAQFEGNKNINKLIAEHITTKTAKQISDKRRLLSRKPAEEPREEPGTCHHTRRAAASLRTEPEMSHHAQAEDRDNGPGRRPLPGRAAAGGRTMDEIRRHPDKGNGQQRPTKQKSEEQLQAYYKKTLEERLSAGALNTFPRAFKQVMEGRDIKLVINQTAQDCFGCLESISQIRTATRDKKDTVTREKHPKKPFQKWMKKRAIKKGNYLRFQRLFYLDRGKLAKIILDDIECLSCDIPLSEIYSVFKTRWETTGSFKSLGDFKTYGKADNTAFRELITAKEIEKNVQEMSKGSAPGPDGITLGDVVKMDPEFSRTMEIFNLWLTTGKIPDMLRGCRTVLIPKSSKPDRLKDINNWRPITIGSILLRLFSRIVTARLSKACPLNPRQRGFIRAAGCSENLKLLQTIIWSAKREHRPLGVVFVDIAKAFDTVSHQHIIHALQQREVDPHIVGLVSNMYENISTYITTKRNTHTDKIQIRVGVKQGDPMSPLLFNLAMDPLLCKLEESGKGYHRGQSSITAMAFADDLVLLSDSWENMNTNISILETFCNLTGLKTQGQKCHGFYIKPTKKSYTINDCAAWTINGTPLNMIDPGESEKYLGLQFDPWIGIARSGLSTKLDFWLQRIDQAPLKPLQKTDILKTYTIPRLIYIADHSEVKSALLETLDQKIRTAVKEWLHLPPCTCDAILYSSTRDGGLGITKLAGLIPSVQARRLHRIAQSSDDTMKCFMEKEKMEQLHKKLWIQAGGDRENIPSIWEAPPSSEPPNNVSTNSEWEAPTQKDKFPKPCNWRKNEFKKWTKLASQGRGIVNFERDKISNHWIQYYRRIPHRKLLTALQLRANVYPTREFLARGRQDQYIKACRHCDADNESCAHIIGNCPVTQDARIKRHNYICELLLEEAKKKDWVVFKEPHIRDSNKELYKPDLIFVKDGRALVVDVTVRYEAAKSSLEEAAAEKVRKYKHLETEVRHLTNAKDVTFVGFPLGARGKWHQDNFKLLTELGLSKSRQVKMAETFSTVALFSSVDIVHMFASRARKSMVM

SEQ ID NO: 975 - protein, 1665 aa, synthetic construct
MAPKKKRKVNISGSSCGSPNSADTSSDFKDLWTKLKECHDREVQGLQVKVTKLKQERILDAQRLEEFFTKNQQLREQQKVLHETIKVLEDRLRAGLCDRCAVTEEHMRKKQQEFENIRQQNLKLITELMNERNTLQEENKKLSEQLQQKIENDQQHQAAELECEEDVIPDSPITAFSFSGVNRLRRKENPHVRYIEQTHTKLEHSVCANEMRKVSKSSTHPQHNPNENEILVADTYDQSQSPMAKAHGTSSYTPDKSSFNLATVVAETLGLGVQEESETQGPMSPLGDELYHCLEGNHKKQPFESGSETPGTSESATPEGSPKRKVSSAEGAAKEEPKRRSARLSAKPPAKVEAKPKKAAAKDKSSDKKVQTKGKRGAKGKQAEVANQETKEDLPAENGETKTEESPASDEAGEKEAKSDSGSETPGTSESATPESYEQLAPQPCVGETLHSSLPRDSELFVPEEGSSEKESEDAPKTSPPTPGKHGLEQTGEEKVMVTVPDKNPPCPCCGTRVNSVLNLIEHLKVSHGKRGVCFRCAKCGKENSNYHSVVCHFKKCRGPETEKAPAGEWICEVCNRDFTTKIGLGQHKRLAHPAVRNQERIVASQPKETSNRGAHKRCWTKEEEELLIRLEAQFEGNKNINKLIAEHITTKTAKQISDKRRLLSRKPAEEPREEPGTCHHTRRAAASLRTEPEMSHHAQAEDRDNGPGRRPLPGRAAAGGRTMDEIRRHPDKGNGQQRPTKQKSEEQLQAYYKKTLEERLSAGALNTFPRAFKQVMEGRDIKLVINQTAQDCFGCLESISQIRTATRDKKDTVTREKHPKKPFQKWMKKRAIKKGNYLRFQRLFYLDRGKLAKIILDDIECLSCDIPLSEIYSVFKTRWETTGSFKSLGDFKTYGKADNTAFRELITAKEIEKNVQEMSKGSAPGPDGITLGDVVKMDPEFSRTMEIFNLWLTTGKIPDMVRGSRTVLIPKSSKPDRLKDINNWRPITIGSILLRLFSRIVTARLSKACPLNPRQRGFIRAAGCSENLKLLQTIIWSAKREHRPLGVVFVDIAKAFDTVSHQHIIHALQQREVDPHIVGLVSNMYENISTYITTKRNTHTDKIQIRVGVKQGDPMSPLLFNLAMDPLLCKLEESGKGYHRGQSSITAMAFADDLVLLSDSWENMNTNISILETFCNLTGLKTQGQKCHGFYIKPTKKSYTINDCAAWTINGTPLNMIDPGESEKYLGLQFDPWIGIARSGLSTKLDFWLQRIDQAPLKPLQKTDILKTYTIPRLIYIADHSEVKSALLETLDQKIRTAVKEWLHLPPCTCDAILYSSTRDGGLGITKLAGLIPSVQARRLHRIAQSSDDTMKCFMEKEKMEQLHKKLWIQAGGDRENIPSIWEAPPSSEPPNNVSTNSEWEAPTQKDKFPKPCNWRKNEFKKWTKLASQGRGIVNFERDKISNHWIQYYRRIPHRKLLTALQLRANVYPTREFLARGRQDQYIKACRHCDADNESCAHIIGNCPVTQDARIKRHNYICELLLEEAKKKDWVVFKEPHIRDSNKELYKPDLIFVKDGRALVVDVTVRYEAAKSSLEEAAAEKVRKYKHLETEVRHLTNAKDVTFVGFPLGARGKWHQDNFKLLTELGLSKSRQVKMAETFSTVALFSSVDIVHMFASRARKSMVM

SEQ ID NO: 976 - protein, 1665 aa, synthetic construct
MAPKKKRKVNISGSSCGSPNSADTSSDFKDLWTKLKECHDREVQGLQVKVTKLKQERILDAQRLEEFFTKNQQLREQQKVLHETIKVLEDRLRAGLCDRCAVTEEHMRKKQQEFENIRQQNLKLITELMNERNTLQEENKKLSEQLQQKIENDQQHQAAELECEEDVIPDSPITAFSFSGVNRLRRKENPHVRYIEQTHTKLEHSVCANEMRKVSKSSTHPQHNPNENEILVADTYDQSQSPMAKAHGTSSYTPDKSSFNLATVVAETLGLGVQEESETQGPMSPLGDELYHCLEGNHKKQPFESGSETPGTSESATPEGSPKRKVSSAEGAAKEEPKRRSARLSAKPPAKVEAKPKKAAAKDKSSDKKVQTKGKRGAKGKQAEVANQETKEDLPAENGETKTEESPASDEAGEKEAKSDSGSETPGTSESATPESYEQLAPQPCVGETLHSSLPRDSELFVPEEGSSEKESEDAPKTSPPTPGKHGLEQTGEEKVMVTVPDKNPPCPCCGTRVNSVLNLIEHLKVSHGKRGVCFRCAKCGKENSNYHSVVCHFKKCRGPETEKAPAGEWICEVCNRDFTTKIGLGQHKRLAHPAVRNQERIVASQPKETSNRGAHKRCWTKEEEELLIRLEAQFEGNKNINKLIAEHITTKTAKQISDKRRLLSRKPAEEPREEPGTCHHTRRAAASLRTEPEMSHHAQAEDRDNGPGRRPLPGRAAAGGRTMDEIRRHPDKGNGQQRPTKQKSEEQLQAYYKKTLEERLSAGALNTFPRAFKQVMEGRDIKLVINQTAQDCFGCLESISQIRTATRDKKDTVTREKHPKKPFQKWMKKRAIKKGNYLRFQRLFYLDRGKLAKIILDDIECLSCDIPLSEIYSVFKTRWETTGSFKSLGDFKTYGKADNTAFRELITAKEIEKNVQEMSKGSAPGPDGITLGDVVKMDPEFSRTMEIFNLWLTTGKIPDMVRGCRTVLIPKSSKPDRLKDINNWRPITIGSILLRLFSRIVTARLSKACPLNPRQRGFIRAAGCSENLKLLQTIIWSAKREHRPLGVVFVDIAKAFDTVSHQHIIHALQQREVDPHIVGLVSNMYENISTYITTKRNTHTDKIQIRVGVKQGDPMSPLLFNLAMDPLLCKLEESGKGYHRGQSSITAMAFADDLVLLSDSWENMNTNISLLETFCNLTGLKTQGQKCHGFYIKPTKKSYTINDCAAWTINGTPLNMIDPGESEKYLGLQFDPWIGIARSGLSTKLDFWLQRIDQAPLKPLQKTDILKTYTIPRLIYIADHSEVKSALLETLDQKIRTAVKEWLHLPPCTCDAILYSSTRDGGLGITKLAGLIPSVQARRLHRIAQSSDDTMKCFMEKEKMEQLHKKLWIQAGGDRENIPSIWEAPPSSEPPNNVSTNSEWEAPTQKDKFPKPCNWRKNEFKKWTKLASQGRGIVNFERDKISNHWIQYYRRIPHRKLLTALQLRANVYPTREFLARGRQDQYIKACRHCDADNESCAHIIGNCPVTQDARIKRHNYICELLLEEAKKKDWVVFKEPHIRDSNKELYKPDLIFVKDGRALVVDVTVRYEAAKSSLEEAAAEKVRKYKHLETEVRHLTNAKDVTFVGFPLGARGKWHQDNFKLLTELGLSKSRQVKMAETFSTVALFSSVDIVHMFASRARKSMVM

SEQ ID NO: 977 - protein, 1665 aa, synthetic construct
MAPKKKRKVNISGSSCGSPNSADTSSDFKDLWTKLKECHDREVQGLQVKVTKLKQERILDAQRLEEFFTKNQQLREQQKVLHETIKVLEDRLRAGLCDRCAVTEEHMRKKQQEFENIRQQNLKLITELMNERNTLQEENKKLSEQLQQKIENDQQHQAAELECEEDVIPDSPITAFSFSGVNRLRRKENPHVRYIEQTHTKLEHSVCANEMRKVSKSSTHPQHNPNENEILVADTYDQSQSPMAKAHGTSSYTPDKSSFNLATVVAETLGLGVQEESETQGPMSPLGDELYHCLEGNHKKQPFESGSETPGTSESATPEGSPKRKVSSAEGAAKEEPKRRSARLSAKPPAKVEAKPKKAAAKDKSSDKKVQTKGKRGAKGKQAEVANQETKEDLPAENGETKTEESPASDEAGEKEAKSDSGSETPGTSESATPESYEQLAPQPCVGETLHSSLPRDSELFVPEEGSSEKESEDAPKTSPPTPGKHGLEQTGEEKVMVTVPDKNPPCPCCGTRVNSVLNLIEHLKVSHGKRGVCFRCAKCGKENSNYHSVVCHFKKCRGPETEKAPAGEWICEVCNRDFTTKIGLGQHKRLAHPAVRNQERIVASQPKETSNRGAHKRCWTKEEEELLIRLEAQFEGNKNINKLIAEHITTKTAKQISDKRRLLSRKPAEEPREEPGTCHHTRRAAASLRTEPEMSHHAQAEDRDNGPGRRPLPGRAAAGGRTMDEIRRHPDKGNGQQRPTKQKSEEQLQAYYKKTLEERLSAGALNTFPRAFKQVMEGRDIKLVINQTAQDCFGCLESISQIRTATRDKKDTVTREKHPKKPFQKWMKKRAIKKGNYLRFQRLFYLDRGKLAKIILDDIECLSCDIPLSEIYSVFKTRWETTGSFKSLGDFKTYGKADNTAFRELITAKEIEKNVQEMSKGSAPGPDGITLGDVVKMDPEFSRTMEIFNLWLTTGKIPDMVRGCRTVLIPKSSKPDRLKDINNWRPITIGSILLRLFSRIVTARLSKACPLNPRQRGFIRAAGCSENLKLLQTIIWSAKREHRPLGVVFVDIAKAFDTVSHQHIIHALQQREVDPHIVGLVSNMYENISTYITTKRNTHTDKIQIRVGVKQGDPMSPLLFNLAMDPLLCKLEESGKGYHRGQSSITAMAFADDLVLLSDSWENMNTNISILETFLNLTGLKTQGQKCHGFYIKPTKKSYTINDCAAWTINGTPLNMIDPGESEKYLGLQFDPWIGIARSGLSTKLDFWLQRIDQAPLKPLQKTDILKTYTIPRLIYIADHSEVKSALLETLDQKIRTAVKEWLHLPPCTCDAILYSSTRDGGLGITKLAGLIPSVQARRLHRIAQSSDDTMKCFMEKEKMEQLHKKLWIQAGGDRENIPSIWEAPPSSEPPNNVSTNSEWEAPTQKDKFPKPCNWRKNEFKKWTKLASQGRGIVNFERDKISNHWIQYYRRIPHRKLLTALQLRANVYPTREFLARGRQDQYIKACRHCDADNESCAHIIGNCPVTQDARIKRHNYICELLLEEAKKKDWVVFKEPHIRDSNKELYKPDLIFVKDGRALVVDVTVRYEAAKSSLEEAAAEKVRKYKHLETEVRHLTNAKDVTFVGFPLGARGKWHQDNFKLLTELGLSKSRQVKMAETFSTVALFSSVDIVHMFASRARKSMVM

SEQ ID NO: 978 - protein, 1665 aa, synthetic construct
MAPKKKRKVNISGSSCGSPNSADTSSDFKDLWTKLKECHDREVQGLQVKVTKLKQERILDAQRLEEFFTKNQQLREQQKVLHETIKVLEDRLRAGLCDRCAVTEEHMRKKQQEFENIRQQNLKLITELMNERNTLQEENKKLSEQLQQKIENDQQHQAAELECEEDVIPDSPITAFSFSGVNRLRRKENPHVRYIEQTHTKLEHSVCANEMRKVSKSSTHPQHNPNENEILVADTYDQSQSPMAKAHGTSSYTPDKSSFNLATVVAETLGLGVQEESETQGPMSPLGDELYHCLEGNHKKQPFESGSETPGTSESATPEGSPKRKVSSAEGAAKEEPKRRSARLSAKPPAKVEAKPKKAAAKDKSSDKKVQTKGKRGAKGKQAEVANQETKEDLPAENGETKTEESPASDEAGEKEAKSDSGSETPGTSESATPESYEQLAPQPCVGETLHSSLPRDSELFVPEEGSSEKESEDAPKTSPPTPGKHGLEQTGEEKVMVTVPDKNPPCPCCGTRVNSVLNLIEHLKVSHGKRGVCFRCAKCGKENSNYHSVVCHFKKCRGPETEKAPAGEWICEVCNRDFTTKIGLGQHKRLAHPAVRNQERIVASQPKETSNRGAHKRCWTKEEEELLIRLEAQFEGNKNINKLIAEHITTKTAKQISDKRRLLSRKPAEEPREEPGTCHHTRRAAASLRTEPEMSHHAQAEDRDNGPGRRPLPGRAAAGGRTMDEIRRHPDKGNGQQRPTKQKSEEQLQAYYKKTLEERLSAGALNTFPRAFKQVMEGRDIKLVINQTAQDCFGCLESISQIRTATRDKKDTVTREKHPKKPFQKWMKKRAIKKGNYLRFQRLFYLDRGKLAKIILDDIECLSCDIPLSEIYSVFKTRWETTGSFKSLGDFKTYGKADNTAFRELITAKEIEKNVQEMSKGSAPGPDGITLGDVVKMDPEFSRTMEIFNLWLTTGKIPDMVRGCRTVLIPKSSKPDRLKDINNWRPITIGSILLRLFSRIVTARLSKACPLNPRQRGFIRAAGCSENLKLLQTIIWSAKREHRPLGVVFVDIAKAFDTVSHQHIIHALQQREVDPHIVGLVSNMYENISTYITTKRNTHTDKIQIRVGVKQGDPMSPLLFNLAMDPLLCKLEESGKGYHRGQSSITAMAFADDLVLLSDSWENMNTNISILETFCNLTGLKTQGQKCHGFYIKPTKKSYTINDCAAWTINGTPLNMIDPGESEKYLGLQFDPWIGIARSGLSTKLDFWLQRIDQAPLKPLQKTDILKTYTISRLIYIADHSEVKSALLETLDQKIRTAVKEWLHLPPCTCDAILYSSTRDGGLGITKLAGLIPSVQARRLHRIAQSSDDTMKCFMEKEKMEQLHKKLWIQAGGDRENIPSIWEAPPSSEPPNNVSTNSEWEAPTQKDKFPKPCNWRKNEFKKWTKLASQGRGIVNFERDKISNHWIQYYRRIPHRKLLTALQLRANVYPTREFLARGRQDQYIKACRHCDADNESCAHIIGNCPVTQDARIKRHNYICELLLEEAKKKDWVVFKEPHIRDSNKELYKPDLIFVKDGRALVVDVTVRYEAAKSSLEEAAAEKVRKYKHLETEVRHLTNAKDVTFVGFPLGARGKWHQDNFKLLTELGLSKSRQVKMAETFSTVALFSSVDIVHMFASRARKSMVM

SEQ ID NO: 979 - protein, 1665 aa, synthetic construct
MAPKKKRKVNISGSSCGSPNSADTSSDFKDLWTKLKECHDREVQGLQVKVTKLKQERILDAQRLEEFFTKNQQLREQQKVLHETIKVLEDRLRAGLCDRCAVTEEHMRKKQQEFENIRQQNLKLITELMNERNTLQEENKKLSEQLQQKIENDQQHQAAELECEEDVIPDSPITAFSFSGVNRLRRKENPHVRYIEQTHTKLEHSVCANEMRKVSKSSTHPQHNPNENEILVADTYDQSQSPMAKAHGTSSYTPDKSSFNLATVVAETLGLGVQEESETQGPMSPLGDELYHCLEGNHKKQPFESGSETPGTSESATPEGSPKRKVSSAEGAAKEEPKRRSARLSAKPPAKVEAKPKKAAAKDKSSDKKVQTKGKRGAKGKQAEVANQETKEDLPAENGETKTEESPASDEAGEKEAKSDSGSETPGTSESATPESYEQLAPQPCVGETLHSSLPRDSELFVPEEGSSEKESEDAPKTSPPTPGKHGLEQTGEEKVMVTVPDKNPPCPCCGTRVNSVLNLIEHLKVSHGKRGVCFRCAKCGKENSNYHSVVCHFKKCRGPETEKAPAGEWICEVCNRDFTTKIGLGQHKRLAHPAVRNQERIVASQPKETSNRGAHKRCWTKEEEELLIRLEAQFEGNKNINKLIAEHITTKTAKQISDKRRLLSRKPAEEPREEPGTCHHTRRAAASLRTEPEMSHHAQAEDRDNGPGRRPLPGRAAAGGRTMDEIRRHPDKGNGQQRPTKQKSEEQLQAYYKKTLEERLSAGALNTFPRAFKQVMEGRDIKLVINQTAQDCFGCLESISQIRTATRDKKDTVTREKHPKKPFQKWMKKRAIKKGNYLRFQRLFYLDRGKLAKIILDDIECLSCDIPLSEIYSVFKTRWETTGSFKSLGDFKTYGKADNTAFRELITAKEIEKNVQEMSKGSAPGPDGITLGDVVKMDPEFSRTMEIFNLWLTTGKIPDMVRGCRTVLIPKSSKPDRLKDINNWRPITIGSILLRLFSRIVTARLSKACPLNPRQRGFIRAAGCSENLKLLQTIIWSAKREHRPLGVVFVDIAKAFDTVSHQHIIHALQQREVDPHIVGLVSNMYENISTYITTKRNTHTDKIQIRVGVKQGDPMSPLLFNLAMDPLLCKLEESGKGYHRGQSSITAMAFADDLVLLSDSWENMNTNISILETFCNLTGLKTQGQKCHGFYIKPTKKSYTINDCAAWTINGTPLNMIDPGESEKYLGLQFDPWIGIARSGLSTKLDFWLQRIDQAPLKPLQKTDILKTYTIPRLIHIADHSEVKSALLETLDQKIRTAVKEWLHLPPCTCDAILYSSTRDGGLGITKLAGLIPSVQARRLHRIAQSSDDTMKCFMEKEKMEQLHKKLWIQAGGDRENIPSIWEAPPSSEPPNNVSTNSEWEAPTQKDKFPKPCNWRKNEFKKWTKLASQGRGIVNFERDKISNHWIQYYRRIPHRKLLTALQLRANVYPTREFLARGRQDQYIKACRHCDADNESCAHIIGNCPVTQDARIKRHNYICELLLEEAKKKDWVVFKEPHIRDSNKELYKPDLIFVKDGRALVVDVTVRYEAAKSSLEEAAAEKVRKYKHLETEVRHLTNAKDVTFVGFPLGARGKWHQDNFKLLTELGLSKSRQVKMAETFSTVALFSSVDIVHMFASRARKSMVM

SEQ ID NO: 980 - protein, 1665 aa, synthetic construct
MAPKKKRKVNISGSSCGSPNSADTSSDFKDLWTKLKECHDREVQGLQVKVTKLKQERILDAQRLEEFFTKNQQLREQQKVLHETIKVLEDRLRAGLCDRCAVTEEHMRKKQQEFENIRQQNLKLITELMNERNTLQEENKKLSEQLQQKIENDQQHQAAELECEEDVIPDSPITAFSFSGVNRLRRKENPHVRYIEQTHTKLEHSVCANEMRKVSKSSTHPQHNPNENEILVADTYDQSQSPMAKAHGTSSYTPDKSSFNLATVVAETLGLGVQEESETQGPMSPLGDELYHCLEGNHKKQPFESGSETPGTSESATPEGSPKRKVSSAEGAAKEEPKRRSARLSAKPPAKVEAKPKKAAAKDKSSDKKVQTKGKRGAKGKQAEVANQETKEDLPAENGETKTEESPASDEAGEKEAKSDSGSETPGTSESATPESYEQLAPQPCVGETLHSSLPRDSELFVPEEGSSEKESEDAPKTSPPTPGKHGLEQTGEEKVMVTVPDKNPPCPCCGTRVNSVLNLIEHLKVSHGKRGVCFRCAKCGKENSNYHSVVCHFKKCRGPETEKAPAGEWICEVCNRDFTTKIGLGQHKRLAHPAVRNQERIVASQPKETSNRGAHKRCWTKEEEELLIRLEAQFEGNKNINKLIAEHITTKTAKQISDKRRLLSRKPAEEPREEPGTCHHTRRAAASLRTEPEMSHHAQAEDRDNGPGRRPLPGRAAAGGRTMDEIRRHPDKGNGQQRPTKQKSEEQLQAYYKKTLEERLSAGALNTFPRAFKQVMEGRDIKLVINQTAQDCFGCLESISQIRTATRDKKDTVTREKHPKKPFQKWMKKRAIKKGNYLRFQRLFYLDRGKLAKIILDDIECLSCDIPLSEIYSVFKTRWETTGSFKSLGDFKTYGKADNTAFRELITAKEIEKNVQEMSKGSAPGPDGITLGDVVKMDPEFSRTMEIFNLWLTTGKIPDMVRGCRTVLIPKSSKPDRLKDINNWRPITIGSILLRLFSRIVTARLSKACPLNPRQRGFIRAAGCSENLKLLQTIIWSAKREHRPLGVVFVDIAKAFDTVSHQHIIHALQQREVDPHIVGLVSNMYENISTYITTKRNTHTDKIQIRVGVKQGDPMSPLLFNLAMDPLLCKLEESGKGYHRGQSSITAMAFADDLVLLSDSWENMNTNISILETFCNLTGLKTQGQKCHGFYIKPTKKSYTINDCAAWTINGTPLNMIDPGESEKYLGLQFDPWIGIARSGLSTKLDFWLQRIDQAPLKPLQKTDILKTYTIPRLIYIADHSEVKSALLETLDQKIRTAVKEWLHLPPCTCDAILYSSTRDGGLGITKLAGLIPSVQARRLHRIAQSSDDTMKCFMEKEKMEQLHKKLWIQAGGDRENIPSIWEAPPSSEPPNNVSTNSEWEAPTQKDKFPKPCNWRKNEFKKWTKLASQGRGIVNFERDKISNHFIQYYRRIPHRKLLTALQLRANVYPTREFLARGRQDQYIKACRHCDADNESCAHIIGNCPVTQDARIKRHNYICELLLEEAKKKDWVVFKEPHIRDSNKELYKPDLIFVKDGRALVVDVTVRYEAAKSSLEEAAAEKVRKYKHLETEVRHLTNAKDVTFVGFPLGARGKWHQDNFKLLTELGLSKSRQVKMAETFSTVALFSSVDIVHMFASRARKSMVM

SEQ ID NO: 981 - protein, 1665 aa, synthetic construct
MAPKKKRKVNISGSSCGSPNSADTSSDFKDLWTKLKECHDREVQGLQVKVTKLKQERILDAQRLEEFFTKNQQLREQQKVLHETIKVLEDRLRAGLCDRCAVTEEHMRKKQQEFENIRQQNLKLITELMNERNTLQEENKKLSEQLQQKIENDQQHQAAELECEEDVIPDSPITAFSFSGVNRLRRKENPHVRYIEQTHTKLEHSVCANEMRKVSKSSTHPQHNPNENEILVADTYDQSQSPMAKAHGTSSYTPDKSSFNLATVVAETLGLGVQEESETQGPMSPLGDELYHCLEGNHKKQPFESGSETPGTSESATPEGSPKRKVSSAEGAAKEEPKRRSARLSAKPPAKVEAKPKKAAAKDKSSDKKVQTKGKRGAKGKQAEVANQETKEDLPAENGETKTEESPASDEAGEKEAKSDSGSETPGTSESATPESYEQLAPQPCVGETLHSSLPRDSELFVPEEGSSEKESEDAPKTSPPTPGKHGLEQTGEEKVMVTVPDKNPPCPCCGTRVNSVLNLIEHLKVSHGKRGVCFRCAKCGKENSNYHSVVCHFKKCRGPETEKAPAGEWICEVCNRDFTTKIGLGQHKRLAHPAVRNQERIVASQPKETSNRGAHKRCWTKEEEELLIRLEAQFEGNKNINKLIAEHITTKTAKQISDKRRLLSRKPAEEPREEPGTCHHTRRAAASLRTEPEMSHHAQAEDRDNGPGRRPLPGRAAAGGRTMDEIRRHPDKGNGQQRPTKQKSEEQLQAYYKKTLEERLSAGALNTFPRAFKQVMEGRDIKLVINQTAQDCFGCLESISQIRTATRDKKDTVTREKHPKKPFQKWMKKRAIKKGNYLRFQRLFYLDRGKLAKIILDDIECLSCDIPLSEIYSVFKTRWETTGSFKSLGDFKTYGKADNTAFRELITAKEIEKNVQEMSKGSAPGPDGITLGDVVKMDPEFSRTMEIFNLWLTTGKIPDMVRGCRTVLIPKSSKPDRLKDINNWRPITIGSILLRLFSRIVTARLSKACPLNPRQRGFIRAAGCSENLKLLQTIIWSAKREHRPLGVVFVDIAKAFDTVSHQHIIHALQQREVDPHIVGLVSNMYENISTYITTKRNTHTDKIQIRVGVKQGDPMSPLLFNLAMDPLLCKLEESGKGYHRGQSSITAMAFADDLVLLSDSWENMNTNISILETFCNLTGLKTQGQKCHGFYIKPTKKSYTINDCAAWTINGTPLNMIDPGESEKYLGLQFDPWIGIARSGLSTKLDFWLQRIDQAPLKPLQKTDILKTYTIPRLIYIADHSEVKSALLETLDQKIRTAVKEWLHLPPCTCDAILYSSTRDGGLGITKLAGLIPSVQARRLHRIAQSSDDTMKCFMEKEKMEQMHKKLWIQAGGDRENIPSIWEAPPSSEPPNNVSTNSEWEAPTQKDKFPKPCNWRKNEFKKWTKLASQGRGIVNFERDKISNHWIQYYRRIPHRKLLTALQLRANVYPTREFLARGRQDQYIKACRHCDADNESCAHIIGNCPVTQDARIKRHNYICELLLEEAKKKDWVVFKEPHIRDSNKELYKPDLIFVKDGRALVVDVTVRYEAAKSSLEEAAAEKVRKYKHLETEVRHLTNAKDVTFVGFPLGARGKWHQDNFKLLTELGLSKSRQVKMAETFSTVALFSSVDIVHMFASRARKSMVM

SEQ ID NO: 982 - protein, 1665 aa, synthetic construct
MAPKKKRKVNISGSSCGSPNSADTSSDFKDLWTKLKECHDREVQGLQVKVTKLKQERILDAQRLEEFFTKNQQLREQQKVLHETIKVLEDRLRAGLCDRCAVTEEHMRKKQQEFENIRQQNLKLITELMNERNTLQEENKKLSEQLQQKIENDQQHQAAELECEEDVIPDSPITAFSFSGVNRLRRKENPHVRYIEQTHTKLEHSVCANEMRKVSKSSTHPQHNPNENEILVADTYDQSQSPMAKAHGTSSYTPDKSSFNLATVVAETLGLGVQEESETQGPMSPLGDELYHCLEGNHKKQPFESGSETPGTSESATPEGSPKRKVSSAEGAAKEEPKRRSARLSAKPPAKVEAKPKKAAAKDKSSDKKVQTKGKRGAKGKQAEVANQETKEDLPAENGETKTEESPASDEAGEKEAKSDSGSETPGTSESATPESYEQLAPQPCVGETLHSSLPRDSELFVPEEGSSEKESEDAPKTSPPTPGKHGLEQTGEEKVMVTVPDKNPPCPCCGTRVNSVLNLIEHLKVSHGKRGVCFRCAKCGKENSNYHSVVCHFKKCRGPETEKAPAGEWICEVCNRDFTTKIGLGQHKRLAHPAVRNQERIVASQPKETSNRGAHKRCWTKEEEELLIRLEAQFEGNKNINKLIAEHITTKTAKQISDKRRLLSRKPAEEPREEPGTCHHTRRAAASLRTEPEMSHHAQAEDRDNGPGRRPLPGRAAAGGRTMDEIRRHPDKGNGQQRPTKQKSEEQLQAYYKKTLEERLSAGALNTFPRAFKQVMEGRDIKLVINQTAQDCFGCLESISQIRTATRDKKDTVTREKHPKKPFQKWMKKRAIKKGNYLRFQRLFYLDRGKLAKIILDDIECLSCDIPLSEIYSVFKTRWETTGSFKSLGDFKTYGKADNTAFRELITAKEIEKNVQEMSKGSAPGPDGITLGDVVKMDPEFSRTMEIFNLWLTTGKIPDMVRGCRTVLIPKSSKPDRLKDINNWRPITIGSILLRLFSRIVTARLSKACPLNPRQRGFIRAAGCSENLKLLQTIIWSAKREHRPLGVVFVDIAKAFDTVSHQHIIHALQQREVDPHIVGLVSNMYENISTYITTKRNTHTDKIQIRVGVKQGDPMSPLLFNLAMDPLLCKLEESGKGYHRGQSSITAMAFADDLVLLSDSWENMNTNISILETFCNLTGLKTQGQKCHGFYIKPTKKSYTINDCAAWTINGTPLNMIDPGESEKYLGLQFDPWIGIARSGLSTKLDFWLQRIDQAPLKPLQKTDILKTYTIPRLIYIADHSEVKSALLETLDQKIRTAVKEWLHLPPCTCDAILYSSTRDGGLGITKLAGLIPSVQARRLHRIAQSSDDTMKCFMEKEKMEQLHKKLWIQAGGDRENIPSIWEAPPSSEPPNNVSTNSEWEAPTQKDKFPKPCNWRKNEFKKWTKLASQGRGIVNFERDKISNHWIQYYRRIPHRKLLTALQLRANVYPTREFLARGRQDQYIKACRHCDADLESCAHIIGNCPVTQDARIKRHNYICELLLEEAKKKDWVVFKEPHIRDSNKELYKPDLIFVKDGRALVVDVTVRYEAAKSSLEEAAAEKVRKYKHLETEVRHLTNAKDVTFVGFPLGARGKWHQDNFKLLTELGLSKSRQVKMAETFSTVALFSSVDIVHMFASRARKSMVM

SEQ ID NO: 983 - protein, 1665 aa, synthetic construct
MAPKKKRKVNISGSSCGSPNSADTSSDFKDLWTKLKECHDREVQGLQVKVTKLKQERILDAQRLEEFFTKNQQLREQQKVLHETIKVLEDRLRAGLCDRCAVTEEHMRKKQQEFENIRQQNLKLITELMNERNTLQEENKKLSEQLQQKIENDQQHQAAELECEEDVIPDSPITAFSFSGVNRLRRKENPHVRYIEQTHTKLEHSVCANEMRKVSKSSTHPQHNPNENEILVADTYDQSQSPMAKAHGTSSYTPDKSSFNLATVVAETLGLGVQEESETQGPMSPLGDELYHCLEGNHKKQPFESGSETPGTSESATPEGSPKRKVSSAEGAAKEEPKRRSARLSAKPPAKVEAKPKKAAAKDKSSDKKVQTKGKRGAKGKQAEVANQETKEDLPAENGETKTEESPASDEAGEKEAKSDSGSETPGTSESATPESYEQLAPQPCVGETLHSSLPRDSELFVPEEGSSEKESEDAPKTSPPTPGKHGLEQTGEEKVMVTVPDKNPPCPCCGTRVNSVLNLIEHLKVSHGKRGVCFRCAKCGKENSNYHSVVCHFKKCRGPETEKAPAGEWICEVCNRDFTTKIGLGQHKRLAHPAVRNQERIVASQPKETSNRGAHKRCWTKEEEELLIRLEAQFEGNKNINKLIAEHITTKTAKQISDKRRLLSRKPAEEPREEPGTCHHTRRAAASLRTEPEMSHHAQAEDRDNGPGRRPLPGRAAAGGRTMDEIRRHPDKGNGQQRPTKQKSEGQLQAYYKKTLEERLSAGALNTFPRAFKQVMEGRDIKLVINQTAQDCFGCLESISQIRTATRDKKDTVTREKHPKKPFQKWMKKRAIKKGNYLRFQRLFYLDRGKLAKIILDDIECLSCDIPLSEIYSVFKTRWETTGSFKSLGDFKTYGKADNTAFRELITAKEIEKNVQEMSKGSAPGPDGITLGDVVKMDPEFSRTMEIFNLWLTTGKIPDMVRGCRTVLIPKSSKPDRLKDINNWRPITIGSILLRLFSRIVTARLSKACPLNPRQRGFIRAAGCSENLKLLQTIIWSAKREHRPLGVVFVDIAKAFDTVSHQHIIHALQQREVDPHIVGLVSNMYENISTYITTKRNTHTDKIQIRVGVKQGDPMSPLLFNLAMDPLLCKLEESGKGYHRGQSSITAMAFADDLVLLSDSWENMNTNISILETFCNLTGLKTQGQKCHGFYIKPTKKSYTINDCAAWTINGTPLNMIDPGESEKYLGLQFDPWIGIARSGLSTKLDFWLQRIDQAPLKPLQKTDILKTYTIPRLIYIADHSEVKSALLETLDQKIRTAVKEWLHLPPCTCDAILYSSTRDGGLGITKLAGLIPSVQARRLHRIAQSSDDTMKCFMEKEKMEQLHKKLWIQAGGDRENIPSIWEAPPSSEPPNNVSTNSEWEAPTQKDKFPKPCNWRKNEFKKWTKLASQGRGIVNFERDKISNHWIQYYRRIPHRKLLTALQLRANVYPTREFLARGRQDQYIKACRHCDADNESCAHIIGNCPVTQDARIKRHNYICELLLEEAKKKDWVVFKEPHIRDSNKELYKPDLIFVKDGRALVVDVTVRYEAAKSSLEEAAAEKVRKYKHLETEVRHLTNAKDVTFVGFPLGARGKWHQDNFKLLTELGLSKSRQVKMAETFSTVALFSSVDIVHMFASRARKSMVM

SEQ ID NO: 984 - protein, 1665 aa, synthetic construct
MAPKKKRKVNISGSSCGSPNSADTSSDFKDLWTKLKECHDREVQGLQVKVTKLKQERILDAQRLEEFFTKNQQLREQQKVLHETIKVLEDRLRAGLCDRCAVTEEHMRKKQQEFENIRQQNLKLITELMNERNTLQEENKKLSEQLQQKIENDQQHQAAELECEEDVIPDSPITAFSFSGVNRLRRKENPHVRYIEQTHTKLEHSVCANEMRKVSKSSTHPQHNPNENEILVADTYDQSQSPMAKAHGTSSYTPDKSSFNLATVVAETLGLGVQEESETQGPMSPLGDELYHCLEGNHKKQPFESGSETPGTSESATPEGSPKRKVSSAEGAAKEEPKRRSARLSAKPPAKVEAKPKKAAAKDKSSDKKVQTKGKRGAKGKQAEVANQETKEDLPAENGETKTEESPASDEAGEKEAKSDSGSETPGTSESATPESYEQLAPQPCVGETLHSSLPRDSELFVPEEGSSEKESEDAPKTSPPTPGKHGLEQTGEEKVMVTVPDKNPPCPCCGTRVNSVLNLIEHLKVSHGKRGVCFRCAKCGKENSNYHSVVCHFKKCRGPETEKAPAGEWICEVCNRDFTTKIGLGQHKRLAHPAVRNQERIVASQPKETSNRGAHKRCWTKEEEELLIRLEAQFEGNKNINKLIAEHITTKTAKQISDKRRLLSRKPAEEPREEPGTCHHTRRAAASLRTEPEMSHHAQAEDRDNGPGRRPLPGRAAAGGRTMDEIRRHPDKGNGQQRPTKQKSEEQLQAYYKRTLEERLSAGALNTFPRAFKQVMEGRDIKLVINQTAQDCFGCLESISQIRTATRDKKDTVTREKHPKKPFQKWMKKRAIKKGNYLRFQRLFYLDRGKLAKIILDDIECLSCDIPLSEIYSVFKTRWETTGSFKSLGDFKTYGKADNTAFRELITAKEIEKNVQEMSKGSAPGPDGITLGDVVKMDPEFSRTMEIFNLWLTTGKIPDMVRGCRTVLIPKSSKPDRLKDINNWRPITIGSILLRLFSRIVTARLSKACPLNPRQRGFIRAAGCSENLKLLQTIIWSAKREHRPLGVVFVDIAKAFDTVSHQHIIHALQQREVDPHIVGLVSNMYENISTYITTKRNTHTDKIQIRVGVKQGDPMSPLLFNLAMDPLLCKLEESGKGYHRGQSSITAMAFADDLVLLSDSWENMNTNISILETFCNLTGLKTQGQKCHGFYIKPTKKSYTINDCAAWTINGTPLNMIDPGESEKYLGLQFDPWIGIARSGLSTKLDFWLQRIDQAPLKPLQKTDILKTYTIPRLIYIADHSEVKSALLETLDQKIRTAVKEWLHLPPCTCDAILYSSTRDGGLGITKLAGLIPSVQARRLHRIAQSSDDTMKCFMEKEKMEQLHKKLWIQAGGDRENIPSIWEAPPSSEPPNNVSTNSEWEAPTQKDKFPKPCNWRKNEFKKWTKLASQGRGIVNFERDKISNHWIQYYRRIPHRKLLTALQLRANVYPTREFLARGRQDQYIKACRHCDADNESCAHIIGNCPVTQDARIKRHNYICELLLEEAKKKDWVVFKEPHIRDSNKELYKPDLIFVKDGRALVVDVTVRYEAAKSSLEEAAAEKVRKYKHLETEVRHLTNAKDVTFVGFPLGARGKWHQDNFKLLTELGLSKSRQVKMAETFSTVALFSSVDIVHMFASRARKSMVM

SEQ ID NO: 985 - protein, 1665 aa, synthetic construct
MAPKKKRKVNISGSSCGSPNSADTSSDFKDLWTKLKECHDREVQGLQVKVTKLKQERILDAQRLEEFFTKNQQLREQQKVLHETIKVLEDRLRAGLCDRCAVTEEHMRKKQQEFENIRQQNLKLITELMNERNTLQEENKKLSEQLQQKIENDQQHQAAELECEEDVIPDSPITAFSFSGVNRLRRKENPHVRYIEQTHTKLEHSVCANEMRKVSKSSTHPQHNPNENEILVADTYDQSQSPMAKAHGTSSYTPDKSSFNLATVVAETLGLGVQEESETQGPMSPLGDELYHCLEGNHKKQPFESGSETPGTSESATPEGSPKRKVSSAEGAAKEEPKRRSARLSAKPPAKVEAKPKKAAAKDKSSDKKVQTKGKRGAKGKQAEVANQETKEDLPAENGETKTEESPASDEAGEKEAKSDSGSETPGTSESATPESYEQLAPQPCVGETLHSSLPRDSELFVPEEGSSEKESEDAPKTSPPTPGKHGLEQTGEEKVMVTVPDKNPPCPCCGTRVNSVLNLIEHLKVSHGKRGVCFRCAKCGKENSNYHSVVCHFKKCRGPETEKAPAGEWICEVCNRDFTTKIGLGQHKRLAHPAVRNQERIVASQPKETSNRGAHKRCWTKEEEELLIRLEAQFEGNKNINKLIAEHITTKTAKQISDKRRLLSRKPAEEPREEPGTCHHTRRAAASLRTEPEMSHHAQAEDRDNGPGRRPLPGRAAAGGRTMDEIRRHPDKGNGQQRPTKQKSEEQLQAYYKKTLEERLSAGALNTFPRAFKQVMEGRDIKLVINQTAQDCFGCLESISQIRTATRDKKDTVTREKHPKKPFQKWMKKRAIKKGDYLRFQRLFYLDRGKLAKIILDDIECLSCDIPLSEIYSVFKTRWETTGSFKSLGDFKTYGKADNTAFRELITAKEIEKNVQEMSKGSAPGPDGITLGDVVKMDPEFSRTMEIFNLWLTTGKIPDMVRGCRTVLIPKSSKPDRLKDINNWRPITIGSILLRLFSRIVTARLSKACPLNPRQRGFIRAAGCSENLKLLQTIIWSAKREHRPLGVVFVDIAKAFDTVSHQHIIHALQQREVDPHIVGLVSNMYENISTYITTKRNTHTDKIQIRVGVKQGDPMSPLLFNLAMDPLLCKLEESGKGYHRGQSSITAMAFADDLVLLSDSWENMNTNISILETFCNLTGLKTQGQKCHGFYIKPTKKSYTINDCAAWTINGTPLNMIDPGESEKYLGLQFDPWIGIARSGLSTKLDFWLQRIDQAPLKPLQKTDILKTYTIPRLIYIADHSEVKSALLETLDQKIRTAVKEWLHLPPCTCDAILYSSTRDGGLGITKLAGLIPSVQARRLHRIAQSSDDTMKCFMEKEKMEQLHKKLWIQAGGDRENIPSIWEAPPSSEPPNNVSTNSEWEAPTQKDKFPKPCNWRKNEFKKWTKLASQGRGIVNFERDKISNHWIQYYRRIPHRKLLTALQLRANVYPTREFLARGRQDQYIKACRHCDADNESCAHIIGNCPVTQDARIKRHNYICELLLEEAKKKDWVVFKEPHIRDSNKELYKPDLIFVKDGRALVVDVTVRYEAAKSSLEEAAAEKVRKYKHLETEVRHLTNAKDVTFVGFPLGARGKWHQDNFKLLTELGLSKSRQVKMAETFSTVALFSSVDIVHMFASRARKSMVM

SEQ ID NO: 986 - protein, 1665 aa, synthetic construct
MAPKKKRKVNISGSSCGSPNSADTSSDFKDLWTKLKECHDREVQGLQVKVTKLKQERILDAQRLEEFFTKNQQLREQQKVLHETIKVLEDRLRAGLCDRCAVTEEHMRKKQQEFENIRQQNLKLITELMNERNTLQEENKKLSEQLQQKIENDQQHQAAELECEEDVIPDSPITAFSFSGVNRLRRKENPHVRYIEQTHTKLEHSVCANEMRKVSKSSTHPQHNPNENEILVADTYDQSQSPMAKAHGTSSYTPDKSSFNLATVVAETLGLGVQEESETQGPMSPLGDELYHCLEGNHKKQPFESGSETPGTSESATPEGSPKRKVSSAEGAAKEEPKRRSARLSAKPPAKVEAKPKKAAAKDKSSDKKVQTKGKRGAKGKQAEVANQETKEDLPAENGETKTEESPASDEAGEKEAKSDSGSETPGTSESATPESYEQLAPQPCVGETLHSSLPRDSELFVPEEGSSEKESEDAPKTSPPTPGKHGLEQTGEEKVMVTVPDKNPPCPCCGTRVNSVLNLIEHLKVSHGKRGVCFRCAKCGKENSNYHSVVCHFKKCRGPETEKAPAGEWICEVCNRDFTTKIGLGQHKRLAHPAVRNQERIVASQPKETSNRGAHKRCWTKEEEELLIRLEAQFEGNKNINKLIAEHITTKTAKQISDKRRLLSRKPAEEPREEPGTCHHTRRAAASLRTEPEMSHHAQAEDRDNGPGRRPLPGRAAAGGRTMDEIRRHPDKGNGQQRPTKQKSEEQLQAYYKKTLEERLSAGALNTFPRAFKQVMEGRDIKLVINQTAQDCFGCLESISQIRTATRDKKDTVTREKHPKKPFQKWMKKRAIKKGNYLRFQRLFYLDRGKLAKIILDDIECLSCDIPLSEIYSVFKTRWETTGSFKSLGDFKTYGKADNTAFRELITAKEIEKNVQEMSKGSAPGPDGITLGDVVKMDPEFSRTMEIFNLWLTTGKIPDMVRGCRTVLIPKSSKPDRLKDINNWRPITIGSILLRLFSRIVTARLSKACPLNPRQRGFIRAAGCSENLKLLQTIIWSAKREHRPLGVVFVDIAKAFDTVSHQHIIHALQQREVDPHIVGLVSNMYENISTYITTKRNTHTDKIQIRVGVKQGDPMSPLLFNLAMDPLLCKLEESGKGYHRGQSSITAMAFADDLVLLSDSWENMNTNISILETFCNLTGLKTQGQKCHGFYIKPTKKSYTINDCAAWTINGTPLNMIDPGESEKYLGLQFDPWIGIARSGLSTKLDFWLQRIDQAPLKPLQKTDILKTYTIPRLIYIADHSEVKSALLETLDQKIRTAVKEWLHLPPCTCDAILYSSTRDGGLGITKLAGLIPSVQARRLHRIAQSSDDTMKCFMEKEKMEQLHKKLWIQAGGDRENIPSIWEAPPSSEPPNNVSTNSEWEAPTQKDKFPKPCNWRKNEFKKWTKLASQGRGIVNFERDKISNHWIQYYRRIPHRKLLTALQLRANVYPTREFLARGRQDQYIKACRHCDADNESCAHIIGNCPVTQDARIKRHNYICELLLEEAKKKDWVVFKEPHIRDSNKELYKPDLIFVKDGRALVVDVTVRYEAAKSSLEEAAAEKVRKYKHLETEVRELTNAKDVTFVGFPLGARGKWHQDNFKLLTELGLSKSRQVKMAETFSTVALFSSVDIVHMFASRARKSMVM

SEQ ID NO: 987 - protein, 1665 aa, synthetic construct
MAPKKKRKVNISGSSCGSPNSADTSSDFKDLWTKLKECHDREVQGLQVKVTKLKQERILDAQRLEEFFTKNQQLREQQKVLHETIKVLEDRLRAGLCDRCAVTEEHMRKKQQEFENIRQQNLKLITELMNERNTLQEENKKLSEQLQQKIENDQQHQAAELECEEDVIPDSPITAFSFSGVNRLRRKENPHVRYIEQTHTKLEHSVCANEMRKVSKSSTHPQHNPNENEILVADTYDQSQSPMAKAHGTSSYTPDKSSFNLATVVAETLGLGVQEESETQGPMSPLGDELYHCLEGNHKKQPFESGSETPGTSESATPEGSPKRKVSSAEGAAKEEPKRRSARLSAKPPAKVEAKPKKAAAKDKSSDKKVQTKGKRGAKGKQAEVANQETKEDLPAENGETKTEESPASDEAGEKEAKSDSGSETPGTSESATPESYEQLAPQPCVGETLHSSLPRDSELFVPEEGSSEKESEDAPKTSPPTPGKHGLEQTGEEKVMVTVPDKNPPCPCCGTRVNSVLNLIEHLKVSHGKRGVCFRCAKCGKENSNYHSVVCHFKKCRGPETEKAPAGEWICEVCNRDFTTKIGLGQHKRLAHPAVRNQERIVASQPKETSNRGAHKRCWTKEEEELLIRLEAQFEGNKNINKLIAEHITTKTAKQISDKRRLLSRKPAEEPREEPGTCHHTRRAAASLRTEPEMSHHAQAEDRDNGPGRRPLPGRAAAGGRTMDEIRRHPDKGNGQQRPTKQKSEEQLQAYYKKTLEERLSAGALNTFPRAFKQVMEGRDIKLVINQTAQDCFGCLESISQIRTATRDKKDTVTREKHPKKPFQKWMKKRAIKKGNYLRFQRLFYLDRGKLAKIILDDIECLSCDIPLSEIYSVFKTRWETTGSFKSLGDFKTYGKADNTAFRELITAKEIEKNVQEMSKGSAPGPDGITLGDVVKMDPEFSRTMEIFNLWLTTGKIPDMVRGCRTVLIPKSSKPDRLKDINNWRPITIGSILLRLFSRIVTARLSKACPLNPRQRGFIRAAGCSENLKLLQTIIWSAKREHRPLGVVFVDIAKAFDTVSHQHIIHALQQREVDPHIVGLVSNMYENISTYITTKRNTHTDKIQIRVGVKQGDPMSPLLFNLAMDPLLCKLEESGKGYHRGQSSITAMAFADDLVLLSDSWENMNTNISILETFCNLTGLRTQGQKCHGFYIKPTKKSYTINDCAAWTINGTPLNMIDPGESEKYLGLQFDPWIGIARSGLSTKLDFWLQRIDQAPLKPLQKTDILKTYTIPRLIYIADHSEVKSALLETLDQKIRTAVKEWLHLPPCTCDAILYSSTRDGGLGITKLAGLIPSVQARRLHRIAQSSDDTMKCFMEKEKMEQLHKKLWIQAGGDRENIPSIWEAPPSSEPPNNVSTNSEWEAPTQKDKFPKPCNWRKNEFKKWTKLASQGRGIVNFERDKISNHWIQYYRRIPHRKLLTALQLRANVYPTREFLARGRQDQYIKACRHCDADNESCAHIIGNCPVTQDARIKRHNYICELLLEEAKKKDWVVFKEPHIRDSNKELYKPDLIFVKDGRALVVDVTVRYEAAKSSLEEAAAEKVRKYKHLETEVRHLTNAKDVTFVGFPLGARGKWHQDNFKLLTELGLSKSRQVKMAETFSTVALFSSVDIVHMFASRARKSMVM

SEQ ID NO: 988 - protein, 1665 aa, synthetic construct; identical to SEQ ID NO: 905

SEQ ID NO: 989 - protein, 1665 aa, synthetic construct
MAPKKKRKVNISGSSCGSPNSADTSSDFKDLWTKLKECHDREVQGLQVKVTKLKQERILDAQRLEEFFTKNQQLREQQKVLHETIKVLEDRLRAGLCDRCAVTEEHMRKKQQEFENIRQQNLKLITELMNERNTLQEENKKLSEQLQQKIENDQQHQAAELECEEDVIPDSPITAFSFSGVNRLRRKENPHVRYIEQTHTKLEHSVCANEMRKVSKSSTHPQHNPNENEILVADTYDQSQSPMAKAHGTSSYTPDKSSFNLATVVAETLGLGVQEESETQGPMSPLGDELYHCLEGNHKKQPFESGSETPGTSESATPEGSPKRKVSSAEGAAKEEPKRRSARLSAKPPAKVEAKPKKAAAKDKSSDKKVQTKGKRGAKGKQAEVANQETKEDLPAENGETKTEESPASDEAGEKEAKSDSGSETPGTSESATPESYEQLAPQPCVGETLHSSLPRDSELFVPEEGSSEKESEDAPKTSPPTPGKHGLEQTGEEKVMVTVPDKNPPCPCCGTRVNSVLNLIEHLKVSHGKRGVCFRCAKCGKENSNYHSVVCHFKKCRGPETEKAPAGEWICEVCNRDFTTKIGLGQHKRLAHPAVRNQERIVASQPKETSNRGAHKRCWTKEEEELLIRLEAQFEGNKNINKLIAEHITTKTAKQISDKRRLLSRKPAEEPREEPGTCHHTRRAAASLRTEPEMSHHAQAEDRDNGPGRRPLPGRAAAGGRTMDEIRRHPDKGNGQQRPTKQKSEEQLQAYYKKTLEERLSAGALNTFPRAFKQVMEGRDIKLVINQTAQDCFGCLESISQIRTATRDKKDTVTREKHPKKPFQKWMKKRAIKKGNYLRFQRLFYLDRGKLAKIILDDIECLSCDIPLSEIYSVFKTRWETTGSFKSLGDFKTYGKADNTAFRELITAKEIEKNVQEMSKGSAPGPDGITLGDVVKMDPEFSRTMEIFNLWLTTGKIPDMVRGCRTVLIPKSSKPDRLKDINNWRPITIGSILLRLFSRIVTARLSKACPLNPRQRGFIRAAGCSENLKLLQTIIWSAKREHRPLGVVFVDIAKAFDTVSHQHIIHALQQREVDPHIVGLVSNMYENISTYITTKRNTHTDKIQIRVGVKQGDPMSPLLFNLAMDPLLCKLEESGKGYHRGQSSITAMAFADDLVLLSDSWENMNTNISILETFCNLTGLKTQGQKCHGFYIKPTKKSYTINDCAAWTINGTPLNMIDPGESEKYLGLQFDPWIGIARSGLSTKLDFWLQRIDQAPLKPLQKTDILKTYTIPRLIYIADHSEVKSALLETLDQKIRTAVKEKLHLPPCTCDAILYSSTRDGGLGITKLAGLIPSVQARRLHRIAQSSDDTMKCFMEKEKMEQLHKKLWIQAGGDRENIPSIWEAPPSSEPPNNVSTNSEWEAPTQKDKFPKPCNWRKNEFKKWTKLASQGRGIVNFERDKISNHWIQYYRRIPHRKLLTALQLRANVYPTREFLARGRQDQYIKACRHCDADNESCAHIIGNCPVTQDARIKRHNYICELLLEEAKKKDWVVFKEPHIRDSNKELYKPDLIFVKDGRALVVDVTVRYEAAKSSLEEAAAEKVRKYKHLETEVRHLTNAKDVTFVGFPLGARGKWHQDNFKLLTELGLSKSRQVKMAETFSTVALFSSVDIVHMFASRARKSMVM

SEQ ID NO: 990 - protein, 1665 aa, synthetic construct
MAPKKKRKVNISGSSCGSPNSADTSSDFKDLWTKLKECHDREVQGLQVKVTKLKQERILDAQRLEEFFTKNQQLREQQKVLHETIKVLEDRLRAGLCDRCAVTEEHMRKKQQEFENIRQQNLKLITELMNERNTLQEENKKLSEQLQQKIENDQQHQAAELECEEDVIPDSPITAFSFSGVNRLRRKENPHVRYIEQTHTKLEHSVCANEMRKVSKSSTHPQHNPNENEILVADTYDQSQSPMAKAHGTSSYTPDKSSFNLATVVAETLGLGVQEESETQGPMSPLGDELYHCLEGNHKKQPFESGSETPGTSESATPEGSPKRKVSSAEGAAKEEPKRRSARLSAKPPAKVEAKPKKAAAKDKSSDKKVQTKGKRGAKGKQAEVANQETKEDLPAENGETKTEESPASDEAGEKEAKSDSGSETPGTSESATPESYEQLAPQRCVGETLHSSLPRDSELFVPEEGSSEKESEDAPKTSPPTPGKHGLEQTGEEKVMVTVPDKNPPCPCCGTRVNSVLNLIEHLKVSHGKRGVCFRCAKCGKENSNYHSVVCHFKKCRGPETEKAPAGEWICEVCNRDFTTKIGLGQHKRLAHPAVRNQERIVASQPKETSNRGAHKRCWTKEEEELLIRLEAQFEGNKNINKLIAEHITTKTAKQISDKRRLLSRKPAEEPREEPGTCHHTRRAAASLRTEPEMSHHAQAEDRDNGPGRRPLPGRAAAGGRTMDEIRRHPDKGNGQQRPTKQKSEEQLQAYYKKTLEERLSAGALNTFPRAFKQVMEGRDIKLVINQTAQDCFGCLESISQIRTATRDKKDTVTREKHPKKPFQKWMKKRAIKKGNYLRFQRLFYLDRGKLAKIILDDIECLSCDIPLSEIYSVFKTRWETTGSFKSLGDFKTYGKADNTAFRELITAKEIEKNVQEMSKGSAPGPDGITLGDVVKMDPEFSRTMEIFNLWLTTGKIPDMVRGCRTVLIPKSSKPDRLKDINNWRPITIGSILLRLFSRIVTARLSKACPLNPRQRGFIRAAGCSENLKLLQTIIWSAKREHRPLGVVFVDIAKAFDTVSHQHIIHALQQREVDPHIVGLVSNMYENISTYITTKRNTHTDKIQIRVGVKQGDPMSPLLFNLAMDPLLCKLEESGKGYHRGQSSITAMAFADDLVLLSDSWENMNTNISILETFCNLTGLKTQGQKCHGFYIKPTKKSYTINDCAAWTINGTPLNMIDPGESEKYLGLQFDPWIGIARSGLSTKLDFWLQRIDQAPLKPLQKTDILKTYTIPRLIYIADHSEVKSALLETLDQKIRTAVKEWLHLPPCTCDAILYSSTRDGGLGITKLAGLIPSVQARRLHRIAQSSDDTMKCFMEKEKMEQLHKKLWIQAGGDRENIPSIWEAPPSSEPPNNVSTNSEWEAPTQKDKFPKPCNWRKNEFKKWTKLASQGRGIVNFERDKISNHWIQYYRRIPHRKLLTALQLRANVYPTREFLARGRQDQYIKACRHCDADNESCAHIIGNCPVTQDARIKRHNYICELLLEEAKKKDWVVFKEPHIRDSNKELYKPDLIFVKDGRALVVDVTVRYEAAKSSLEEAAAEKVRKYKHLETEVRHLTNAKDVTFVGFPLGARGKWHQDNFKLLTELGLSKSRQVKMAETFSTVALFSSVDIVHMFASRARKSMVM

SEQ ID NO: 991 - protein, 1665 aa, synthetic construct
MAPKKKRKVNISGSSCGSPNSADTSSDFKDLWTKLKECHDREVQGLQVKVTKLKQERILDAQRLEEFFTKNQQLREQQKVLHETIKVLEDRLRAGLCDRCAVTEEHMRKKQQEFENIRQQNLKLITELMNERNTLQEENKKLSEQLQQKIENDQQHQAAELECEEDVIPDSPITAFSFSGVNRLRRKENPHVRYIEQTHTKLEHSVCANEMRKVSKSSTHPQHNPNENEILVADTYDQSQSPMAKAHGTSSYTPDKSSFNLATVVAETLGLGVQEESETQGPMSPLGDELYHCLEGNHKKQPFESGSETPGTSESATPEGSPKRKVSSAEGAAKEEPKRRSARLSAKPPAKVEAKPKKAAAKDKSSDKKVQTKGKRGAKGKQAEVANQETKEDLPAENGETKTEESPASDEAGEKEAKSDSGSETPGTSESATPESYEQLAPQPCVGETLHSSLPRDSELFVPEEGSSEKESEDAPKTSPPTPGKHGLEQTGEEKVMVTVPDKNPPCPCCGTRVNSVLNLIEHLKVSHGKRGVCFRCAKCGKENSNYHSVVCHFKKCRGPETEKAPAGEWICEVCNRDFTTKIGLGQHKRLAHPAVRNQERIVASQPKETSNRGAHKRCWTKEEEELLIRLEAQFEGNKNINKLIAEHITTKTAKQISDKRRLLSRKPAEEPREEPGTCHHTRRAAASLRTEPEMSHHAQAEDRDNGPGRRPLPGRAAAGGRTMDEIRRHPDKGNGQQRPTKQKSEEQLQAYYKKTLEERLSAGALNTFPRAFKQVMEGRDIKLVINQTAQDCFGCLESISQIRTATRDKKDTVTREKHPKKPFQKWMKKRAIKKGNYLRFQRLFYLDRGKLAKIILDDIECLSCDIPLSEIYSVFKTRWETTGSFKSLGDFKTYGKADNTAFRELITAKEIEKNVQEMSKGSAPGPDGITLGDVVKMDPEFSRTMEIFNLWLTTGKIPDMVRGCRTVLIPKSSKPDRLKDINNWRPITIGSILLRLFSRIVTARLSKACPLNPRQRGFIRAAGCSENLKLLQTIIWSAKREHRPLGVVFVDIAKAFDTVSHQHIIHALQQREVDPHIVGLVSNMYENISTYITTKRNTHTDKIQIRVGVKQGDPMSPLLFNLAMDPLLCKLEESGKGYHRGQSSITAMAFADDLVLLSDSWENMNTNISILETFCNLTGLKTQGQKCHGFYIKPTKKSYTINDCAAWTINGTPLNMIDPGESEKYLGLQFDPWIGIARSGLSTKLMFWLQRIDQAPLKPLQKTDILKTYTIPRLIYIADHSEVKSALLETLDQKIRTAVKEWLHLPPCTCDAILYSSTRDGGLGITKLAGLIPSVQARRLHRIAQSSDDTMKCFMEKEKMEQLHKKLWIQAGGDRENIPSIWEAPPSSEPPNNVSTNSEWEAPTQKDKFPKPCNWRKNEFKKWTKLASQGRGIVNFERDKISNHWIQYYRRIPHRKLLTALQLRANVYPTREFLARGRQDQYIKACRHCDADNESCAHIIGNCPVTQDARIKRHNYICELLLEEAKKKDWVVFKEPHIRDSNKELYKPDLIFVKDGRALVVDVTVRYEAAKSSLEEAAAEKVRKYKHLETEVRHLTNAKDVTFVGFPLGARGKWHQDNFKLLTELGLSKSRQVKMAETFSTVALFSSVDIVHMFASRARKSMVM

SEQ ID NO: 992 - protein, 1665 aa, synthetic construct
MAPKKKRKVNISGSSCGSPNSADTSSDFKDLWTKLKECHDREVQGLQVKVTKLKQERILDAQRLEEFFTKNQQLREQQKVLHETIKVLEDRLRAGLCDRCAVTEEHMRKKQQEFENIRQQNLKLITELMNERNTLQEENKKLSEQLQQKIENDQQHQAAELECEEDVIPDSPITAFSFSGVNRLRRKENPHVRYIEQTHTKLEHSVCANEMRKVSKSSTHPQHNPNENEILVADTYDQSQSPMAKAHGTSSYTPDKSSFNLATVVAETLGLGVQEESETQGPMSPLGDELYHCLEGNHKKQPFESGSETPGTSESATPEGSPKRKVSSAEGAAKEEPKRRSARLSAKPPAKVEAKPKKAAAKDKSSDKKVQTKGKRGAKGKQAEVANQETKEDLPAENGETKTEESPASDEAGEKEAKSDSGSETPGTSESATPESYEQLAPQPKVGETLHSSLPRDSELFVPEEGSSEKESEDAPKTSPPTPGKHGLEQTGEEKVMVTVPDKNPPCPCCGTRVNSVLNLIEHLKVSHGKRGVCFRCAKCGKENSNYHSVVCHFKKCRGPETEKAPAGEWICEVCNRDFTTKIGLGQHKRLAHPAVRNQERIVASQPKETSNRGAHKRCWTKEEEELLIRLEAQFEGNKNINKLIAEHITTKTAKQISDKRRLLSRKPAEEPREEPGTCHHTRRAAASLRTEPEMSHHAQAEDRDNGPGRRPLPGRAAAGGRTMDEIRRHPDKGNGQQRPTKQKSEEQLQAYYKKTLEERLSAGALNTFPRAFKQVMEGRDIKLVINQTAQDCFGCLESISQIRTATRDKKDTVTREKHPKKPFQKWMKKRAIKKGNYLRFQRLFYLDRGKLAKIILDDIECLSCDIPLSEIYSVFKTRWETTGSFKSLGDFKTYGKADNTAFRELITAKEIEKNVQEMSKGSAPGPDGITLGDVVKMDPEFSRTMEIFNLWLTTGKIPDMVRGCRTVLIPKSSKPDRLKDINNWRPITIGSILLRLFSRIVTARLSKACPLNPRQRGFIRAAGCSENLKLLQTIIWSAKREHRPLGVVFVDIAKAFDTVSHQHIIHALQQREVDPHIVGLVSNMYENISTYITTKRNTHTDKIQIRVGVKQGDPMSPLLFNLAMDPLLCKLEESGKGYHRGQSSITAMAFADDLVLLSDSWENMNTNISILETFCNLTGLKTQGQKCHGFYIKPTKKSYTINDCAAWTINGTPLNMIDPGESEKYLGLQFDPWIGIARSGLSTKLDFWLQRIDQAPLKPLQKTDILKTYTIPRLIYIADHSEVKSALLETLDQKIRTAVKEWLHLPPCTCDAILYSSTRDGGLGITKLAGLIPSVQARRLHRIAQSSDDTMKCFMEKEKMEQLHKKLWIQAGGDRENIPSIWEAPPSSEPPNNVSTNSEWEAPTQKDKFPKPCNWRKNEFKKWTKLASQGRGIVNFERDKISNHWIQYYRRIPHRKLLTALQLRANVYPTREFLARGRQDQYIKACRHCDADNESCAHIIGNCPVTQDARIKRHNYICELLLEEAKKKDWVVFKEPHIRDSNKELYKPDLIFVKDGRALVVDVTVRYEAAKSSLEEAAAEKVRKYKHLETEVRHLTNAKDVTFVGFPLGARGKWHQDNFKLLTELGLSKSRQVKMAETFSTVALFSSVDIVHMFASRARKSMVM

SEQ ID NO: 993 - protein, 1665 aa, synthetic construct
MAPKKKRKVNISGSSCGSPNSADTSSDFKDLWTKLKECHDREVQGLQVKVTKLKQERILDAQRLEEFFTKNQQLREQQKVLHETIKVLEDRLRAGLCDRCAVTEEHMRKKQQEFENIRQQNLKLITELMNERNTLQEENKKLSEQLQQKIENDQQHQAAELECEEDVIPDSPITAFSFSGVNRLRRKENPHVRYIEQTHTKLEHSVCANEMRKVSKSSTHPQHNPNENEILVADTYDQSQSPMAKAHGTSSYTPDKSSFNLATVVAETLGLGVQEESETQGPMSPLGDELYHCLEGNHKKQPFESGSETPGTSESATPEGSPKRKVSSAEGAAKEEPKRRSARLSAKPPAKVEAKPKKAAAKDKSSDKKVQTKGKRGAKGKQAEVANQETKEDLPAENGETKTEESPASDEAGEKEAKSDSGSETPGTSESATPESYEQLAPQPCVGETLHRSLPRDSELFVPEEGSSEKESEDAPKTSPPTPGKHGLEQTGEEKVMVTVPDKNPPCPCCGTRVNSVLNLIEHLKVSHGKRGVCFRCAKCGKENSNYHSVVCHFKKCRGPETEKAPAGEWICEVCNRDFTTKIGLGQHKRLAHPAVRNQERIVASQPKETSNRGAHKRCWTKEEEELLIRLEAQFEGNKNINKLIAEHITTKTAKQISDKRRLLSRKPAEEPREEPGTCHHTRRAAASLRTEPEMSHHAQAEDRDNGPGRRPLPGRAAAGGRTMDEIRRHPDKGNGQQRPTKQKSEEQLQAYYKKTLEERLSAGALNTFPRAFKQVMEGRDIKLVINQTAQDCFGCLESISQIRTATRDKKDTVTREKHPKKPFQKWMKKRAIKKGNYLRFQRLFYLDRGKLAKIILDDIECLSCDIPLSEIYSVFKTRWETTGSFKSLGDFKTYGKADNTAFRELITAKEIEKNVQEMSKGSAPGPDGITLGDVVKMDPEFSRTMEIFNLWLTTGKIPDMVRGCRTVLIPKSSKPDRLKDINNWRPITIGSILLRLFSRIVTARLSKACPLNPRQRGFIRAAGCSENLKLLQTIIWSAKREHRPLGVVFVDIAKAFDTVSHQHIIHALQQREVDPHIVGLVSNMYENISTYITTKRNTHTDKIQIRVGVKQGDPMSPLLFNLAMDPLLCKLEESGKGYHRGQSSITAMAFADDLVLLSDSWENMNTNISILETFCNLTGLKTQGQKCHGFYIKPTKKSYTINDCAAWTINGTPLNMIDPGESEKYLGLQFDPWIGIARSGLSTKLDFWLQRIDQAPLKPLQKTDILKTYTIPRLIYIADHSEVKSALLETLDQKIRTAVKEWLHLPPCTCDAILYSSTRDGGLGITKLAGLIPSVQARRLHRIAQSSDDTMKCFMEKEKMEQLHKKLWIQAGGDRENIPSIWEAPPSSEPPNNVSTNSEWEAPTQKDKFPKPCNWRKNEFKKWTKLASQGRGIVNFERDKISNHWIQYYRRIPHRKLLTALQLRANVYPTREFLARGRQDQYIKACRHCDADNESCAHIIGNCPVTQDARIKRHNYICELLLEEAKKKDWVVFKEPHIRDSNKELYKPDLIFVKDGRALVVDVTVRYEAAKSSLEEAAAEKVRKYKHLETEVRHLTNAKDVTFVGFPLGARGKWHQDNFKLLTELGLSKSRQVKMAETFSTVALFSSVDIVHMFASRARKSMVM

SEQ ID NO: 994 - protein, 1665 aa, synthetic construct
MAPKKKRKVNISGSSCGSPNSADTSSDFKDLWTKLKECHDREVQGLQVKVTKLKQERILDAQRLEEFFTKNQQLREQQKVLHETIKVLEDRLRAGLCDRCAVTEEHMRKKQQEFENIRQQNLKLITELMNERNTLQEENKKLSEQLQQKIENDQQHQAAELECEEDVIPDSPITAFSFSGVNRLRRKENPHVRYIEQTHTKLEHSVCANEMRKVSKSSTHPQHNPNENEILVADTYDQSQSPMAKAHGTSSYTPDKSSFNLATVVAETLGLGVQEESETQGPMSPLGDELYHCLEGNHKKQPFESGSETPGTSESATPEGSPKRKVSSAEGAAKEEPKRRSARLSAKPPAKVEAKPKKAAAKDKSSDKKVQTKGKRGAKGKQAEVANQETKEDLPAENGETKTEESPASDEAGEKEAKSDSGSETPGTSESATPESYEQLRPQPCVGETLHSSLPRDSELFVPEEGSSEKESEDAPKTSPPTPGKHGLEQTGEEKVMVTVPDKNPPCPCCGTRVNSVLNLIEHLKVSHGKRGVCFRCAKCGKENSNYHSVVCHFKKCRGPETEKAPAGEWICEVCNRDFTTKIGLGQHKRLAHPAVRNQERIVASQPKETSNRGAHKRCWTKEEEELLIRLEAQFEGNKNINKLIAEHITTKTAKQISDKRRLLSRKPAEEPREEPGTCHHTRRAAASLRTEPEMSHHAQAEDRDNGPGRRPLPGRAAAGGRTMDEIRRHPDKGNGQQRPTKQKSEEQLQAYYKKTLEERLSAGALNTFPRAFKQVMEGRDIKLVINQTAQDCFGCLESISQIRTATRDKKDTVTREKHPKKPFQKWMKKRAIKKGNYLRFQRLFYLDRGKLAKIILDDIECLSCDIPLSEIYSVFKTRWETTGSFKSLGDFKTYGKADNTAFRELITAKEIEKNVQEMSKGSAPGPDGITLGDVVKMDPEFSRTMEIFNLWLTTGKIPDMVRGCRTVLIPKSSKPDRLKDINNWRPITIGSILLRLFSRIVTARLSKACPLNPRQRGFIRAAGCSENLKLLQTIIWSAKREHRPLGVVFVDIAKAFDTVSHQHIIHALQQREVDPHIVGLVSNMYENISTYITTKRNTHTDKIQIRVGVKQGDPMSPLLFNLAMDPLLCKLEESGKGYHRGQSSITAMAFADDLVLLSDSWENMNTNISILETFCNLTGLKTQGQKCHGFYIKPTKKSYTINDCAAWTINGTPLNMIDPGESEKYLGLQFDPWIGIARSGLSTKLDFWLQRIDQAPLKPLQKTDILKTYTIPRLIYIADHSEVKSALLETLDQKIRTAVKEWLHLPPCTCDAILYSSTRDGGLGITKLAGLIPSVQARRLHRIAQSSDDTMKCFMEKEKMEQLHKKLWIQAGGDRENIPSIWEAPPSSEPPNNVSTNSEWEAPTQKDKFPKPCNWRKNEFKKWTKLASQGRGIVNFERDKISNHWIQYYRRIPHRKLLTALQLRANVYPTREFLARGRQDQYIKACRHCDADNESCAHIIGNCPVTQDARIKRHNYICELLLEEAKKKDWVVFKEPHIRDSNKELYKPDLIFVKDGRALVVDVTVRYEAAKSSLEEAAAEKVRKYKHLETEVRHLTNAKDVTFVGFPLGARGKWHQDNFKLLTELGLSKSRQVKMAETFSTVALFSSVDIVHMFASRARKSMVM

SEQ ID NO: 995 - protein, 1665 aa, synthetic construct
MAPKKKRKVNISGSSCGSPNSADTSSDFKDLWTKLKECHDREVQGLQVKVTKLKQERILDAQRLEEFFTKNQQLREQQKVLHETIKVLEDRLRAGLCDRCAVTEEHMRKKQQEFENIRQQNLKLITELMNERNTLQEENKKLSEQLQQKIENDQQHQAAELECEEDVIPDSPITAFSFSGVNRLRRKENPHVRYIEQTHTKLEHSVCANEMRKVSKSSTHPQHNPNENEILVADTYDQSQSPMAKAHGTSSYTPDKSSFNLATVVAETLGLGVQEESETQGPMSPLGDELYHCLEGNHKKQPFESGSETPGTSESATPEGSPKRKVSSAEGAAKEEPKRRSARLSAKPPAKVEAKPKKAAAKDKSSDKKVQTKGKRGAKGKQAEVANQETKEDLPAENGETKTEESPASDEAGEKEAKSDSGSETPGTSESATPESYEQLAPQPCVGETLHSSLPRDSELFVPEEGSSEKESEDAPKTSPPTPGKHGLEQTGEEKVMVTVPDKNPPCPCCGTRVNSVLNLIEHLKVSHGKRGVCFRCAKCGKENSNYHSVVCHFKKCRGPETEKAPAGEWICEVCNRDFTTKIGLGQHKRLAHPAVRNQERIVASQPKETSNRGAHKRCWTKEEEELLIRLEAQFEGNKNINKLIAEHITTKTAKQISDKRRLLSRKPAEEPREEPGTCHHTRRAAASLRTEPEMSHHAQAEDRDNGPGRRPLPGRAAAGGRTMDEIRRHPDKGNGQQRPTKQKSEEQLQAYYKKTLEERLSAGALNTFPRAFKQVMEGRDIKLVINQTAQDCFGCLESISQIRTATRDKKDTVTREKHPKKRFQKWMKKRAIKKGNYLRFQRLFYLDRGKLAKIILDDIECLSCDIPLSEIYSVFKTRWETTGSFKSLGDFKTYGKADNTAFRELITAKEIEKNVQEMSKGSAPGPDGITLGDVVKMDPEFSRTMEIFNLWLTTGKIPDMVRGCRTVLIPKSSKPDRLKDINNWRPITIGSILLRLFSRIVTARLSKACPLNPRQRGFIRAAGCSENLKLLQTIIWSAKREHRPLGVVFVDIAKAFDTVSHQHIIHALQQREVDPHIVGLVSNMYENISTYITTKRNTHTDKIQIRVGVKQGDPMSPLLFNLAMDPLLCKLEESGKGYHRGQSSITAMAFADDLVLLSDSWENMNTNISILETFCNLTGLKTQGQKCHGFYIKPTKKSYTINDCAAWTINGTPLNMIDPGESEKYLGLQFDPWIGIARSGLSTKLDFWLQRIDQAPLKPLQKTDILKTYTIPRLIYIADHSEVKSALLETLDQKIRTAVKEWLHLPPCTCDAILYSSTRDGGLGITKLAGLIPSVQARRLHRIAQSSDDTMKCFMEKEKMEQLHKKLWIQAGGDRENIPSIWEAPPSSEPPNNVSTNSEWEAPTQKDKFPKPCNWRKNEFKKWTKLASQGRGIVNFERDKISNHWIQYYRRIPHRKLLTALQLRANVYPTREFLARGRQDQYIKACRHCDADNESCAHIIGNCPVTQDARIKRHNYICELLLEEAKKKDWVVFKEPHIRDSNKELYKPDLIFVKDGRALVVDVTVRYEAAKSSLEEAAAEKVRKYKHLETEVRHLTNAKDVTFVGFPLGARGKWHQDNFKLLTELGLSKSRQVKMAETFSTVALFSSVDIVHMFASRARKSMVM

SEQ ID NO: 996 - protein, 1665 aa, synthetic construct
MAPKKKRKVNISGSSCGSPNSADTSSDFKDLWTKLKECHDREVQGLQVKVTKLKQERILDAQRLEEFFTKNQQLREQQKVLHETIKVLEDRLRAGLCDRCAVTEEHMRKKQQEFENIRQQNLKLITELMNERNTLQEENKKLSEQLQQKIENDQQHQAAELECEEDVIPDSPITAFSFSGVNRLRRKENPHVRYIEQTHTKLEHSVCANEMRKVSKSSTHPQHNPNENEILVADTYDQSQSPMAKAHGTSSYTPDKSSFNLATVVAETLGLGVQEESETQGPMSPLGDELYHCLEGNHKKQPFESGSETPGTSESATPEGSPKRKVSSAEGAAKEEPKRRSARLSAKPPAKVEAKPKKAAAKDKSSDKKVQTKGKRGAKGKQAEVANQETKEDLPAENGETKTEESPASDEAGEKEAKSDSGSETPGTSESATPESYEQLAPQPCVGETLHSSLPRDSELFVPEEGSSEKESEDAPKTRPPTPGKHGLEQTGEEKVMVTVPDKNPPCPCCGTRVNSVLNLIEHLKVSHGKRGVCFRCAKCGKENSNYHSVVCHFKKCRGPETEKAPAGEWICEVCNRDFTTKIGLGQHKRLAHPAVRNQERIVASQPKETSNRGAHKRCWTKEEEELLIRLEAQFEGNKNINKLIAEHITTKTAKQISDKRRLLSRKPAEEPREEPGTCHHTRRAAASLRTEPEMSHHAQAEDRDNGPGRRPLPGRAAAGGRTMDEIRRHPDKGNGQQRPTKQKSEEQLQAYYKKTLEERLSAGALNTFPRAFKQVMEGRDIKLVINQTAQDCFGCLESISQIRTATRDKKDTVTREKHPKKPFQKWMKKRAIKKGNYLRFQRLFYLDRGKLAKIILDDIECLSCDIPLSEIYSVFKTRWETTGSFKSLGDFKTYGKADNTAFRELITAKEIEKNVQEMSKGSAPGPDGITLGDVVKMDPEFSRTMEIFNLWLTTGKIPDMVRGCRTVLIPKSSKPDRLKDINNWRPITIGSILLRLFSRIVTARLSKACPLNPRQRGFIRAAGCSENLKLLQTIIWSAKREHRPLGVVFVDIAKAFDTVSHQHIIHALQQREVDPHIVGLVSNMYENISTYITTKRNTHTDKIQIRVGVKQGDPMSPLLFNLAMDPLLCKLEESGKGYHRGQSSITAMAFADDLVLLSDSWENMNTNISILETFCNLTGLKTQGQKCHGFYIKPTKKSYTINDCAAWTINGTPLNMIDPGESEKYLGLQFDPWIGIARSGLSTKLDFWLQRIDQAPLKPLQKTDILKTYTIPRLIYIADHSEVKSALLETLDQKIRTAVKEWLHLPPCTCDAILYSSTRDGGLGITKLAGLIPSVQARRLHRIAQSSDDTMKCFMEKEKMEQLHKKLWIQAGGDRENIPSIWEAPPSSEPPNNVSTNSEWEAPTQKDKFPKPCNWRKNEFKKWTKLASQGRGIVNFERDKISNHWIQYYRRIPHRKLLTALQLRANVYPTREFLARGRQDQYIKACRHCDADNESCAHIIGNCPVTQDARIKRHNYICELLLEEAKKKDWVVFKEPHIRDSNKELYKPDLIFVKDGRALVVDVTVRYEAAKSSLEEAAAEKVRKYKHLETEVRHLTNAKDVTFVGFPLGARGKWHQDNFKLLTELGLSKSRQVKMAETFSTVALFSSVDIVHMFASRARKSMVM

SEQ ID NO: 997 - protein, 1665 aa, synthetic construct
MAPKKKRKVNISGSSCGSPNSADTSSDFKDLWTKLKECHDREVQGLQVKVTKLKQERILDAQRLEEFFTKNQQLREQQKVLHETIKVLEDRLRAGLCDRCAVTEEHMRKKQQEFENIRQQNLKLITELMNERNTLQEENKKLSEQLQQKIENDQQHQAAELECEEDVIPDSPITAFSFSGVNRLRRKENPHVRYIEQTHTKLEHSVCANEMRKVSKSSTHPQHNPNENEILVADTYDQSQSPMAKAHGTSSYTPDKSSFNLATVVAETLGLGVQEESETQGPMSPLGDELYHCLEGNHKKQPFESGSETPGTSESATPEGSPKRKVSSAEGAAKEEPKRRSARLSAKPPAKVEAKPKKAAAKDKSSDKKVQTKGKRGAKGKQAEVANQETKEDLPAENGETKTEESPASDEAGEKEAKSDSGSETPGTSESATPESYEQLAPQPCVGETLHSSLPRDSELFVPEEGSSEKESEDAPKTSPPTPGKHGLEQTGEEKVMVTVPDKNPPCPCCGTRVNSVLNLIEHLKVSHGKRGVCFRCAKCGKENSNYHSVVCHFKKCRGPETEKAPAGEWICEVCNRDFTTKIGLGQHKRLAHPAVRNQERIVASQPKETSNRGAHKRCWTKEEEELLIRLEAQFEGNKNINKLIAEHITTKTAKQISDKRRLLSRKPAEEPREEPGTCHHTRRAAASLRTEPEMSHHAQAEDRDNGPGRRPLPGRAAAGGRTMDEIRRHPDKGNGQQRPTKQKSEEQLQAYYKKTLEERLSAGALNTFPRAFKQVMEGRDIKLVINQTAQDCFGCLESISQIRTATRDKKDTVTREKHPKKPFQKWMKKRAIKKGNYLRFQRLFYLDRGKLAKIILDDIECLSCDIPLSEIYSVFKTRWETTGSFKSLGDFKTYGKADNTAFRELITAKEIEKNVQEMSKGSAPGPDGITLGDVVKMDPEFSRTMEIFNLWLTTGKIPDMVRGCRTVLIPKSSKPDRLKDINNWRPITIGSILLRLFSRIVTARLSKACPLNPRQRGFIRAAGCSENLKLLQTIIWSAKREHRPLGVVFVDIAKAFDTVSHQHIIHALQQREVDPHIVGLVSNMYENISTYITTKRNTHTDKIQIRVGVKQGDPMSPLLFNLAMDPLLCKLEESGKGYHRGQSSITAMAFADWLVLLSDSWENMNTNISILETFCNLTGLKTQGQKCHGFYIKPTKKSYTINDCAAWTINGTPLNMIDPGESEKYLGLQFDPWIGIARSGLSTKLDFWLQRIDQAPLKPLQKTDILKTYTIPRLIYIADHSEVKSALLETLDQKIRTAVKEWLHLPPCTCDAILYSSTRDGGLGITKLAGLIPSVQARRLHRIAQSSDDTMKCFMEKEKMEQLHKKLWIQAGGDRENIPSIWEAPPSSEPPNNVSTNSEWEAPTQKDKFPKPCNWRKNEFKKWTKLASQGRGIVNFERDKISNHWIQYYRRIPHRKLLTALQLRANVYPTREFLARGRQDQYIKACRHCDADNESCAHIIGNCPVTQDARIKRHNYICELLLEEAKKKDWVVFKEPHIRDSNKELYKPDLIFVKDGRALVVDVTVRYEAAKSSLEEAAAEKVRKYKHLETEVRHLTNAKDVTFVGFPLGARGKWHQDNFKLLTELGLSKSRQVKMAETFSTVALFSSVDIVHMFASRARKSMVM

SEQ ID NO: 998 - protein, 1665 aa, synthetic construct
MAPKKKRKVNISGSSCGSPNSADTSSDFKDLWTKLKECHDREVQGLQVKVTKLKQERILDAQRLEEFFTKNQQLREQQKVLHETIKVLEDRLRAGLCDRCAVTEEHMRKKQQEFENIRQQNLKLITELMNERNTLQEENKKLSEQLQQKIENDQQHQAAELECEEDVIPDSPITAFSFSGVNRLRRKENPHVRYIEQTHTKLEHSVCANEMRKVSKSSTHPQHNPNENEILVADTYDQSQSPMAKAHGTSSYTPDKSSFNLATVVAETLGLGVQEESETQGPMSPLGDELYHCLEGNHKKQPFESGSETPGTSESATPEGSPKRKVSSAEGAAKEEPKRRSARLSAKPPAKVEAKPKKAAAKDKSSDKKVQTKGKRGAKGKQAEVANQETKEDLPAENGETKTEESPASDEAGEKEAKSDSGSETPGTSESATPESYEQLAPQPCVGETLHSSLPRDSELFVPEEGSSEKESEDAPKTSPPTPGKHGLEQTGEEKVMVTVPDKNPPCPCCGTRVNSVLNLIEHLKVSHGKRGVCFRCAKCGKENSNYHSVVCHFKKCRGPETEKAPAGEWICEVCNRDFTTKIGLGQHKRLAHPAVRNQERIVASQPKETSNRGAHKRCWTKEEEELLIRLEAQFEGNKNINKLIAEHITTKTAKQISDKRRLLSRKPAEEPREEPGTCHHTRRAAASLRTEPEMSHHAQAEDRDNGPGRRPLPGRAAAGGRTMDEIRRHPDKGNGQQRPTKQKSEEQLQAYYKKTLEERLSAGALNTFPRAFKQVMEGRDIKLVINQTAQDCFGCLESISQIRTATRDKKDTVTREKHPKKPFQKWMKKRAIKKGNYLRFQRLFYLDRRKLAKIILDDIECLSCDIPLSEIYSVFKTRWETTGSFKSLGDFKTYGKADNTAFRELITAKEIEKNVQEMSKGSAPGPDGITLGDVVKMDPEFSRTMEIFNLWLTTGKIPDMVRGCRTVLIPKSSKPDRLKDINNWRPITIGSILLRLFSRIVTARLSKACPLNPRQRGFIRAAGCSENLKLLQTIIWSAKREHRPLGVVFVDIAKAFDTVSHQHIIHALQQREVDPHIVGLVSNMYENISTYITTKRNTHTDKIQIRVGVKQGDPMSPLLFNLAMDPLLCKLEESGKGYHRGQSSITAMAFADDLVLLSDSWENMNTNISILETFCNLTGLKTQGQKCHGFYIKPTKKSYTINDCAAWTINGTPLNMIDPGESEKYLGLQFDPWIGIARSGLSTKLDFWLQRIDQAPLKPLQKTDILKTYTIPRLIYIADHSEVKSALLETLDQKIRTAVKEWLHLPPCTCDAILYSSTRDGGLGITKLAGLIPSVQARRLHRIAQSSDDTMKCFMEKEKMEQLHKKLWIQAGGDRENIPSIWEAPPSSEPPNNVSTNSEWEAPTQKDKFPKPCNWRKNEFKKWTKLASQGRGIVNFERDKISNHWIQYYRRIPHRKLLTALQLRANVYPTREFLARGRQDQYIKACRHCDADNESCAHIIGNCPVTQDARIKRHNYICELLLEEAKKKDWVVFKEPHIRDSNKELYKPDLIFVKDGRALVVDVTVRYEAAKSSLEEAAAEKVRKYKHLETEVRHLTNAKDVTFVGFPLGARGKWHQDNFKLLTELGLSKSRQVKMAETFSTVALFSSVDIVHMFASRARKSMVM

SEQ ID NO: 999 - protein, 1665 aa, synthetic construct
MAPKKKRKVNISGSSCGSPNSADTSSDFKDLWTKLKECHDREVQGLQVKVTKLKQERILDAQRLEEFFTKNQQLREQQKVLHETIKVLEDRLRAGLCDRCAVTEEHMRKKQQEFENIRQQNLKLITELMNERNTLQEENKKLSEQLQQKIENDQQHQAAELECEEDVIPDSPITAFSFSGVNRLRRKENPHVRYIEQTHTKLEHSVCANEMRKVSKSSTHPQHNPNENEILVADTYDQSQSPMAKAHGTSSYTPDKSSFNLATVVAETLGLGVQEESETQGPMSPLGDELYHCLEGNHKKQPFESGSETPGTSESATPEGSPKRKVSSAEGAAKEEPKRRSARLSAKPPAKVEAKPKKAAAKDKSSDKKVQTKGKRGAKGKQAEVANQETKEDLPAENGETKTEESPASDEAGEKEAKSDSGSETPGTSESATPESYEQLAPQPCVGETLHSSLPRDSELFVPEEGSSEKESEDAPKTSPPTPGKHGLEQTGEEKVMVTVPDKNPPCPCCGTRVNSVLNLIEHLKVSHGKRGVCFRCAKCGKENSNYHSVVCHFKKCRGPETEKAPAGEWICEVCNRDFTTKIGLGQHKRLAHPAVRNQERIVASQPKETSNRGAHKRCWTKEEEELLIRLEAQFEGNKNINKLIAEHITTKTAKQISDKRRLLSRKPAEEPREEPGTCHHTRRAAASLRTEPEMSHHAQAEDRDNGPGRRPLPGRAAAGGRTMDEIRRHPDKGNGQQRPTKQKSEEQLQAYYKKTLEERLSAGALNTFPRAFKQVMEGRDIKLVINQTAQDCFGCLESISQIRTATRDKKDTVTREKHPKKPFQKWMKKRAIKKGNYLRFQRLFYLDRGKLAKIILDDIECLSCDIPLSEIYSVFKTRWETTGSFKSLGDFKTYGKADNTAFRELITAKEIEKNVQEMSKGSAPGPDGITLGDVVKMDPEFSRTMEIFNLWLTTGKIPDMVRGCRTVLIPKSSKPDRLKDINNWRPITIGSILLRLFSRIVTARLSKACPLNPRQRGFIRAAGCSENLKLLQTIIWSAKREHRPLGVVFVDIAKAFDTVSHQHIIHALQQREVDPHIVGLVSNMYENISTYITTKRNTHTDKIQIRVGVKQGDPMSPLLFNLAMDPLLCKLEESGKGYHRGQSSITAMAFADDLVLLSDSWENMNTNISILETFCNLTGLKTQGQKCHGFYIKPTKKSYTINDCAAWTINGTPLNMIDPGESEKYLGLQFDPWIGIARSGLSTKLDFWLQRIDQAPLKPLQKTDILKTYTIPRLIYIADHSEVKSALLETLDQKIRTAVKEWLHLPPCTCDAILYSSTRDGGLGITKLAGLIPSVQARRLHRIAQSSDDTMKCFMEKEKMEQLHKKLWIQAGGDRENIPSIWEAPPSSEPPNNVSTNSEWERPTQKDKFPKPCNWRKNEFKKWTKLASQGRGIVNFERDKISNHWIQYYRRIPHRKLLTALQLRANVYPTREFLARGRQDQYIKACRHCDADNESCAHIIGNCPVTQDARIKRHNYICELLLEEAKKKDWVVFKEPHIRDSNKELYKPDLIFVKDGRALVVDVTVRYEAAKSSLEEAAAEKVRKYKHLETEVRHLTNAKDVTFVGFPLGARGKWHQDNFKLLTELGLSKSRQVKMAETFSTVALFSSVDIVHMFASRARKSMVM

SEQ ID NO: 1000 - protein, 1665 aa, synthetic construct
MAPKKKRKVNISGSSCGSPNSADTSSDFKDLWTKLKECHDREVQGLQVKVTKLKQERILDAQRLEEFFTKNQQLREQQKVLHETIKVLEDRLRAGLCDRCAVTEEHMRKKQQEFENIRQQNLKLITELMNERNTLQEENKKLSEQLQQKIENDQQHQAAELECEEDVIPDSPITAFSFSGVNRLRRKENPHVRYIEQTHTKLEHSVCANEMRKVSKSSTHPQHNPNENEILVADTYDQSQSPMAKAHGTSSYTPDKSSFNLATVVAETLGLGVQEESETQGPMSPLGDELYHCLEGNHKKQPFESGSETPGTSESATPEGSPKRKVSSAEGAAKEEPKRRSARLSAKPPAKVEAKPKKAAAKDKSSDKKVQTKGKRGAKGKQAEVANQETKEDLPAENGETKTEESPASDEAGEKEAKSDSGSETPGTSESATPESYEQLAPQPCVGETLHSSLPRDSELFVPEEGSSEKESEDAPKTSPPTPGKHGLEQTGEEKVMVTVPDKNPPCPCCGTRVNSVLNLIEHLKVSHGKRGVCFRCAKCGKENSNYHSVVCHFKKCRGPETEKAPAGEWICEVCNRDFTTKIGLGQHKRLAHPAVRNQERIVASQPKETSNRGAHKRCWTKEEEELLIRLEAQFEGNKNINKLIAEHITTKTAKQISDKRRLLSRKPAEEPREEPGTCHHTRRAAASLRTEPEMSHHAQAEDRDNGPGRRPLPGRAAAGGRTMDEIRRHPDKGNGQQRPTKQKSEEQLQAYYKKTLEERLSAGALNTFPRAFKQVMEGRDIKLVINQTAQDCFGCLESISQIRTATRDKKDTVTREKHPKKPFQKWMKKRAIKKGNYLRFQRLFYLDRGKLAKIILDDIECLSCDIPLSEIYSVFKTRWETTGSFKSLGDFKTYGKADNTAFRELITAKEIEKNVQEMSKGSAPGPDGITLGDVVKMDPEFSRTMEIFNLWLTTGKIPDMVRGCRTVLIPKSSKPDRLKDINNWRPITIGSILLRLFSRIVTARLSKACPLNPRQRGFIRAAGCSENLKLLQTIIWSAKREHRPLGVVFVDIAKAFDTVSHQHIIHALQQREVDPHIVGLVSNMYENISTYITTKRNTHTDKIQIRVGVKQGRPMSPLLFNLAMDPLLCKLEESGKGYHRGQSSITAMAFADDLVLLSDSWENMNTNISILETFCNLTGLKTQGQKCHGFYIKPTKKSYTINDCAAWTINGTPLNMIDPGESEKYLGLQFDPWIGIARSGLSTKLDFWLQRIDQAPLKPLQKTDILKTYTIPRLIYIADHSEVKSALLETLDQKIRTAVKEWLHLPPCTCDAILYSSTRDGGLGITKLAGLIPSVQARRLHRIAQSSDDTMKCFMEKEKMEQLHKKLWIQAGGDRENIPSIWEAPPSSEPPNNVSTNSEWEAPTQKDKFPKPCNWRKNEFKKWTKLASQGRGIVNFERDKISNHWIQYYRRIPHRKLLTALQLRANVYPTREFLARGRQDQYIKACRHCDADNESCAHIIGNCPVTQDARIKRHNYICELLLEEAKKKDWVVFKEPHIRDSNKELYKPDLIFVKDGRALVVDVTVRYEAAKSSLEEAAAEKVRKYKHLETEVRHLTNAKDVTFVGFPLGARGKWHQDNFKLLTELGLSKSRQVKMAETFSTVALFSSVDIVHMFASRARKSMVM

SEQ ID NO: 1001 - protein, 1665 aa, synthetic construct
MAPKKKRKVNISGSSCGSPNSADTSSDFKDLWTKLKECHDREVQGLQVKVTKLKQERILDAQRLEEFFTKNQQLREQQKVLHETIKVLEDRLRAGLCDRCAVTEEHMRKKQQEFENIRQQNLKLITELMNERNTLQEENKKLSEQLQQKIENDQQHQAAELECEEDVIPDSPITAFSFSGVNRLRRKENPHVRYIEQTHTKLEHSVCANEMRKVSKSSTHPQHNPNENEILVADTYDQSQSPMAKAHGTSSYTPDKSSFNLATVVAETLGLGVQEESETQGPMSPLGDELYHCLEGNHKKQPFESGSETPGTSESATPEGSPKRKVSSAEGAAKEEPKRRSARLSAKPPAKVEAKPKKAAAKDKSSDKKVQTKGKRGAKGKQAEVANQETKEDLPAENGETKTEESPASDEAGEKEAKSDSGSETPGTSESATPESYEQLAPQPCVGETLHSSLPRDSELFVPEEGSSEKESEDAPKTSPPTPGKHGLEQTGEEKVMVTVPDKNPPCPCCGTRVNSVLNLIEHLKVSHGKRGVCFRCAKCGKENSNYHSVVCHFKKCRGPKTEKAPAGEWICEVCNRDFTTKIGLGQHKRLAHPAVRNQERIVASQPKETSNRGAHKRCWTKEEEELLIRLEAQFEGNKNINKLIAEHITTKTAKQISDKRRLLSRKPAEEPREEPGTCHHTRRAAASLRTEPEMSHHAQAEDRDNGPGRRPLPGRAAAGGRTMDEIRRHPDKGNGQQRPTKQKSEEQLQAYYKKTLEERLSAGALNTFPRAFKQVMEGRDIKLVINQTAQDCFGCLESISQIRTATRDKKDTVTREKHPKKPFQKWMKKRAIKKGNYLRFQRLFYLDRGKLAKIILDDIECLSCDIPLSEIYSVFKTRWETTGSFKSLGDFKTYGKADNTAFRELITAKEIEKNVQEMSKGSAPGPDGITLGDVVKMDPEFSRTMEIFNLWLTTGKIPDMVRGCRTVLIPKSSKPDRLKDINNWRPITIGSILLRLFSRIVTARLSKACPLNPRQRGFIRAAGCSENLKLLQTIIWSAKREHRPLGVVFVDIAKAFDTVSHQHIIHALQQREVDPHIVGLVSNMYENISTYITTKRNTHTDKIQIRVGVKQGDPMSPLLFNLAMDPLLCKLEESGKGYHRGQSSITAMAFADDLVLLSDSWENMNTNISILETFCNLTGLKTQGQKCHGFYIKPTKKSYTINDCAAWTINGTPLNMIDPGESEKYLGLQFDPWIGIARSGLSTKLDFWLQRIDQAPLKPLQKTDILKTYTIPRLIYIADHSEVKSALLETLDQKIRTAVKEWLHLPPCTCDAILYSSTRDGGLGITKLAGLIPSVQARRLHRIAQSSDDTMKCFMEKEKMEQLHKKLWIQAGGDRENIPSIWEAPPSSEPPNNVSTNSEWEAPTQKDKFPKPCNWRKNEFKKWTKLASQGRGIVNFERDKISNHWIQYYRRIPHRKLLTALQLRANVYPTREFLARGRQDQYIKACRHCDADNESCAHIIGNCPVTQDARIKRHNYICELLLEEAKKKDWVVFKEPHIRDSNKELYKPDLIFVKDGRALVVDVTVRYEAAKSSLEEAAAEKVRKYKHLETEVRHLTNAKDVTFVGFPLGARGKWHQDNFKLLTELGLSKSRQVKMAETFSTVALFSSVDIVHMFASRARKSMVM

SEQ ID NO: 1002 - protein, 1665 aa, synthetic construct
MAPKKKRKVNISGSSCGSPNSADTSSDFKDLWTKLKECHDREVQGLQVKVTKLKQERILDAQRLEEFFTKNQQLREQQKVLHETIKVLEDRLRAGLCDRCAVTEEHMRKKQQEFENIRQQNLKLITELMNERNTLQEENKKLSEQLQQKIENDQQHQAAELECEEDVIPDSPITAFSFSGVNRLRRKENPHVRYIEQTHTKLEHSVCANEMRKVSKSSTHPQHNPNENEILVADTYDQSQSPMAKAHGTSSYTPDKSSFNLATVVAETLGLGVQEESETQGPMSPLGDELYHCLEGNHKKQPFESGSETPGTSESATPEGSPKRKVSSAEGAAKEEPKRRSARLSAKPPAKVEAKPKKAAAKDKSSDKKVQTKGKRGAKGKQAEVANQETKEDLPAENGETKTEESPASDEAGEKEAKSDSGSETPGTSESATPESYEQLAPQPCVGETLHSSLPRDSELFVPEEGSSEKESEDAPKTSPPTPGKHGLEQTGEEKVMVTVPDKNPPCPCCGTRVNSVLNLIEHLKVSHGKRGVCFRCAKCGKENSNYHSVVCHFKKCRGPETEKAPAGEWICEVCNRDFTTKIGLGQHKRLAHPAVRNQERIVASQPKETSNRGAHKRCWTKEEEELLIRLEAQFEGNKNINKLIAEHITTKTAKQISDKRRLLSRKPAEEPREEPGTCHHTRRAAASLRTEPEMSHHAQAEDRDNGPGRRPLPGRAAAGGRTMDEIRRHPDKGNGQQRPTKQKSEEQLQAYYKKTLEERLSAGALNTFPRAFKQVMEGRDIKLVINQTAQDCFGCLESISQIRTAKRDKKDTVTREKHPKKPFQKWMKKRAIKKGNYLRFQRLFYLDRGKLAKIILDDIECLSCDIPLSEIYSVFKTRWETTGSFKSLGDFKTYGKADNTAFRELITAKEIEKNVQEMSKGSAPGPDGITLGDVVKMDPEFSRTMEIFNLWLTTGKIPDMVRGCRTVLIPKSSKPDRLKDINNWRPITIGSILLRLFSRIVTARLSKACPLNPRQRGFIRAAGCSENLKLLQTIIWSAKREHRPLGVVFVDIAKAFDTVSHQHIIHALQQREVDPHIVGLVSNMYENISTYITTKRNTHTDKIQIRVGVKQGDPMSPLLFNLAMDPLLCKLEESGKGYHRGQSSITAMAFADDLVLLSDSWENMNTNISILETFCNLTGLKTQGQKCHGFYIKPTKKSYTINDCAAWTINGTPLNMIDPGESEKYLGLQFDPWIGIARSGLSTKLDFWLQRIDQAPLKPLQKTDILKTYTIPRLIYIADHSEVKSALLETLDQKIRTAVKEWLHLPPCTCDAILYSSTRDGGLGITKLAGLIPSVQARRLHRIAQSSDDTMKCFMEKEKMEQLHKKLWIQAGGDRENIPSIWEAPPSSEPPNNVSTNSEWEAPTQKDKFPKPCNWRKNEFKKWTKLASQGRGIVNFERDKISNHWIQYYRRIPHRKLLTALQLRANVYPTREFLARGRQDQYIKACRHCDADNESCAHIIGNCPVTQDARIKRHNYICELLLEEAKKKDWVVFKEPHIRDSNKELYKPDLIFVKDGRALVVDVTVRYEAAKSSLEEAAAEKVRKYKHLETEVRHLTNAKDVTFVGFPLGARGKWHQDNFKLLTELGLSKSRQVKMAETFSTVALFSSVDIVHMFASRARKSMVM

SEQ ID NO: 1003 - protein, 1665 aa, synthetic construct
MAPKKKRKVNISGSSCGSPNSADTSSDFKDLWTKLKECHDREVQGLQVKVTKLKQERILDAQRLEEFFTKNQQLREQQKVLHETIKVLEDRLRAGLCDRCAVTEEHMRKKQQEFENIRQQNLKLITELMNERNTLQEENKKLSEQLQQKIENDQQHQAAELECEEDVIPDSPITAFSFSGVNRLRRKENPHVRYIEQTHTKLEHSVCANEMRKVSKSSTHPQHNPNENEILVADTYDQSQSPMAKAHGTSSYTPDKSSFNLATVVAETLGLGVQEESETQGPMSPLGDELYHCLEGNHKKQPFESGSETPGTSESATPEGSPKRKVSSAEGAAKEEPKRRSARLSAKPPAKVEAKPKKAAAKDKSSDKKVQTKGKRGAKGKQAEVANQETKEDLPAENGETKTEESPASDEAGEKEAKSDSGSETPGTSESATPESYEQLAPQPCVGETLHSSLPRDSELFVPEEGSSEKESEDAPKTSPPTPGKHGLEQTGEEKVMVTVPDKNPPCPCCGTRVNSVLNLIEHLKVSHGKRGVCFRCAKCGKENSNYHSVVCHFKKCRGPETEKAPAGEWICEVCNRDFTTKIGLGQHKRLAHPAVRNQERIVASQPKETSNRGAHKRCWTKEEEELLIRLEAQFEGNKNINKLIAEHITTKTAKQISDKRRLLSRKPAEEPREEPGTCHHTRRAAASLRTEPEMSHHAQAEDRDNGPGRRPLPGRAAAGGRTMDEIRRHPDKGNGQQRPTKQKSEEQLQAYYKKTLEERLSAGALNTFPRAFKQVMEGRDIKLVINQTAQDCFGCLESISQIRTATRDKKDTVTREKHPKKPFQKWMKKRAIKKGNYLRFQRRFYLDRGKLAKIILDDIECLSCDIPLSEIYSVFKTRWETTGSFKSLGDFKTYGKADNTAFRELITAKEIEKNVQEMSKGSAPGPDGITLGDVVKMDPEFSRTMEIFNLWLTTGKIPDMVRGCRTVLIPKSSKPDRLKDINNWRPITIGSILLRLFSRIVTARLSKACPLNPRQRGFIRAAGCSENLKLLQTIIWSAKREHRPLGVVFVDIAKAFDTVSHQHIIHALQQREVDPHIVGLVSNMYENISTYITTKRNTHTDKIQIRVGVKQGDPMSPLLFNLAMDPLLCKLEESGKGYHRGQSSITAMAFADDLVLLSDSWENMNTNISILETFCNLTGLKTQGQKCHGFYIKPTKKSYTINDCAAWTINGTPLNMIDPGESEKYLGLQFDPWIGIARSGLSTKLDFWLQRIDQAPLKPLQKTDILKTYTIPRLIYIADHSEVKSALLETLDQKIRTAVKEWLHLPPCTCDAILYSSTRDGGLGITKLAGLIPSVQARRLHRIAQSSDDTMKCFMEKEKMEQLHKKLWIQAGGDRENIPSIWEAPPSSEPPNNVSTNSEWEAPTQKDKFPKPCNWRKNEFKKWTKLASQGRGIVNFERDKISNHWIQYYRRIPHRKLLTALQLRANVYPTREFLARGRQDQYIKACRHCDADNESCAHIIGNCPVTQDARIKRHNYICELLLEEAKKKDWVVFKEPHIRDSNKELYKPDLIFVKDGRALVVDVTVRYEAAKSSLEEAAAEKVRKYKHLETEVRHLTNAKDVTFVGFPLGARGKWHQDNFKLLTELGLSKSRQVKMAETFSTVALFSSVDIVHMFASRARKSMVM

SEQ ID NO: 1004 - protein, 1665 aa, synthetic construct
MAPKKKRKVNISGSSCGSPNSADTSSDFKDLWTKLKECHDREVQGLQVKVTKLKQERILDAQRLEEFFTKNQQLREQQKVLHETIKVLEDRLRAGLCDRCAVTEEHMRKKQQEFENIRQQNLKLITELMNERNTLQEENKKLSEQLQQKIENDQQHQAAELECEEDVIPDSPITAFSFSGVNRLRRKENPHVRYIEQTHTKLEHSVCANEMRKVSKSSTHPQHNPNENEILVADTYDQSQSPMAKAHGTSSYTPDKSSFNLATVVAETLGLGVQEESETQGPMSPLGDELYHCLEGNHKKQPFESGSETPGTSESATPEGSPKRKVSSAEGAAKEEPKRRSARLSAKPPAKVEAKPKKAAAKDKSSDKKVQTKGKRGAKGKQAEVANQETKEDLPAENGETKTEESPASDEAGEKEAKSDSGSETPGTSESATPESYEQLAPQPCVGETLHSSLPRDSELFVPEEGSSEKESEDAPKTSPPTPGKHGLEQTGEEKVMVTVPDKNPPCPCCGTRVNSVLNLIEHLKVSHGKRGVCFRCAKCGKENSNYHSVVCHFKKCRGPETEKAPAGEWICEVCNRDFTTKIGLGQHKRLAHPAVRNQERIVASQPKETSNRGAHKRCWTKEEEELLIRLEAQFEGNKNINKLIAEHITTKTAKQISDKRRLLSRKPAEEPREEPGTCHHTRRAAASLRTEPEMSHHAQAEDRDNGPGRRPLPGRAAAGGRTMDEIRRHPDKGNGQQRPTKQKSEEQLQAYYKKTLEERLSAGALNTFPRAFKQVMEGRDIKLVINQTAQDCFGCLESISQIRTATRDKKDTVTREKHPKKPFQKWMKKRAIKKGNYLRFQRLFYLDRGKLAKIILDDIECLRCDIPLSEIYSVFKTRWETTGSFKSLGDFKTYGKADNTAFRELITAKEIEKNVQEMSKGSAPGPDGITLGDVVKMDPEFSRTMEIFNLWLTTGKIPDMVRGCRTVLIPKSSKPDRLKDINNWRPITIGSILLRLFSRIVTARLSKACPLNPRQRGFIRAAGCSENLKLLQTIIWSAKREHRPLGVVFVDIAKAFDTVSHQHIIHALQQREVDPHIVGLVSNMYENISTYITTKRNTHTDKIQIRVGVKQGDPMSPLLFNLAMDPLLCKLEESGKGYHRGQSSITAMAFADDLVLLSDSWENMNTNISILETFCNLTGLKTQGQKCHGFYIKPTKKSYTINDCAAWTINGTPLNMIDPGESEKYLGLQFDPWIGIARSGLSTKLDFWLQRIDQAPLKPLQKTDILKTYTIPRLIYIADHSEVKSALLETLDQKIRTAVKEWLHLPPCTCDAILYSSTRDGGLGITKLAGLIPSVQARRLHRIAQSSDDTMKCFMEKEKMEQLHKKLWIQAGGDRENIPSIWEAPPSSEPPNNVSTNSEWEAPTQKDKFPKPCNWRKNEFKKWTKLASQGRGIVNFERDKISNHWIQYYRRIPHRKLLTALQLRANVYPTREFLARGRQDQYIKACRHCDADNESCAHIIGNCPVTQDARIKRHNYICELLLEEAKKKDWVVFKEPHIRDSNKELYKPDLIFVKDGRALVVDVTVRYEAAKSSLEEAAAEKVRKYKHLETEVRHLTNAKDVTFVGFPLGARGKWHQDNFKLLTELGLSKSRQVKMAETFSTVALFSSVDIVHMFASRARKSMVM

SEQ ID NO: 1005 - protein, 1665 aa, synthetic construct
MAPKKKRKVNISGSSCGSPNSADTSSDFKDLWTKLKECHDREVQGLQVKVTKLKQERILDAQRLEEFFTKNQQLREQQKVLHETIKVLEDRLRAGLCDRCAVTEEHMRKKQQEFENIRQQNLKLITELMNERNTLQEENKKLSEQLQQKIENDQQHQAAELECEEDVIPDSPITAFSFSGVNRLRRKENPHVRYIEQTHTKLEHSVCANEMRKVSKSSTHPQHNPNENEILVADTYDQSQSPMAKAHGTSSYTPDKSSFNLATVVAETLGLGVQEESETQGPMSPLGDELYHCLEGNHKKQPFESGSETPGTSESATPEGSPKRKVSSAEGAAKEEPKRRSARLSAKPPAKVEAKPKKAAAKDKSSDKKVQTKGKRGAKGKQAEVANQETKEDLPAENGETKTEESPASDEAGEKEAKSDSGSETPGTSESATPESYEQLAPQPCVGETLHSSLPRDSELFVPEEGSSEKESEDAPKTSPPTPGKHGLEQTGEEKVMVTVPDKNPPCPCCGTRVNSVLNLIEHLKVSHGKRGVCFRCAKCGKENSNYHSVVCHFKKCRGPETEKAPAGEWICEVCNRDFTTKIGLGQHKRLAHPAVRNQERIVASQPKETSNRGAHKRCWTKEEEELLIRLEAQFEGNKNINKLIAEHITTKTAKQISDKRRLLSRKPAEEPREEPGTCHHTRRAAASLRTEPEMSHHAQAEDRDNGPGRRPLPGRAAAGGRTMDEIRRHPDKGNGQQRPTKQKSEEQLQAYYKKTLEERLSAGALNTFPRAFKQVMEGRDIKLVINQTAQDCFGCLESISQIRTATRDKKDTVTREKHPKKPFQKWMKKRAIKKGNYLRFQRLFYLDRGKLAKIILDDIECLSCDIPLSEIYSVFKTRWETTGSYKSLGDFKTYGKADNTAFRELITAKEIEKNVQEMSKGSAPGPDGITLGDVVKMDPEFSRTMEIFNLWLTTGKIPDMVRGCRTVLIPKSSKPDRLKDINNWRPITIGSILLRLFSRIVTARLSKACPLNPRQRGFIRAAGCSENLKLLQTIIWSAKREHRPLGVVFVDIAKAFDTVSHQHIIHALQQREVDPHIVGLVSNMYENISTYITTKRNTHTDKIQIRVGVKQGDPMSPLLFNLAMDPLLCKLEESGKGYHRGQSSITAMAFADDLVLLSDSWENMNTNISILETFCNLTGLKTQGQKCHGFYIKPTKKSYTINDCAAWTINGTPLNMIDPGESEKYLGLQFDPWIGIARSGLSTKLDFWLQRIDQAPLKPLQKTDILKTYTIPRLIYIADHSEVKSALLETLDQKIRTAVKEWLHLPPCTCDAILYSSTRDGGLGITKLAGLIPSVQARRLHRIAQSSDDTMKCFMEKEKMEQLHKKLWIQAGGDRENIPSIWEAPPSSEPPNNVSTNSEWEAPTQKDKFPKPCNWRKNEFKKWTKLASQGRGIVNFERDKISNHWIQYYRRIPHRKLLTALQLRANVYPTREFLARGRQDQYIKACRHCDADNESCAHIIGNCPVTQDARIKRHNYICELLLEEAKKKDWVVFKEPHIRDSNKELYKPDLIFVKDGRALVVDVTVRYEAAKSSLEEAAAEKVRKYKHLETEVRHLTNAKDVTFVGFPLGARGKWHQDNFKLLTELGLSKSRQVKMAETFSTVALFSSVDIVHMFASRARKSMVM

SEQ ID NO: 1006 - protein, 1665 aa, synthetic construct
MAPKKKRKVNISGSSCGSPNSADTSSDFKDLWTKLKECHDREVQGLQVKVTKLKQERILDAQRLEEFFTKNQQLREQQKVLHETIKVLEDRLRAGLCDRCAVTEEHMRKKQQEFENIRQQNLKLITELMNERNTLQEENKKLSEQLQQKIENDQQHQAAELECEEDVIPDSPITAFSFSGVNRLRRKENPHVRYIEQTHTKLEHSVCANEMRKVSKSSTHPQHNPNENEILVADTYDQSQSPMAKAHGTSSYTPDKSSFNLATVVAETLGLGVQEESETQGPMSPLGDELYHCLEGNHKKQPFESGSETPGTSESATPEGSPKRKVSSAEGAAKEEPKRRSARLSAKPPAKVEAKPKKAAAKDKSSDKKVQTKGKRGAKGKQAEVANQETKEDLPAENGETKTEESPASDEAGEKEAKSDSGSETPGTSESATPESYEQLAPQPCVGETLHSSLPRDSELFVPEEGSSEKESEDAPKTSPPTPGKHGLEQTGEEKVMVTVPDKNPPCPCCGTRVNSVLNLIEHLKVSHGKRGVCFRCAKCGKENSNYHSVVCHFKKCRGPETEKAPAGEWICEVCNRDFTTKIGLGQHKRLAHPAVRNQERIVASQPKETSNRGAHKRCWTKEEEELLIRLEAQFEGNKNINKLIAEHITTKTAKQISDKRRLLSRKPAEEPREEPGTCHHTRRAAASLRTEPEMSHHAQAEDRDNGPGRRPLPGRAAAGGRTMDEIRRHPDKGNGQQRPTKQKSEEQLQAYYKKTLEERLSAGALNTFPRAFKQVMEGRDIKLVINQTAQDCFGCLESISQIRTATRDKKDTVTREKHPKKPFQKWMKKRAIKKGNYLRFQRLFYLDRGKLAKIILDDIECLSCDIPLSEIYSVFKTRWETTGSFKSLGDFKTYGKADNTAFRELITAKEIEKNVQEMSKGSAPGPDGITLGDVVKMDPEFSRTMEIFNLWLTTGKIPDMVRGCRTVLIPKSSKPDRLKDINNWRPITIGSILLRLFSRIVTARLSKACPLNPRRRGFIRAAGCSENLKLLQTIIWSAKREHRPLGVVFVDIAKAFDTVSHQHIIHALQQREVDPHIVGLVSNMYENISTYITTKRNTHTDKIQIRVGVKQGDPMSPLLFNLAMDPLLCKLEESGKGYHRGQSSITAMAFADDLVLLSDSWENMNTNISILETFCNLTGLKTQGQKCHGFYIKPTKKSYTINDCAAWTINGTPLNMIDPGESEKYLGLQFDPWIGIARSGLSTKLDFWLQRIDQAPLKPLQKTDILKTYTIPRLIYIADHSEVKSALLETLDQKIRTAVKEWLHLPPCTCDAILYSSTRDGGLGITKLAGLIPSVQARRLHRIAQSSDDTMKCFMEKEKMEQLHKKLWIQAGGDRENIPSIWEAPPSSEPPNNVSTNSEWEAPTQKDKFPKPCNWRKNEFKKWTKLASQGRGIVNFERDKISNHWIQYYRRIPHRKLLTALQLRANVYPTREFLARGRQDQYIKACRHCDADNESCAHIIGNCPVTQDARIKRHNYICELLLEEAKKKDWVVFKEPHIRDSNKELYKPDLIFVKDGRALVVDVTVRYEAAKSSLEEAAAEKVRKYKHLETEVRHLTNAKDVTFVGFPLGARGKWHQDNFKLLTELGLSKSRQVKMAETFSTVALFSSVDIVHMFASRARKSMVM

SEQ ID NO: 1007 - protein, 1665 aa, synthetic construct
MAPKKKRKVNISGSSCGSPNSADTSSDFKDLWTKLKECHDREVQGLQVKVTKLKQERILDAQRLEEFFTKNQQLREQQKVLHETIKVLEDRLRAGLCDRCAVTEEHMRKKQQEFENIRQQNLKLITELMNERNTLQEENKKLSEQLQQKIENDQQHQAAELECEEDVIPDSPITAFSFSGVNRLRRKENPHVRYIEQTHTKLEHSVCANEMRKVSKSSTHPQHNPNENEILVADTYDQSQSPMAKAHGTSSYTPDKSSFNLATVVAETLGLGVQEESETQGPMSPLGDELYHCLEGNHKKQPFESGSETPGTSESATPEGSPKRKVSSAEGAAKEEPKRRSARLSAKPPAKVEAKPKKAAAKDKSSDKKVQTKGKRGAKGKQAEVANQETKEDLPAENGETKTEESPASDEAGEKEAKSDSGSETPGTSESATPESYEQLAPQPCVGETLHSSLPRDSELFVPEEGSSEKESEDAPKTSPPTPGKHGLEQTGEEKVMVTVPDKNPPCPCCGTRVNSVLNLIEHLKVSHGKRGVCFRCAKCGKENSNYHSVVCHFKKCRGPETEKAPAGEWICEVCNRDFTTKIGLGQHKRLAHPAVRNQERIVASQPKETSNRGAHKRCWTKEEEELLIRLEAQFEGNKNINKLIAEHITTKTAKQISDKRRLLSRKPAEEPREEPGTCHHTRRAAASLRTEPEMSHHAQAEDRDNGPGRRPLPGRAAAGGRTMDEIRRHPDKGNGQQRPTKQKSEEQLQAYYKKTLEERLSAGALNTFPRAFKQVMEGRDIKLVINQTAQDCFGCLESISQIRTATRDKKDTVTREKHPKKPFQKWMKKRAIKKGNYLRFQRLFYLDRGKLAKIILDDIECLSCDIPLSEIYSVFKTRWETTGSFKSLGDFKTYGKADNTAFRELITAKEIEKNVQEMSKGSAPGPDGITLGDVVKMDPEFSRTMEIFNLWLTTGKIPDMVRGCRTVLIPKSSKPDRLKDINNWRPITIGSILLRLFSRIVTARLSKACPLNPRQRGFIRAAGCSENLKLLQTIIWSAKRERRPLGVVFVDIAKAFDTVSHQHIIHALQQREVDPHIVGLVSNMYENISTYITTKRNTHTDKIQIRVGVKQGDPMSPLLFNLAMDPLLCKLEESGKGYHRGQSSITAMAFADDLVLLSDSWENMNTNISILETFCNLTGLKTQGQKCHGFYIKPTKKSYTINDCAAWTINGTPLNMIDPGESEKYLGLQFDPWIGIARSGLSTKLDFWLQRIDQAPLKPLQKTDILKTYTIPRLIYIADHSEVKSALLETLDQKIRTAVKEWLHLPPCTCDAILYSSTRDGGLGITKLAGLIPSVQARRLHRIAQSSDDTMKCFMEKEKMEQLHKKLWIQAGGDRENIPSIWEAPPSSEPPNNVSTNSEWEAPTQKDKFPKPCNWRKNEFKKWTKLASQGRGIVNFERDKISNHWIQYYRRIPHRKLLTALQLRANVYPTREFLARGRQDQYIKACRHCDADNESCAHIIGNCPVTQDARIKRHNYICELLLEEAKKKDWVVFKEPHIRDSNKELYKPDLIFVKDGRALVVDVTVRYEAAKSSLEEAAAEKVRKYKHLETEVRHLTNAKDVTFVGFPLGARGKWHQDNFKLLTELGLSKSRQVKMAETFSTVALFSSVDIVHMFASRARKSMVM

SEQ ID NO: 1008 - protein, 1665 aa, synthetic construct
MAPKKKRKVNISGSSCGSPNSADTSSDFKDLWTKLKECHDREVQGLQVKVTKLKQERILDAQRLEEFFTKNQQLREQQKVLHETIKVLEDRLRAGLCDRCAVTEEHMRKKQQEFENIRQQNLKLITELMNERNTLQEENKKLSEQLQQKIENDQQHQAAELECEEDVIPDSPITAFSFSGVNRLRRKENPHVRYIEQTHTKLEHSVCANEMRKVSKSSTHPQHNPNENEILVADTYDQSQSPMAKAHGTSSYTPDKSSFNLATVVAETLGLGVQEESETQGPMSPLGDELYHCLEGNHKKQPFESGSETPGTSESATPEGSPKRKVSSAEGAAKEEPKRRSARLSAKPPAKVEAKPKKAAAKDKSSDKKVQTKGKRGAKGKQAEVANQETKEDLPAENGETKTEESPASDEAGEKEAKSDSGSETPGTSESATPESYEQLAPQPCVGETLHSSLPRDSELFVPEEGSSEKESEDAPKTSPPTPGKHGLEQTGEEKVMVTVPDKNPPCPCCGTRVNSVLNLIEHLKVSHGKRGVCFRCAKCGKENSNYHSVVCHFKKCRGPETEKAPAGEWICEVCNRDFTTKIGLGQHKRLAHPAVRNQERIVASQPKETSNRGAHKRCWTKEEEELLIRLEAQFEGNKNINKLIAEHITTKTAKQISDKRRLLSRKPAEEPREEPGTCHHTRRAAASLRTEPEMSHHAQAEDRDNGPGRRPLPGRAAAGGRTMDEIRRHPDKGNGQQRPTKQKSEEQLQAYYKKTLEERLSAGALNTFPRAFKQVMEGRDIKLVINQTAQDCFGCLESISQIRTATRDKKDTVTREKHPKKPFQKWMKKRAIKKGNYLRFQRLFYLDRGKLAKIILDDIECLSCDIPLSEIYSVFKTRWETTGSFKSLGDFKTYGKADNTAFRELITAKEIEKNVQEMSKGSAPGPDGITLGDVVKMDPEFSRTMEIFNLWLTTGKIPDMVRGCRTVLIPKSSKPDRLKDINNWRPITIGSILLRLFSRIVTARLSKACPLNPRQRGFIRAAGCSENLKLLQTIIWSAKREHRPLGVVFVDIAKAFDTVSHQHIIHALQQREVDPHIVGLVSNMYENISTYITTKRNTHTDKIQIRVGVKQGDPMSPLLFNLAMDPLLCKLEESGKGYHRGQSSITAMAFADDLVLLSDSWENMNTNISILETFCNLTGLKTQGQKCHGFYIKPTKKSYTINDCAAWTINGTPLNMIDPGESEKYLGLQFDPWIGIARSGLSTKLDFWLQRIDQAPLKPLQKTDILKTYTIPRLIYIADHSEVKSALLETLDQKIRTAVKEWLHLPPCTCDAILYSSTRDGGLGITKLAGLIPSVQLRRLHRIAQSSDDTMKCFMEKEKMEQLHKKLWIQAGGDRENIPSIWEAPPSSEPPNNVSTNSEWEAPTQKDKFPKPCNWRKNEFKKWTKLASQGRGIVNFERDKISNHWIQYYRRIPHRKLLTALQLRANVYPTREFLARGRQDQYIKACRHCDADNESCAHIIGNCPVTQDARIKRHNYICELLLEEAKKKDWVVFKEPHIRDSNKELYKPDLIFVKDGRALVVDVTVRYEAAKSSLEEAAAEKVRKYKHLETEVRHLTNAKDVTFVGFPLGARGKWHQDNFKLLTELGLSKSRQVKMAETFSTVALFSSVDIVHMFASRARKSMVM

SEQ ID NO: 1009 - protein, 1665 aa, synthetic construct
MAPKKKRKVNISGSSCGSPNSADTSSDFKDLWTKLKECHDREVQGLQVKVTKLKQERILDAQRLEEFFTKNQQLREQQKVLHETIKVLEDRLRAGLCDRCAVTEEHMRKKQQEFENIRQQNLKLITELMNERNTLQEENKKLSEQLQQKIENDQQHQAAELECEEDVIPDSPITAFSFSGVNRLRRKENPHVRYIEQTHTKLEHSVCANEMRKVSKSSTHPQHNPNENEILVADTYDQSQSPMAKAHGTSSYTPDKSSFNLATVVAETLGLGVQEESETQGPMSPLGDELYHCLEGNHKKQPFESGSETPGTSESATPEGSPKRKVSSAEGAAKEEPKRRSARLSAKPPAKVEAKPKKAAAKDKSSDKKVQTKGKRGAKGKQAEVANQETKEDLPAENGETKTEESPASDEAGEKEAKSDSGSETPGTSESATPESYEQLAPQPCVGETLHSSLPRDSELFVPEEGSSEKESEDAPKTSPPTPGKHGLEQTGEEKVMVTVPDKNPPCPCCGTRVNSVLNLIEHLKVSHGKRGVCFRCAKCGKENSNYHSVVCHFKKCRGPETEKAPAGEWICEVCNRDFTTKIGLGQHKRLAHPAVRNQERIVASQPKETSNRGAHKRCWTKEEEELLIRLEAQFEGNKNINKLIAEHITTKTAKQISDKRRLLSRKPAEEPREEPGTCHHTRRAAASLRTEPEMSHHAQAEDRDNGPGRRPLPGRAAAGGRTMDEIRRHPDKGNGQQRPTKQKSEEQLQAYYKKTLEERLSAGALNTFPRAFKQVMEGRDIKLVINQTAQDCFGCLESISQIRTATRDKKDTVTREKHPKKPFQKWMKKRAIKKGNYLRFQRLFYLDRGKLAKIILDDIECLSCDIPLSEIYSVFKTRWETTGSFKSLGDFKTYGKADNTAFRELITAKEIEKNVQEMSKGSAPGPDGITLGDVVKMDPEFSRTMEIFNLWLTTGKIPDMVRGCRTVLIPKSSKPDRLKDINNWRPITIGSILLRLFSRIVTARLSKACPLNPRQRGFIRAAGCSENLKLLQTIIWSAKREHRPLGVVFVDIAKAFDTVSHQHIIHALQQREVDPHIVGLVSNMYENISTYITTKRNTHTDKIQIRVGVKQGDPMSPLLFNLAMDPLLCKLEESGKGYHRGQSSITAMAFADDLVLLSDSWENMNTNISILETFCNLTGLKTQGQKCHGFYIKPTKKSYTINDCAAWTINGTPLNMIDPGESEKYLGLQFDPWIGIARSGLSTKLDFWLQRIDQAPLKPLQKTDILKTYTIPRLIYIADHSEVKSALLETLDQKIRTAVKEWLHLPPCTCDAILYSSTRDGGLGITKLAGLIPSVQAKRLHRIAQSSDDTMKCFMEKEKMEQLHKKLWIQAGGDRENIPSIWEAPPSSEPPNNVSTNSEWEAPTQKDKFPKPCNWRKNEFKKWTKLASQGRGIVNFERDKISNHWIQYYRRIPHRKLLTALQLRANVYPTREFLARGRQDQYIKACRHCDADNESCAHIIGNCPVTQDARIKRHNYICELLLEEAKKKDWVVFKEPHIRDSNKELYKPDLIFVKDGRALVVDVTVRYEAAKSSLEEAAAEKVRKYKHLETEVRHLTNAKDVTFVGFPLGARGKWHQDNFKLLTELGLSKSRQVKMAETFSTVALFSSVDIVHMFASRARKSMVM

SEQ ID NO: 1010 - protein, 1665 aa, synthetic construct; identical to SEQ ID NO: 962

SEQ ID NO: 1011 - protein, 1665 aa, synthetic construct
MAPKKKRKVNISGSSCGSPNSADTSSDFKDLWTKLKECHDREVQGLQVKVTKLKQERILDAQRLEEFFTKNQQLREQQKVLHETIKVLEDRLRAGLCDRCAVTEEHMRKKQQEFENIRQQNLKLITELMNERNTLQEENKKLSEQLQQKIENDQQHQAAELECEEDVIPDSPITAFSFSGVNRLRRKENPHVRYIEQTHTKLEHSVCANEMRKVSKSSTHPQHNPNENEILVADTYDQSQSPMAKAHGTSSYTPDKSSFNLATVVAETLGLGVQEESETQGPMSPLGDELYHCLEGNHKKQPFESGSETPGTSESATPEGSPKRKVSSAEGAAKEEPKRRSARLSAKPPAKVEAKPKKAAAKDKSSDKKVQTKGKRGAKGKQAEVANQETKEDLPAENGETKTEESPASDEAGEKEAKSDSGSETPGTSESATPESYEQLAPQPCVGETLHSSLPRDSELFVPEEGSSEKESEDAPKTSPPTPGKHGLEQTGEEKVMVTVPDKNPPCPCCGTRVNSVLNLIEHLKVSHGKRGVCFRCAKCGKENSNYHSVVCHFKKCRGPETEKAPAGEWICEVCNRDFTTKIGLGQHKRLAHPAVRNQERIVASQPKETSNRGAHKRCWTKEEEELLIRLEAQFEGNKNINKLIAEHITTKTAKQISDKRRLLSRKPAEEPREEPGTCHHTRRAAASLRTEPEMSHHAQAEDRDNGPGRRPLPGRAAAGGRTMDEIRRHPDKGNGQQRPTKQKSEEQLQAYYKKTLEERLSAGALNTFPRAFKQVMEGRDIKLVINQTAQDCFGCLESISQIRTATRDKKDTVTREKHPKKPFQKWMKKRAIKKGNYLRFQRLFYLDRGKLAKIILDDIECLSCDIPLSEIYSVFKTRWETTGSFKSLGDFKTYGKADNTAFRELITAKEIEKNVQEMSKGSAPGPDGITLGDVVKMDPEFSRTMEIFNLWLTTGKIPDMVRGCRTVLIPKSSKPDRLKDINNWRPITIGSILLRLFSRIVTARLSKACPLNPRQRGFIRAAGCSENLKLLQTIIWSAKREHRPLGVVFVDIAKAFDTVSHQHIIHALQQREVDPHIVGLVSNMYENISTYITTKRNTHTDKIQIRVGVKQGDPMSPLLFNLAMDPLLCKLEESGKGYHRGQSSITAMAFADDLVLLSDSWENMNTNISILETFCNLTGLKTQGQKCHGFYIKPTKKSYTINDCAAWTINGTPLNMIDPGESEKYLGLQFDPWIGIARSGLSTKLDFWLQRIDQAPLKPLQKTDILKTYTIPRLIYIADHSEVKSALLETLDQKIRTAVKEWLHLPPCTCDAILYSSTRDGGLGITKLAGLIPSVQARRLHRIAQSSDDTMKCFMEKEKMEQLHKKLWIQAGGDRENIPSIWEAPPSSEPPNNVSTNSEWQAPTQKDKFPKPCNWRKNEFKKWTKLASQGRGIVNFERDKISNHWIQYYRRIPHRKLLTALQLRANVYPTREFLARGRQDQYIKACRHCDADNESCAHIIGNCPVTQDARIKRHNYICELLLEEAKKKDWVVFKEPHIRDSNKELYKPDLIFVKDGRALVVDVTVRYEAAKSSLEEAAAEKVRKYKHLETEVRHLTNAKDVTFVGFPLGARGKWHQDNFKLLTELGLSKSRQVKMAETFSTVALFSSVDIVHMFASRARKSMVM

SEQ ID NO: 1012 - protein, 1665 aa, synthetic construct
MAPKKKRKVNISGSSCGSPNSADTSSDFKDLWTKLKECHDREVQGLQVKVTKLKQERILDAQRLEEFFTKNQQLREQQKVLHETIKVLEDRLRAGLCDRCAVTEEHMRKKQQEFENIRQQNLKLITELMNERNTLQEENKKLSEQLQQKIENDQQHQAAELECEEDVIPDSPITAFSFSGVNRLRRKENPHVRYIEQTHTKLEHSVCANEMRKVSKSSTHPQHNPNENEILVADTYDQSQSPMAKAHGTSSYTPDKSSFNLATVVAETLGLGVQEESETQGPMSPLGDELYHCLEGNHKKQPFESGSETPGTSESATPEGSPKRKVSSAEGAAKEEPKRRSARLSAKPPAKVEAKPKKAAAKDKSSDKKVQTKGKRGAKGKQAEVANQETKEDLPAENGETKTEESPASDEAGEKEAKSDSGSETPGTSESATPESYEQLAPQPCVGETLHSSLPRDSELFVPEEGSSEKESEDAPKTSPPTPGKHGLEQTGEEKVMVTVPDKNPPCPCCGTRVNSVLNLIEHLKVSHGKRGVCFRCAKCGKENSNYHSVVCHFKKCRGPETEKAPAGEWICEVCNRDFTTKIGLGQHKRLAHPAVRNQERIVASQPKETSNRGAHKRCWTKEEEELLIRLEAQFEGNKNINKLIAEHITTKTAKQISDKRRLLSRKPAEEPREEPGTCHHTRRAAASLRTEPEMSHHAQAEDRDNGPGRRPLPGRAAAGGRTMDEIRRHPDKGNGQQRPTKQKSEEQLQAYYKKTLEERLSAGALNTFPRAFKQVMEGRDIKLVINQTAQDCFGCLESISQIRTATRDKKDTVTREKHPKKPFQKWMKKRAIKKGNYLRFQRLFYLDRGKLAKIILDDIECLSCDIPLSEIYSVFKTRWETTGSFKSLGDFKTYGKADNTAFRELITAKEIEKNVQEMSKGSAPGPDGITLGDVVKMDPEFSRTMEIFNLWLTTGKIPDMVRGCRTVLIPKSSKPDRLKDINNWRPITIGSILLRLFSRIVTARLSKACPLNPRQRGFIRAAGCSENLKLLQTIIWSAKREHRPLGVVFVDIAKAFDTVSHQHIIHALQQREVDPHIVGLVSNMYENISTYITTKRNTHTDKIQIRVGVKQGDPMSPLLFNLAMDPLLCKLEESGKGYHRGQSSITAMAFADDLVLLSDSWENMNTNISILETFCNLTGLKTQGQKCHGFYIKPTKKSYTINDCAAWTINGTPLNMIDPGESEKYLGLQFDPWIGIARSGLSTKLDFWLQRIDQAPLKPLQKTDILKTYTIPRLIYIADHSEVKSALLETLDQKIRTAVKEWLHLPPCTCDAILYSSTRDGGLGITKLAGLIPSVQARRLHRIAQSSDDTMKCFMEKEKMEQLHKKLWIQAGGDRENIPSIWEAPPSSEPPNNVSTNSEWEAPKQKDKFPKPCNWRKNEFKKWTKLASQGRGIVNFERDKISNHWIQYYRRIPHRKLLTALQLRANVYPTREFLARGRQDQYIKACRHCDADNESCAHIIGNCPVTQDARIKRHNYICELLLEEAKKKDWVVFKEPHIRDSNKELYKPDLIFVKDGRALVVDVTVRYEAAKSSLEEAAAEKVRKYKHLETEVRHLTNAKDVTFVGFPLGARGKWHQDNFKLLTELGLSKSRQVKMAETFSTVALFSSVDIVHMFASRARKSMVM

SEQ ID NO: 1013 - protein, 1665 aa, synthetic construct
MAPKKKRKVNISGSSCGSPNSADTSSDFKDLWTKLKECHDREVQGLQVKVTKLKQERILDAQRLEEFFTKNQQLREQQKVLHETIKVLEDRLRAGLCDRCAVTEEHMRKKQQEFENIRQQNLKLITELMNERNTLQEENKKLSEQLQQKIENDQQHQAAELECEEDVIPDSPITAFSFSGVNRLRRKENPHVRYIEQTHTKLEHSVCANEMRKVSKSSTHPQHNPNENEILVADTYDQSQSPMAKAHGTSSYTPDKSSFNLATVVAETLGLGVQEESETQGPMSPLGDELYHCLEGNHKKQPFESGSETPGTSESATPEGSPKRKVSSAEGAAKEEPKRRSARLSAKPPAKVEAKPKKAAAKDKSSDKKVQTKGKRGAKGKQAEVANQETKEDLPAENGETKTEESPASDEAGEKEAKSDSGSETPGTSESATPESYEQLAPQPCVGETLHSSLPRDSELFVPEEGSSEKESEDAPKTSPPTPGKHGLEQTGEEKVMVTVPDKNPPCPCCGTRVNSVLNLIEHLKVSHGKRGVCFRCAKCGKENSNYHSVVCHFKKCRGPETEKAPAGEWICEVCNRDFTTKIGLGQHKRLAHPAVRNQERIVASQPKETSNRGAHKRCWTKEEEELLIRLEAQFEGNKNINKLIAEHITTKTAKQISDKRRLLSRKPAEEPRMEPGTCHHTRRAAASLRTEPEMSHHAQAEDRDNGPGRRPLPGRAAAGGRTMDEIRRHPDKGNGQQRPTKQKSEEQLQAYYKKTLEERLSAGALNTFPRAFKQVMEGRDIKLVINQTAQDCFGCLESISQIRTATRDKKDTVTREKHPKKPFQKWMKKRAIKKGNYLRFQRLFYLDRGKLAKIILDDIECLSCDIPLSEIYSVFKTRWETTGSFKSLGDFKTYGKADNTAFRELITAKEIEKNVQEMSKGSAPGPDGITLGDVVKMDPEFSRTMEIFNLWLTTGKIPDMVRGCRTVLIPKSSKPDRLKDINNWRPITIGSILLRLFSRIVTARLSKACPLNPRQRGFIRAAGCSENLKLLQTIIWSAKREHRPLGVVFVDIAKAFDTVSHQHIIHALQQREVDPHIVGLVSNMYENISTYITTKRNTHTDKIQIRVGVKQGDPMSPLLFNLAMDPLLCKLEESGKGYHRGQSSITAMAFADDLVLLSDSWENMNTNISILETFCNLTGLKTQGQKCHGFYIKPTKKSYTINDCAAWTINGTPLNMIDPGESEKYLGLQFDPWIGIARSGLSTKLDFWLQRIDQAPLKPLQKLDILKTYTIPRLIYIADHSEVKSALLETLDQKIRTAVKEWLHLPPCTCDAILYSSTRDGGLGITKLAGLIPSVQARRLHRIAQSSDDTMKCFMEKEKMEQLHKKLWIQAGGDRENIPSIWEAPPSSEPPNNVSTNSEWEAPTQKDKFPKPCNWRKNEFKKWTKLASQGRGIVNFERDKISNHWIQYYRRIPHRKLLTALQLRANVYPTREFLARGRQDQYIKACRHCDADNESCAHIIGNCPVTQDARIKRHNYICELLLEEAKKKDWVVFKEPHIRDSNKELYKPDLIFVKDGRALVVDVTVRYEAAKSSLEEAAAEKVRKYKHLETEVRHLTNAKDVTFVGFPLGARGKWHQDNFKLLTELGLSKSRQVKMAETFSTVALFSSVDIVHMFASRARKSMVM

SEQ ID NO: 1014 - protein, 1740 aa, synthetic construct
MAPKKKRKVSTNPKPQKKNKRNTNRRPQDVKFPGGGQIVGGVYLLPRRGPRLGVRATRKTSERSQPRSGSETPGTSESATPEGSNISGSSCGSPNSADTSSDFKDLWTKLKECHDREVQGLQVKVTKLKQERILDAQRLEEFFTKNQQLREQQKVLHETIKVLEDRLRAGLCDRCAVTEEHMRKKQQEFENIRQQNLKLITELMNERNTLQEENKKLSEQLQQKIENDQQHQAAELECEEDVIPDSPITAFSFSGVNRLRRKENPHVRYIEQTHTKLEHSVCANEMRKVSKSSTHPQHNPNENEILVADTYDQSQSPMAKAHGTSSYTPDKSSFNLATVVAETLGLGVQEESETQGPMSPLGDELYHCLEGNHKKQPFESGSETPGTSESATPEGSPKRKVSSAEGAAKEEPKRRSARLSAKPPAKVEAKPKKAAAKDKSSDKKVQTKGKRGAKGKQAEVANQETKEDLPAENGETKTEESPASDEAGEKEAKSDSGSETPGTSESATPESYEQLAPQPCVGETLHSSLPRDSELFVPEEGSSEKESEDAPKTSPPTPGKHGLEQTGEEKVMVTVPDKNPPCPCCGTRVNSVLNLIEHLKVSHGKRGVCFRCAKCGKENSNYHSVVCHFKKCRGPETEKAPAGEWICEVCNRDFTTKIGLGQHKRLAHPAVRNQERIVASQPKETSNRGAHKRCWTKEEEELLIRLEAQFEGNKNINKLIAEHITTKTAKQISDKRRLLSRKPAEEPRMEPGTCHHTRRAAASLRTEPEMSHHAQAEDRDNGPGRRPLPGRAAAGGRTMDEIRRHPDKGNGQQRPTKQKSEEQLQAYYKKTLEERLSAGALNTFPRAFKQVMEGRDIKLVINQTAQDCFGCLESISQIRTATRDKKDTVTREKHPKKPFQKWMKKRAIKKGNYLRFQRLFYLDRGKLAKIILDDIECLSCDIPLSEIYSVFKTRWETTGSFKSLGDFKTYGKADNTAFRELITAKEIEKNVQEMSKGSAPGPDGITLGDVVKMDPEFSRTMEIFNLWLTTGKIPDMVRGCRTVLIPKSSKPDRLKDINNWRPITIGSILLRLFSRIVTARLSKACPLNPRQRGFIRAAGCSENLKLLQTIIWSAKREHRPLGVVFVDIAKAFDTVSHQHIIHALQQREVDPHIVGLVSNMYENISTYITTKRNTHTDKIQIRVGVKQGDPMSPLLFNLAMDPLLCKLEESGKGYHRGQSSITAMAFADDLVLLSDSWENMNTNISILETFCNLTGLKTQGQKCHGFYIKPTKKSYTINDCAAWTINGTPLNMIDPGESEKYLGLQFDPWIGIARSGLSTKLDFWLQRIDQAPLKPLQKLDILKTYTIPRLIYIADHSEVKSALLETLDQKIRTAVKEWLHLPPCTCDAILYSSTRDGGLGITKLAGLIPSVQARRLHRIAQSSDDTMKCFMEKEKMEQLHKKLWIQAGGDRENIPSIWEAPPSSEPPNNVSTNSEWEAPTQKDKFPKPCNWRKNEFKKWTKLASQGRGIVNFERDKISNHWIQYYRRIPHRKLLTALQLRANVYPTREFLARGRQDQYIKACRHCDADNESCAHIIGNCPVTQDARIKRHNYICELLLEEAKKKDWVVFKEPHIRDSNKELYKPDLIFVKDGRALVVDVTVRYEAAKSSLEEAAAEKVRKYKHLETEVRHLTNAKDVTFVGFPLGARGKWHQDNFKLLTELGLSKSRQVKMAETFSTVALFSSVDIVHMFASRARKSMVM

SEQ ID NO: 1015 - protein, 2087 aa, synthetic construct
MAPKKKRKVSASQDSRSRDNGPDGMEPEGVIESNWNEIVDSFDDMNLSESLLRGIYAYGFEKPSAIQQRAILPCIKGYDVIAQAQSGTGKTATFAISILQQIELDLKATQALVLAPTRELAQQIQKVVMALGDYMGASCHACIGGTNVRAEVQKLQMEAPHIIVGTPGRVFDMLNRRYLSPKYIKMFVLDEADEMLSRGFKDQIYDIFQKLNSNTQVVLLSATMPSDVLEVTKKFMRDPIRILVKKEELTLEGIRQFYINVEREEWKLDTLCDLYETLTITQAVIFINTRRKVDWLTEKMHARDFTVSAMHGDMDQKERDVIMREFRSGSSRVLITTDLLARGIDVQQVSLVINYDLPTNRENYIHRIGRGGRFGRKGVAINMVTEEDKRTLRDIETFYNTSIEEMPLNVADLISGSETPGTSESATPEGSNISGSSCGSPNSADTSSDFKDLWTKLKECHDREVQGLQVKVTKLKQERILDAQRLEEFFTKNQQLREQQKVLHETIKVLEDRLRAGLCDRCAVTEEHMRKKQQEFENIRQQNLKLITELMNERNTLQEENKKLSEQLQQKIENDQQHQAAELECEEDVIPDSPITAFSFSGVNRLRRKENPHVRYIEQTHTKLEHSVCANEMRKVSKSSTHPQHNPNENEILVADTYDQSQSPMAKAHGTSSYTPDKSSFNLATVVAETLGLGVQEESETQGPMSPLGDELYHCLEGNHKKQPFESGSETPGTSESATPEGSPKRKVSSAEGAAKEEPKRRSARLSAKPPAKVEAKPKKAAAKDKSSDKKVQTKGKRGAKGKQAEVANQETKEDLPAENGETKTEESPASDEAGEKEAKSDSGSETPGTSESATPESYEQLAPQPCVGETLHSSLPRDSELFVPEEGSSEKESEDAPKTSPPTPGKHGLEQTGEEKVMVTVPDKNPPCPCCGTRVNSVLNLIEHLKVSHGKRGVCFRCAKCGKENSNYHSVVCHFKKCRGPETEKAPAGEWICEVCNRDFTTKIGLGQHKRLAHPAVRNQERIVASQPKETSNRGAHKRCWTKEEEELLIRLEAQFEGNKNINKLIAEHITTKTAKQISDKRRLLSRKPAEEPRMEPGTCHHTRRAAASLRTEPEMSHHAQAEDRDNGPGRRPLPGRAAAGGRTMDEIRRHPDKGNGQQRPTKQKSEEQLQAYYKKTLEERLSAGALNTFPRAFKQVMEGRDIKLVINQTAQDCFGCLESISQIRTATRDKKDTVTREKHPKKPFQKWMKKRAIKKGNYLRFQRLFYLDRGKLAKIILDDIECLSCDIPLSEIYSVFKTRWETTGSFKSLGDFKTYGKADNTAFRELITAKEIEKNVQEMSKGSAPGPDGITLGDVVKMDPEFSRTMEIFNLWLTTGKIPDMVRGCRTVLIPKSSKPDRLKDINNWRPITIGSILLRLFSRIVTARLSKACPLNPRQRGFIRAAGCSENLKLLQTIIWSAKREHRPLGVVFVDIAKAFDTVSHQHIIHALQQREVDPHIVGLVSNMYENISTYITTKRNTHTDKIQIRVGVKQGDPMSPLLFNLAMDPLLCKLEESGKGYHRGQSSITAMAFADDLVLLSDSWENMNTNISILETFCNLTGLKTQGQKCHGFYIKPTKKSYTINDCAAWTINGTPLNMIDPGESEKYLGLQFDPWIGIARSGLSTKLDFWLQRIDQAPLKPLQKLDILKTYTIPRLIYIADHSEVKSALLETLDQKIRTAVKEWLHLPPCTCDAILYSSTRDGGLGITKLAGLIPSVQARRLHRIAQSSDDTMKCFMEKEKMEQLHKKLWIQAGGDRENIPSIWEAPPSSEPPNNVSTNSEWEAPTQKDKFPKPCNWRKNEFKKWTKLASQGRGIVNFERDKISNHWIQYYRRIPHRKLLTALQLRANVYPTREFLARGRQDQYIKACRHCDADNESCAHIIGNCPVTQDARIKRHNYICELLLEEAKKKDWVVFKEPHIRDSNKELYKPDLIFVKDGRALVVDVTVRYEAAKSSLEEAAAEKVRKYKHLETEVRHLTNAKDVTFVGFPLGARGKWHQDNFKLLTELGLSKSRQVKMAETFSTVALFSSVDIVHMFASRARKSMVM

SEQ ID NO: 1016 - protein, 1930 aa, synthetic construct
MAPKKKRKVMGTALTPLLTKFATRYEMGTTPEEVANTLKQTCFKGQVNDSQMVALLIVADQYKLNPFTKELYAFPDKNNGIVPVVGVDGWARIINENPQFDGMEFSMDQQGTECTCKIYRKDRSHAISATEYMAECKRNTQPWQSHPRRMLRHKAMIQCARLAFGFAGIYDQDEAERIVERDVTPAEQYEDVSEAICLIKDSPTMEDLQAAFSNAWKAYKTKGARDQLTAAKDQRKKELLDAPIDVEFEETGDDRAASGSETPGTSESATPEGSNISGSSCGSPNSADTSSDFKDLWTKLKECHDREVQGLQVKVTKLKQERILDAQRLEEFFTKNQQLREQQKVLHETIKVLEDRLRAGLCDRCAVTEEHMRKKQQEFENIRQQNLKLITELMNERNTLQEENKKLSEQLQQKIENDQQHQAAELECEEDVIPDSPITAFSFSGVNRLRRKENPHVRYIEQTHTKLEHSVCANEMRKVSKSSTHPQHNPNENEILVADTYDQSQSPMAKAHGTSSYTPDKSSFNLATVVAETLGLGVQEESETQGPMSPLGDELYHCLEGNHKKQPFESGSETPGTSESATPEGSPKRKVSSAEGAAKEEPKRRSARLSAKPPAKVEAKPKKAAAKDKSSDKKVQTKGKRGAKGKQAEVANQETKEDLPAENGETKTEESPASDEAGEKEAKSDSGSETPGTSESATPESYEQLAPQPCVGETLHSSLPRDSELFVPEEGSSEKESEDAPKTSPPTPGKHGLEQTGEEKVMVTVPDKNPPCPCCGTRVNSVLNLIEHLKVSHGKRGVCFRCAKCGKENSNYHSVVCHFKKCRGPETEKAPAGEWICEVCNRDFTTKIGLGQHKRLAHPAVRNQERIVASQPKETSNRGAHKRCWTKEEEELLIRLEAQFEGNKNINKLIAEHITTKTAKQISDKRRLLSRKPAEEPRMEPGTCHHTRRAAASLRTEPEMSHHAQAEDRDNGPGRRPLPGRAAAGGRTMDEIRRHPDKGNGQQRPTKQKSEEQLQAYYKKTLEERLSAGALNTFPRAFKQVMEGRDIKLVINQTAQDCFGCLESISQIRTATRDKKDTVTREKHPKKPFQKWMKKRAIKKGNYLRFQRLFYLDRGKLAKIILDDIECLSCDIPLSEIYSVFKTRWETTGSFKSLGDFKTYGKADNTAFRELITAKEIEKNVQEMSKGSAPGPDGITLGDVVKMDPEFSRTMEIFNLWLTTGKIPDMVRGCRTVLIPKSSKPDRLKDINNWRPITIGSILLRLFSRIVTARLSKACPLNPRQRGFIRAAGCSENLKLLQTIIWSAKREHRPLGVVFVDIAKAFDTVSHQHIIHALQQREVDPHIVGLVSNMYENISTYITTKRNTHTDKIQIRVGVKQGDPMSPLLFNLAMDPLLCKLEESGKGYHRGQSSITAMAFADDLVLLSDSWENMNTNISILETFCNLTGLKTQGQKCHGFYIKPTKKSYTINDCAAWTINGTPLNMIDPGESEKYLGLQFDPWIGIARSGLSTKLDFWLQRIDQAPLKPLQKLDILKTYTIPRLIYIADHSEVKSALLETLDQKIRTAVKEWLHLPPCTCDAILYSSTRDGGLGITKLAGLIPSVQARRLHRIAQSSDDTMKCFMEKEKMEQLHKKLWIQAGGDRENIPSIWEAPPSSEPPNNVSTNSEWEAPTQKDKFPKPCNWRKNEFKKWTKLASQGRGIVNFERDKISNHWIQYYRRIPHRKLLTALQLRANVYPTREFLARGRQDQYIKACRHCDADNESCAHIIGNCPVTQDARIKRHNYICELLLEEAKKKDWVVFKEPHIRDSNKELYKPDLIFVKDGRALVVDVTVRYEAAKSSLEEAAAEKVRKYKHLETEVRHLTNAKDVTFVGFPLGARGKWHQDNFKLLTELGLSKSRQVKMAETFSTVALFSSVDIVHMFASRARKSMVM

SEQ ID NO: 1017 - protein, 1814 aa, synthetic construct
MAPKKKRKVNISGSSCGSPNSADTSSDFKDLWTKLKECHDREVQGLQVKVTKLKQERILDAQRLEEFFTKNQQLREQQKVLHETIKVLEDRLRAGLCDRCAVTEEHMRKKQQEFENIRQQNLKLITELMNERNTLQEENKKLSEQLQQKIENDQQHQAAELECEEDVIPDSPITAFSFSGVNRLRRKENPHVRYIEQTHTKLEHSVCANEMRKVSKSSTHPQHNPNENEILVADTYDQSQSPMAKAHGTSSYTPDKSSFNLATVVAETLGLGVQEESETQGPMSPLGDELYHCLEGNHKKQPFESGSETPGTSESATPEGSMGTALTPLLTKFATRYEMGTTPEEVANTLKQTCFKGQVNDSQMVALLIVADQYKLNPFTKELYAFPDKNNGIVPVVGVDGWARIINENPQFDGMEFSMDQQGTECTCKIYRKDRSHAISATEYMAECKRNTQPWQSHPRRMLRHKAMIQCARLAFGFAGIYDQDEAERIVERDVTPAEQYEDVSEAICLIKDSPTMEDLQAAFSNAWKAYKTKGARDQLTAAKDQRKKELLDAPIDVEFEETGDDRAASGSETPGTSESATPESYEQLAPQPCVGETLHSSLPRDSELFVPEEGSSEKESEDAPKTSPPTPGKHGLEQTGEEKVMVTVPDKNPPCPCCGTRVNSVLNLIEHLKVSHGKRGVCFRCAKCGKENSNYHSVVCHFKKCRGPETEKAPAGEWICEVCNRDFTTKIGLGQHKRLAHPAVRNQERIVASQPKETSNRGAHKRCWTKEEEELLIRLEAQFEGNKNINKLIAEHITTKTAKQISDKRRLLSRKPAEEPRMEPGTCHHTRRAAASLRTEPEMSHHAQAEDRDNGPGRRPLPGRAAAGGRTMDEIRRHPDKGNGQQRPTKQKSEEQLQAYYKKTLEERLSAGALNTFPRAFKQVMEGRDIKLVINQTAQDCFGCLESISQIRTATRDKKDTVTREKHPKKPFQKWMKKRAIKKGNYLRFQRLFYLDRGKLAKIILDDIECLSCDIPLSEIYSVFKTRWETTGSFKSLGDFKTYGKADNTAFRELITAKEIEKNVQEMSKGSAPGPDGITLGDVVKMDPEFSRTMEIFNLWLTTGKIPDMVRGCRTVLIPKSSKPDRLKDINNWRPITIGSILLRLFSRIVTARLSKACPLNPRQRGFIRAAGCSENLKLLQTIIWSAKREHRPLGVVFVDIAKAFDTVSHQHIIHALQQREVDPHIVGLVSNMYENISTYITTKRNTHTDKIQIRVGVKQGDPMSPLLFNLAMDPLLCKLEESGKGYHRGQSSITAMAFADDLVLLSDSWENMNTNISILETFCNLTGLKTQGQKCHGFYIKPTKKSYTINDCAAWTINGTPLNMIDPGESEKYLGLQFDPWIGIARSGLSTKLDFWLQRIDQAPLKPLQKLDILKTYTIPRLIYIADHSEVKSALLETLDQKIRTAVKEWLHLPPCTCDAILYSSTRDGGLGITKLAGLIPSVQARRLHRIAQSSDDTMKCFMEKEKMEQLHKKLWIQAGGDRENIPSIWEAPPSSEPPNNVSTNSEWEAPTQKDKFPKPCNWRKNEFKKWTKLASQGRGIVNFERDKISNHWIQYYRRIPHRKLLTALQLRANVYPTREFLARGRQDQYIKACRHCDADNESCAHIIGNCPVTQDARIKRHNYICELLLEEAKKKDWVVFKEPHIRDSNKELYKPDLIFVKDGRALVVDVTVRYEAAKSSLEEAAAEKVRKYKHLETEVRHLTNAKDVTFVGFPLGARGKWHQDNFKLLTELGLSKSRQVKMAETFSTVALFSSVDIVHMFASRARKSMVM

SEQ ID NO: 1018 - protein, 1665 aa, synthetic construct
MAPKKKRKVNISGSSCGSPNSADTSSDFKDLWTKLKECHDREVQGLQVKVTKLKQERILDAQRLEEFFTKNQQLREQQKVLHETIKVLEDRLRAGLCDRCAVTEEHMRKKQQEFENIRQQNLKLITELMNERNTLQEENKKLSEQLQQKIENDQQHQAAELECEEDVIPDSPITAFSFSGVNRLRRKENPHVRYIEQTHTKLEHSVCANEMRKVSKSSTHPQHNPNENEILVADTYDQSQSPMAKAHGTSSYTPDKSSFNLATVVAETLGLGVQEESETQGPMSPLGDELYHCLEGNHKKQPFESGSETPGTSESATPEGSPKRKVSSAEGAAKEEPKRRSARLSAKPPAKVEAKPKKAAAKDKSSDKKVQTKGKRGAKGKQAEVANQETKEDLPAENGETKTEESPASDEAGEKEAKSDSGSETPGTSESATPESYEQLAPQPCVGETLHSSLPRDSELFVPEEGSSEKESEDAPKTSPPTPGKHGLEQTGEEKVMVTVPDKNPPCPCCGTRVNSVLNLIEHLKVSHGKRGVCFRCAKCGKERSNYHSVVCHFKKCRGPETEKAPAGEWICEVCNRDFTTKIGLGQHKRLAHPAVRNQERIVASQPKETSNRGAHKRCWTKEEEELLIRLEAQFEGNKNINKLIAEHITTKTAKQISDKRRLLSRKPAEEPRMEPGTCHHTRRAAASLRTEPEMSHHAQAEDRDNGPGRRPLPGRAAAGGRTMDEIRRHPDKGNGQQRPTKQKSEEQLQAYYKKTLEERLSAGALNTFPRAFKQVMEGRDIKLVINQTAQDCFGCLESISQIRTATRDKKDTVTREKHPKKPFQKWMKKRAIKKGNYLRFQRLFYLDRGKLAKIILDDIECLSCDIPLSEIYSVFKTRWETTGSFKSLGDFKTYGKADNTAFRELITAKEIEKNVQEMSKGSAPGPDGITLGDVVKMDPEFSRTMEIFNLWLTTGKIPDMVRGCRTVLIPKSSKPDRLKDINNWRPITIGSILLRLFSRIVTARLSKACPLNPRQRGFIRAAGCSENLKLLQTIIWSAKREHRPLGVVFVDIAKAFDTVSHQHIIHALQQREVDPHIVGLVSNMYENISTYITTKRNTHTDKIQIRVGVKQGDPMSPLLFNLAMDPLLCKLEESGKGYHRGQSSITAMAFADDLVLLSDSWENMNTNISILETFCNLTGLKTQGQKCHGFYIKPTKKSYTINDCAAWTINGTPLNMIDPGESEKYLGLQFDPWIGIARSGLSTKLDFWLQRIDQAPLKPLQKLDILKTYTIPRLIYIADHSEVKSALLETLDQKIRTAVKEWLHLPPCTCDAILYSSTRDGGLGITKLAGLIPSVQARRLHRIAQSSDDTMKCFMEKEKMEQLHKKLWIQAGGDRENIPSIWEAPPSSEPPNNVSTNSEWEAPTQKDKFPKPCNWRKNEFKKWTKLASQGRGIVNFERDKISNHWIQYYRRIPHRKLLTALQLRANVYPTREFLARGRQDQYIKACRHCDADNESCAHIIGNCPVTQDARIKRHNYICELLLEEAKKKDWVVFKEPHIRDSNKELYKPDLIFVKDGRALVVDVTVRYEAAKSSLEEAAAEKVRKYKHLETEVRHLTNAKDVTFVGFPLGARGKWHQDNFKLLTELGLSKSRQVKMAETFSTVALFSSVDIVHMFASRARKSMVM

SEQ ID NO: 1019 - protein, 1665 aa, synthetic construct
MAPKKKRKVNISGSSCGSPNSADTSSDFKDLWTKLKECHDREVQGLQVKVTKLKQERILDAQRLEEFFTKNQQLREQQKVLHETIKVLEDRLRAGLCDRCAVTEEHMRKKQQEFENIRQQNLKLITELMNERNTLQEENKKLSEQLQQKIENDQQHQAAELECEEDVIPDSPITAFSFSGVNRLRRKENPHVRYIEQTHTKLEHSVCANEMRKVSKSSTHPQHNPNENEILVADTYDQSQSPMAKAHGTSSYTPDKSSFNLATVVAETLGLGVQEESETQGPMSPLGDELYHCLEGNHKKQPFESGSETPGTSESATPEGSPKRKVSSAEGAAKEEPKRRSARLSAKPPAKVEAKPKKAAAKDKSSDKKVQTKGKRGAKGKQAEVANQETKEDLPAENGETKTEESPASDEAGEKEAKSDSGSETPGTSESATPESYEQLAPQPCVGETLHSSLPRDSELFVPEEGSSEKESEDAPKTSPPTPGKHGLEQTGEEKVMVTVPDKNPPCPCCGTRVNSVLNLIEHLKVSHGKRGVCFRCAKCGKENSNYHSVVCHFKKCRGPETEKAPAGEWICEVCNRDFTTKIGLGQHKRLAHPAVRNQERIVASQPKETSNRGAHKRCWTKEEEELLIRLEAQFEGNKNINKLIAEHITTKTAKQISDKRRLLSRKPAEEPRMEPGTCHHTRRAAASLRTEPEMSHHAQAEDRDNGPGRRPLPGRAAAGGRTMDEIRRHPDKGNGQQRPTKQKSEEQLQAYYKKTLEERLSAGALNTFPRAFKQVMEGRDIKLVINQTAQDCFGCLESISQIRTATRDKKDTVTREKHPKKPFQKWMKKRAIKKGNYLRFQRLFYLDRGKLAKIILDDIECLSCDIPLSEIYSVFKTRWETTGSFKSLGDFKTYGKADNTAFRELITAKEIEKNVQEMSKGSAPGPDGITLGDVVKMDPEFSRTMEIFNLWLTTGKIPDMVRGCRTVLIPKSSKPDRLKDINNWRPITIGSILLRLFSRIVTARLSKACPLNPRQRGFIRAAGCSENLKLLQTIIWSAKREHRPLGVVFVDIAKAFDTVSHQHIIHALQQREVDPHIVGLVSNMYENISTYITTKRNTHTDKIQIRVGVKQGDPMSPLLFNLAMDPLLCKLEESGKGYHRGQSSITAMAFADDLVLLSDSWENMNTNISILETFCNLTGLKTQGQKCHGFYIKPTKKSYTINDCAAWTINGTPLNMIDPGESEKYLGLQFDPWIGIARSGLSTKLDFWLQRIDQAPLKPLQKLDILKTYTIPRLIYIADHSEVKSALLETLDQKIRTAVKEWLHLPPCTCDAILYSSTRDGGLGITKLAGLIPSVQARRLHRIAQSSDDTMKCFMEKEKMEQLHKKLWIQAGGDRENIPSIWEAPPSSEPPNNVSTNSEWEAPTQKPKFPKPCNWRKNEFKKWTKLASQGRGIVNFERDKISNHWIQYYRRIPHRKLLTALQLRANVYPTREFLARGRQDQYIKACRHCDADNESCAHIIGNCPVTQDARIKRHNYICELLLEEAKKKDWVVFKEPHIRDSNKELYKPDLIFVKDGRALVVDVTVRYEAAKSSLEEAAAEKVRKYKHLETEVRHLTNAKDVTFVGFPLGARGKWHQDNFKLLTELGLSKSRQVKMAETFSTVALFSSVDIVHMFASRARKSMVM

SEQ ID NO: 1020 - protein, 1665 aa, synthetic construct
MAPKKKRKVNISGSSCGSPNSADTSSDFKDLWTKLKECHDREVQGLQVKVTKLKQERILDAQRLEEFFTKNQQLREQQKVLHETIKVLEDRLRAGLCDRCAVTEEHMRKKQQEFENIRQQNLKLITELMNERNTLQEENKKLSEQLQQKIENDQQHQAAELECEEDVIPDSPITAFSFSGVNRLRRKENPHVRYIEQTHTKLEHSVCANEMRKVSKSSTHPQHNPNENEILVADTYDQSQSPMAKAHGTSSYTPDKSSFNLATVVAETLGLGVQEESETQGPMSPLGDELYHCLEGNHKKQPFESGSETPGTSESATPEGSPKRKVSSAEGAAKEEPKRRSARLSAKPPAKVEAKPKKAAAKDKSSDKKVQTKGKRGAKGKQAEVANQETKEDLPAENGETKTEESPASDEAGEKEAKSDSGSETPGTSESATPESYEQLAPQPCVGETLHSSLPRDSELFVPEEGSSEKESEDAPKTSPPTPGKHGLEQTGEEKVMVTVPDKNPPCPCCGTRVNSVLNLIEHLKVSHGKRGVCFRCAKCGKENSNYHSVVCHFKKCRGPETEKAPAGEWICEVCNRDFTTKIGLGQHKRLAHPAVRNQERIVASQPKETSNRGAHKRCWTKEEEELLIRLEAQFEGNKNINKLIAEHITTKTAKQISDKRRLLSRKPAEEPRMEPGTCHHTRRAAASLRTEPEMSHHAQAEDRDNGPGRRPLPGRAAAGGRTMDEIRRHPDKGNGQQRPTKQKSEEQLQAYYKKTLEERLSAGALNTFPRAFKQVMEGRDIKLVINQTAQDCFGCLESISQIRTATRDKKDTVTREKHPKKPFQKWMKKRAIKKGNYLRFQRLFYLDRGKLAKIILDDIECLSCDIPLSEIYSVFKTRWETTGSFKSLGDFKTYGKADNTAFRELITAKEIEKNVQEMSKGSAPGPDGITLGDVVKMDPEFSRTMEIFNLWLTTGKIPDMVRGCRTVLIPKSSKPDRLKDINNWRPITIGSILLRLFSRIVTARLSKACPLNPRQRGFIRAAGCSENLKLLQTIIWSAKREHRPLGVVFVDIAKAFDTVSHQHIIHALQQREVDPHIVGLVSNMYENISTYITTKRNTHTDKIQIRVGVKQGDPMSPLLFNLAMDPLLCKLEESGKGYHRGQSSITAMAFADDLVLLSDSWENMNTNISILETFCNLTGLKTQGQKCHGFYIKPTKKSYTINDCAAWTINGTPLNMIDPGESEKYLGLQFDPWIGIARSGLSTKLDFWLQRIDQAPLKPLQKLDILKTYTIPRLIYIADHSEVKSALLETLDQKIRTAVKEWLHLPPCTCDAILYSSTRDGGLGITKLAGLIPSVQARRLHRIAQSSDDTMKCFMEKERMEQLHKKLWIQAGGDRENIPSIWEAPPSSEPPNNVSTNSEWEAPTQKDKFPKPCNWRKNEFKKWTKLASQGRGIVNFERDKISNHWIQYYRRIPHRKLLTALQLRANVYPTREFLARGRQDQYIKACRHCDADNESCAHIIGNCPVTQDARIKRHNYICELLLEEAKKKDWVVFKEPHIRDSNKELYKPDLIFVKDGRALVVDVTVRYEAAKSSLEEAAAEKVRKYKHLETEVRHLTNAKDVTFVGFPLGARGKWHQDNFKLLTELGLSKSRQVKMAETFSTVALFSSVDIVHMFASRARKSMVM

SEQ ID NO: 1021 - protein, 1665 aa, synthetic construct
MAPKKKRKVNISGSSCGSPNSADTSSDFKDLWTKLKECHDREVQGLQVKVTKLKQERILDAQRLEEFFTKNQQLREQQKVLHETIKVLEDRLRAGLCDRCAVTEEHMRKKQQEFENIRQQNLKLITELMNERNTLQEENKKLSEQLQQKIENDQQHQAAELECEEDVIPDSPITAFSFSGVNRLRRKENPHVRYIEQTHTKLEHSVCANEMRKVSKSSTHPQHNPNENEILVADTYDQSQSPMAKAHGTSSYTPDKSSFNLATVVAETLGLGVQEESETQGPMSPLGDELYHCLEGNHKKQPFESGSETPGTSESATPEGSPKRKVSSAEGAAKEEPKRRSARLSAKPPAKVEAKPKKAAAKDKSSDKKVQTKGKRGAKGKQAEVANQETKEDLPAENGETKTEESPASDEAGEKEAKSDSGSETPGTSESATPESYEQLAPQPCVGETLHSSLPRDSELFVPEEGSSEKESEDAPKTSPPTPGKHGLEQTGEEKVMVTVPDKNPPCPCCGTRVNSVLNLIEHLKVSHGKRGVCFRCAKCGKENSNYHSVVCHFKKCRGPETEKAPAGEWICEVCNRDFTTKIGLGQHKRLAHPAVRNQERIVASQPKETSNRGAHKRCWTKEEEELLIRLEAQFEGNKNINKLIAEHITTKTAKQISDKRRLLSRKPAEEPRMEPGTCHHTRRAAASLRTEPEMSHHAQAEDRDNGPGRRPLPGRAAAGGRTMDEIRRHPDKGNGQQRPTKQKSEEQLQAYYKKTLEERLSAGALNTFPRAFKQVMEGRDIKLVINQTAQDCFGCLESISQIRTATRDKKDTVTREKHPKKPFQKWMKKRAIKKGNYLRFQRLFYLDRGKLAKIILDDIECLSCDIPLSEIYSVFKTRWETTGSFKSLGDFKTYGKADNTAFRELITAKEIEKNVQEMSKGSAPGPDGITLGDVVKMDPEFSRTMEIFNLWLTTGKIPDMVRGCRTVLIPKSSKPDRLKDINNWRPITIGSILLRLFSRIVTARLSKACPLNPRQRGFIRAAGCSENLKLLQTIIWSAKREHRPLGVVFVDIAKAFDTVSHQHIIHALQQREVDPHIVGLVSNMYENISTYITTKRNTHTDKIQIRVGVKQGDPMSPLLFNLAMDPLLCKLEESGKGYHRGQSSITAMAFADDLVLLSDSWENMNTNISILETFCNLTGLKTQGQKCHGFYIKPTKKSYTINDCAAWTINGTPLNMIDPGESEKYLGLQFDPWIGIARSGLSTKLDFWLQRIDQAPLKPLQKLDILKTYTIPRLIYIADHSEVKSALLETLDQKIRTAVKEWLHLPPCTCDAILYSSTRDGGLGITKLAGLIPSVQARRLHRIAQSSDDTMKCFMEKEKMEQLHKKLWIQAGGDRENIPSIWEAPPSSEPPNNVSTNSEWEAPTQKDKFPKPCNWRKNEFKKWTKLASQGRGIVNFERDKISNHWIQYYRGIPHRKLLTALQLRANVYPTREFLARGRQDQYIKACRHCDADNESCAHIIGNCPVTQDARIKRHNYICELLLEEAKKKDWVVFKEPHIRDSNKELYKPDLIFVKDGRALVVDVTVRYEAAKSSLEEAAAEKVRKYKHLETEVRHLTNAKDVTFVGFPLGARGKWHQDNFKLLTELGLSKSRQVKMAETFSTVALFSSVDIVHMFASRARKSMVM

SEQ ID NO: 1022 - protein, 1665 aa, synthetic construct
MAPKKKRKVNISGSSCGSPNSADTSSDFKDLWTKLKECHDREVQGLQVKVTKLKQERILDAQRLEEFFTKNQQLREQQKVLHETIKVLEDRLRAGLCDRCAVTEEHMRKKQQEFENIRQQNLKLITELMNERNTLQEENKKLSEQLQQKIENDQQHQAAELECEEDVIPDSPITAFSFSGVNRLRRKENPHVRYIEQTHTKLEHSVCANEMRKVSKSSTHPQHNPNENEILVADTYDQSQSPMAKAHGTSSYTPDKSSFNLATVVAETLGLGVQEESETQGPMSPLGDELYHCLEGNHKKQPFESGSETPGTSESATPEGSPKRKVSSAEGAAKEEPKRRSARLSAKPPAKVEAKPKKAAAKDKSSDKKVQTKGKRGAKGKQAEVANQETKEDLPAENGETKTEESPASDEAGEKEAKSDSGSETPGTSESATPESYEQLAPQPCVGETLHSSLPRDSELFVPEEGSSEKESEDAPKTSPPTPGKHGLEQTGEEKVMVTVPDKNPPCPCCGTRVNSVLNLIEHLKVSHGKRGVCFRCAKCGKENSNYHSVVCHFKKCRGPETEKAPAGEWICEVCNRDFTTKIGLGQHKRLAHPAVRNQERIVASQPKETSNRGAHKRCWTKEEEELLIRLEAQFEGNKNINKLIAEHITTKTAKQISDKRRLLSRKPAEEPRMEPGTCHHTRRAAASLRTEPEMSHQAQAEDRDNGPGRRPLPGRAAAGGRTMDEIRRHPDKGNGQQRPTKQKSEEQLQAYYKKTLEERLSAGALNTFPRAFKQVMEGRDIKLVINQTAQDCFGCLESISQIRTATRDKKDTVTREKHPKKPFQKWMKKRAIKKGNYLRFQRLFYLDRGKLAKIILDDIECLSCDIPLSEIYSVFKTRWETTGSFKSLGDFKTYGKADNTAFRELITAKEIEKNVQEMSKGSAPGPDGITLGDVVKMDPEFSRTMEIFNLWLTTGKIPDMVRGCRTVLIPKSSKPDRLKDINNWRPITIGSILLRLFSRIVTARLSKACPLNPRQRGFIRAAGCSENLKLLQTIIWSAKREHRPLGVVFVDIAKAFDTVSHQHIIHALQQREVDPHIVGLVSNMYENISTYITTKRNTHTDKIQIRVGVKQGDPMSPLLFNLAMDPLLCKLEESGKGYHRGQSSITAMAFADDLVLLSDSWENMNTNISILETFCNLTGLKTQGQKCHGFYIKPTKKSYTINDCAAWTINGTPLNMIDPGESEKYLGLQFDPWIGIARSGLSTKLDFWLQRIDQAPLKPLQKLDILKTYTIPRLIYIADHSEVKSALLETLDQKIRTAVKEWLHLPPCTCDAILYSSTRDGGLGITKLAGLIPSVQARRLHRIAQSSDDTMKCFMEKEKMEQLHKKLWIQAGGDRENIPSIWEAPPSSEPPNNVSTNSEWEAPTQKDKFPKPCNWRKNEFKKWTKLASQGRGIVNFERDKISNHWIQYYRRIPHRKLLTALQLRANVYPTREFLARGRQDQYIKACRHCDADNESCAHIIGNCPVTQDARIKRHNYICELLLEEAKKKDWVVFKEPHIRDSNKELYKPDLIFVKDGRALVVDVTVRYEAAKSSLEEAAAEKVRKYKHLETEVRHLTNAKDVTFVGFPLGARGKWHQDNFKLLTELGLSKSRQVKMAETFSTVALFSSVDIVHMFASRARKSMVM

SEQ ID NO: 1023 - protein, 1608 aa, synthetic construct
MAPKKKRKVNISGSSCGSPNSADTSSDFKDLWTKLKECHDREVQGLQVKVTKLKQERILDAQRLEEFFTKNQQLREQQKVLHETIKVLEDRLRAGLCDRCAVTEEHMRKKQQEFENIRQQNLKLITELMNERNTLQEENKKLSEQLQQKIENDQQHQAAELECEEDVIPDSPITAFSFSGVNRLRRKENPHVRYIEQTHTKLEHSVCANEMRKVSKSSTHPQHNPNENEILVADTYDQSQSPMAKAHGTSSYTPDKSSFNLATVVAETLGLGVQEESETQGPMSPLGDELYHCLEGNHKKQPFESGSETPGTSESATPEGSPKRKVSSAEGAAKEEPKRRSARLSAKPPAKVEAKPKKAAAKDKSSDKKVQTKGKRGAKGKQAEVANQETKEDLPAENGETKTEESPASDEAGEKEAKSDSGSETPGTSESATPESEKVMVTVPDKNPPCPCCGTRVNSVLNLIEHLKVSHGKRGVCFRCAKCGKENSNYHSVVCHFKKCRGPETEKAPAGEWICEVCNRDFTTKIGLGQHKRLAHPAVRNQERIVASQPKETSNRGAHKRCWTKEEEELLIRLEAQFEGNKNINKLIAEHITTKTAKQISDKRRLLSRKPAEEPRMEPGTCHHTRRAAASLRTEPEMSHHAQAEDRDNGPGRRPLPGRAAAGGRTMDEIRRHPDKGNGQQRPTKQKSEEQLQAYYKKTLEERLSAGALNTFPRAFKQVMEGRDIKLVINQTAQDCFGCLESISQIRTATRDKKDTVTREKHPKKPFQKWMKKRAIKKGNYLRFQRLFYLDRGKLAKIILDDIECLSCDIPLSEIYSVFKTRWETTGSFKSLGDFKTYGKADNTAFRELITAKEIEKNVQEMSKGSAPGPDGITLGDVVKMDPEFSRTMEIFNLWLTTGKIPDMVRGCRTVLIPKSSKPDRLKDINNWRPITIGSILLRLFSRIVTARLSKACPLNPRQRGFIRAAGCSENLKLLQTIIWSAKREHRPLGVVFVDIAKAFDTVSHQHIIHALQQREVDPHIVGLVSNMYENISTYITTKRNTHTDKIQIRVGVKQGDPMSPLLFNLAMDPLLCKLEESGKGYHRGQSSITAMAFADDLVLLSDSWENMNTNISILETFCNLTGLKTQGQKCHGFYIKPTKKSYTINDCAAWTINGTPLNMIDPGESEKYLGLQFDPWIGIARSGLSTKLDFWLQRIDQAPLKPLQKLDILKTYTIPRLIYIADHSEVKSALLETLDQKIRTAVKEWLHLPPCTCDAILYSSTRDGGLGITKLAGLIPSVQARRLHRIAQSSDDTMKCFMEKEKMEQLHKKLWIQAGGDRENIPSIWEAPPSSEPPNNVSTNSEWEAPTQKDKFPKPCNWRKNEFKKWTKLASQGRGIVNFERDKISNHWIQYYRRIPHRKLLTALQLRANVYPTREFLARGRQDQYIKACRHCDADNESCAHIIGNCPVTQDARIKRHNYICELLLEEAKKKDWVVFKEPHIRDSNKELYKPDLIFVKDGRALVVDVTVRYEAAKSSLEEAAAEKVRKYKHLETEVRHLTNAKDVTFVGFPLGARGKWHQDNFKLLTELGLSKSRQVKMAETFSTVALFSSVDIVHMFASRARKSMVM

SEQ ID NO: 1024 - protein, 1665 aa, synthetic construct
MAPKKKRKVNISGSSCGSPNSADTSSDFKDLWTKLKECHDREVQGLQVKVTKLKQERILDAQRLEEFFTKNQQLREQQKVLHETIKVLEDRLRAGLCDRCAVTEEHMRKKQQEFENIRQQNLKLITELMNERNTLQEENKKLSEQLQQKIENDQQHQAAELECEEDVIPDSPITAFSFSGVNRLRRKENPHVRYIEQTHTKLEHSVCANEMRKVSKSSTHPQHNPNENEILVADTYDQSQSPMAKAHGTSSYTPDKSSFNLATVVAETLGLGVQEESETQGPMSPLGDELYHCLEGNHKKQPFESGSETPGTSESATPEGSPKRKVSSAEGAAKEEPKRRSARLSAKPPAKVEAKPKKAAAKDKSSDKKVQTKGKRGAKGKQAEVANQETKEDLPAENGETKTEESPASDEAGEKEAKSDSGSETPGTSESATPESYEQLAPQPCVGETLHSSLPRDSELFVPEEGSSEKESEDAPKTSPPTPGKHGLEQTGEEKVMVTVPDKNPPCPCCGTRVNSVLNLIEHLKVSHGKRGVCFRCAKCGKENSNYHSVVCHFKKCRGPETEKAPAGEWICEVCNRDFTTKIGLGQHKRLAHPAVRNQERIVASQPKETSNRGAHKRCWTKEEEELLIRLEAQFEGNKNINKLIAEHITTKTAKQISDKRRLLSRKPAEEPRMEPGTCHHTRRAAASLRTEPEMSHHAQAEDRDNGPGRRPLPGRAAAGGRTMDEIRRHPDKGNGQQRPTKQKSEEQLQAYYKKTLEERLSAGALNTFPRAFKQVMEGRDIKLVINQTAQDCFGCLESISQIRTATRDKKDTVTREKHPKKPFQKWMKKRAIKKGNYLRFQRLFYLDRGKLAKIILDDIECLSCDIPLSEIYSVFKTRWETTGSFKSLGDFKTYGKADNTAFRELITAKEIEKNVQEMSKGSAPGPDGITLGDVVKMDPEFSRTMEIFNLWLTTGKIPDMVRGCRTVLIPKSSKPDRLKDINNWRPITIGSILLRLFSRIVTARLSKACPLNPRQRGFIRAAGCSENLKLLQTIIWSAKREHRPLGVVFVDIAKAFDTVSHQHIIHALQQREVDPHIVGLVSNMYENISTYITTKRNTHTDKIQIRVGVKQGDPMSPLLFNLAMDPLLCKLEESGKGYHRGQSSITAMAFADDLVLLSDSWENMNTNISILETFCNLTGLKTQGQKCHGFYIKPTKKSYTINDCAAWTINGTPLNMIDPGESEKYLGLQFDPWIGIARSGLSTKLDFWLQRIDQAPLKPLQKLDILKTYTIPRLIYIADHSEVKSALLETLDQKIRTAVKEWLHLPPCTCDAILYSSTRDGGLGITKLAGLIPSVQARRLHRIAQSSDDTMKCFMEKEKMEQLHKKLWIQAGGDRENIPSIWEAPPSSEPPNNVSTNSEWEAPTQKDKFPKPCNWRKNEFKKWTKLASQGRGIVNFERDKISNHWIQYYRRIPHRKLLTALQLRANVYPTREFLARGRQDQYIKACRHCDADNESCAHIIGNCPVTQDARIKRHNYICELLLEEAKKKDWVVFKEPHIRDSNKELYKPDLIFVKDGRALVVDVTVRYEAAKSSLEEAAAEKVRKYKHLETEVRHLTNAKDVTFVGFPLGAAGKWHQDNFKLLTELGLSKSRQVKMAETFSTVALFSSVDIVHMFASRARKSMVM

SEQ ID NO: 1025 - protein, 1686 aa, synthetic construct
MATFGESSFNNELPQDSQEVTCTPKKKRKVNISGSSCGSPNSADTSSDFKDLWTKLKECHDREVQGLQVKVTKLKQERILDAQRLEEFFTKNQQLREQQKVLHETIKVLEDRLRAGLCDRCAVTEEHMRKKQQEFENIRQQNLKLITELMNERNTLQEENKKLSEQLQQKIENDQQHQAAELECEEDVIPDSPITAFSFSGVNRLRRKENPHVRYIEQTHTKLEHSVCANEMRKVSKSSTHPQHNPNENEILVADTYDQSQSPMAKAHGTSSYTPDKSSFNLATVVAETLGLGVQEESETQGPMSPLGDELYHCLEGNHKKQPFESGSETPGTSESATPEGSPKRKVSSAEGAAKEEPKRRSARLSAKPPAKVEAKPKKAAAKDKSSDKKVQTKGKRGAKGKQAEVANQETKEDLPAENGETKTEESPASDEAGEKEAKSDSGSETPGTSESATPESYEQLAPQPCVGETLHSSLPRDSELFVPEEGSSEKESEDAPKTSPPTPGKHGLEQTGEEKVMVTVPDKNPPCPCCGTRVNSVLNLIEHLKVSHGKRGVCFRCAKCGKENSNYHSVVCHFKKCRGPETEKAPAGEWICEVCNRDFTTKIGLGQHKRLAHPAVRNQERIVASQPKETSNRGAHKRCWTKEEEELLIRLEAQFEGNKNINKLIAEHITTKTAKQISDKRRLLSRKPAEEPREEPGTCHHTRRAAASLRTEPEMSHHAQAEDRDNGPGRRPLPGRAAAGGRTMDEIRRHPDKGNGQQRPTKQKSEEQLQAYYKKTLEERLSAGALNTFPRAFKQVMEGRDIKLVINQTAQDCFGCLESISQIRTATRDKKDTVTREKHPKKPFQKWMKKRAIKKGNYLRFQRLFYLDRGKLAKIILDDIECLSCDIPLSEIYSVFKTRWETTGSFKSLGDFKTYGKADNTAFRELITAKEIEKNVQEMSKGSAPGPDGITLGDVVKMDPEFSRTMEIFNLWLTTGKIPDMVRGCRTVLIPKSSKPDRLKDINNWRPITIGSILLRLFSRIVTARLSKACPLNPRQRGFIRAAGCSENLKLLQTIIWSAKREHRPLGVVFVDIAKAFDTVSHQHIIHALQQREVDPHIVGLVSNMYENISTYITTKRNTHTDKIQIRVGVKQGDPMSPLLFNLAMDPLLCKLEESGKGYHRGQSSITAMAFADDLVLLSDSWENMNTNISILETFCNLTGLKTQGQKCHGFYIKPTKKSYTINDCAAWTINGTPLNMIDPGESEKYLGLQFDPWIGIARSGLSTKLDFWLQRIDQAPLKPLQKTDILKTYTIPRLIYIADHSEVKSALLETLDQKIRTAVKEWLHLPPCTCDAILYSSTRDGGLGITKLAGLIPSVQARRLHRIAQSSDDTMKCFMEKEKMEQLHKKLWIQAGGDRENIPSIWEAPPSSEPPNNVSTNSEWEAPTQKDKFPKPCNWRKNEFKKWTKLASQGRGIVNFERDKISNHWIQYYRRIPHRKLLTALQLRANVYPTREFLARGRQDQYIKACRHCDADNESCAHIIGNCPVTQDARIKRHNYICELLLEEAKKKDWVVFKEPHIRDSNKELYKPDLIFVKDGRALVVDVTVRYEAAKSSLEEAAAEKVRKYKHLETEVRHLTNAKDVTFVGFPLGARGKWHQDNFKLLTELGLSKSRQVKMAETFSTVALFSSVDIVHMFASRARKSMVM

SEQ ID NO: 1026 - protein, 1737 aa, synthetic construct
MAKKQTMGFEVPGVSSEENGHSFHTPQKGPPIEDAIASSDVLETASKSANPPHTIQASEEQSSTPAPVKKSGKLPKKKRKVNISGSSCGSPNSADTSSDFKDLWTKLKECHDREVQGLQVKVTKLKQERILDAQRLEEFFTKNQQLREQQKVLHETIKVLEDRLRAGLCDRCAVTEEHMRKKQQEFENIRQQNLKLITELMNERNTLQEENKKLSEQLQQKIENDQQHQAAELECEEDVIPDSPITAFSFSGVNRLRRKENPHVRYIEQTHTKLEHSVCANEMRKVSKSSTHPQHNPNENEILVADTYDQSQSPMAKAHGTSSYTPDKSSFNLATVVAETLGLGVQEESETQGPMSPLGDELYHCLEGNHKKQPFESGSETPGTSESATPEGSPKRKVSSAEGAAKEEPKRRSARLSAKPPAKVEAKPKKAAAKDKSSDKKVQTKGKRGAKGKQAEVANQETKEDLPAENGETKTEESPASDEAGEKEAKSDSGSETPGTSESATPESYEQLAPQPCVGETLHSSLPRDSELFVPEEGSSEKESEDAPKTSPPTPGKHGLEQTGEEKVMVTVPDKNPPCPCCGTRVNSVLNLIEHLKVSHGKRGVCFRCAKCGKENSNYHSVVCHFKKCRGPETEKAPAGEWICEVCNRDFTTKIGLGQHKRLAHPAVRNQERIVASQPKETSNRGAHKRCWTKEEEELLIRLEAQFEGNKNINKLIAEHITTKTAKQISDKRRLLSRKPAEEPREEPGTCHHTRRAAASLRTEPEMSHHAQAEDRDNGPGRRPLPGRAAAGGRTMDEIRRHPDKGNGQQRPTKQKSEEQLQAYYKKTLEERLSAGALNTFPRAFKQVMEGRDIKLVINQTAQDCFGCLESISQIRTATRDKKDTVTREKHPKKPFQKWMKKRAIKKGNYLRFQRLFYLDRGKLAKIILDDIECLSCDIPLSEIYSVFKTRWETTGSFKSLGDFKTYGKADNTAFRELITAKEIEKNVQEMSKGSAPGPDGITLGDVVKMDPEFSRTMEIFNLWLTTGKIPDMVRGCRTVLIPKSSKPDRLKDINNWRPITIGSILLRLFSRIVTARLSKACPLNPRQRGFIRAAGCSENLKLLQTIIWSAKREHRPLGVVFVDIAKAFDTVSHQHIIHALQQREVDPHIVGLVSNMYENISTYITTKRNTHTDKIQIRVGVKQGDPMSPLLFNLAMDPLLCKLEESGKGYHRGQSSITAMAFADDLVLLSDSWENMNTNISILETFCNLTGLKTQGQKCHGFYIKPTKKSYTINDCAAWTINGTPLNMIDPGESEKYLGLQFDPWIGIARSGLSTKLDFWLQRIDQAPLKPLQKTDILKTYTIPRLIYIADHSEVKSALLETLDQKIRTAVKEWLHLPPCTCDAILYSSTRDGGLGITKLAGLIPSVQARRLHRIAQSSDDTMKCFMEKEKMEQLHKKLWIQAGGDRENIPSIWEAPPSSEPPNNVSTNSEWEAPTQKDKFPKPCNWRKNEFKKWTKLASQGRGIVNFERDKISNHWIQYYRRIPHRKLLTALQLRANVYPTREFLARGRQDQYIKACRHCDADNESCAHIIGNCPVTQDARIKRHNYICELLLEEAKKKDWVVFKEPHIRDSNKELYKPDLIFVKDGRALVVDVTVRYEAAKSSLEEAAAEKVRKYKHLETEVRHLTNAKDVTFVGFPLGARGKWHQDNFKLLTELGLSKSRQVKMAETFSTVALFSSVDIVHMFASRARKSMVM

SEQ ID NO: 1027 - skipped

SEQ ID NO: 1028 - protein, 1665 aa, synthetic construct
MAPKKKRKVNISGSSCGSPNSADTSSDFKDLWTKLKECHDREVQGLQVKVTKLKQERILDAQRLEEFFTKNQQLREQQKVLHETIKVLEDRLRAGLCDRCAVTEEHMRKKQQEFENIRQQNLKLITELMNERNTLQEENKKLSEQLQQKIENDQQHQAAELECEEDVIPDSPITAFSFSGVNRLRRKENPHVRYIEQTHTKLEHSVCANEMRKVSKSSTHPQHNPNENEILVADTYDQSQSPMAKAHGTSSYTPDKSSFNLATVVAETLGLGVQEESETQGPMSPLGDELYHCLEGNHKKQPFESGSETPGTSESATPEGSPKRKVSSAEGAAKEEPKRRSARLSAKPPAKVEAKPKKAAAKDKSSDKKVQTKGKRGAKGKQAEVANQETKEDLPAENGETKTEESPASDEAGEKEAKSDSGSETPGTSESATPESYEQLAPQPCVGETLHSSLPRDSELFVPEEGSSEKESEDAPKTSPPTPGKHGLEQTGEEKVMVTVPDKNPPCPCCGTRVNSVLNLIEHLKVSHGKRGVCFRCAKCGKENSNYHSVVCHFKKCRGPETEKAPAGEWICEVCNRDFTTKIGLGQHKRLAHPAVRNQERIVASQPKETSNRGAHKRCWTKEEEELLIRLEAQFEGNKNINKLIAEHITTKTAKQISDKRRLLSRKPAEEPREEPGTCHHTRRAAASLRTEPEMSHHAQAEDRDNGPGRRPLPGRAAAGGRTMDEIRRHPDKGNGQQRPTKQKSEEQLQAYYKKTLEERLSAGALNTFPRAFKQVMEGRDIKLVINQTAQDCFGCLESISQIRTATRDKKDTVTREKHPKKPFQKWMKKRAIKKGNYLRFQRLFYLDRGKLAKIILDDIECLSCDIPLSEIYSVFKTRWETTGSFKSLGDFKTYGKADNTAFRELITAKEIEKNVQEMSKGSAPGPDGITLGDVVKMDPEFSRTMEIFNLWLTTGKIPDMVRGCRTVLIPKSSKPDRLKDINNWRPITIGSILLRLFSRIMTARLSKACPLNPRQRGFIRAAGCSENLKLLQTIIWSAKREHRPLGVVFVDIAKAFDTVSHQHIIHALQQREVDPHIVGLVSNMYENISTYITTKRNTHTDKIQIRVGVKQGDPMSPLLFNLAMDPLLCKLEESGKGYHRGQSSITAMAFADDLVLLSDSWENMNTNISILETFCNLTGLKTQGQKCHGFYIKPTKDSYTINDCAAWTINGTPLNMIDPGESEKYLGLQFDPWIGIARSGLSTKLDFWLQRIDQAPLKPLQKTDILKTYTIPRLIYIADHSEVKSALLETLDQKIRTAVKEWLHLPPCTCDAILYSSTRDGGLGITKLAGLIPSVQARRLHRIAQSSDDTMKCFMEKEKMEQLHKKLWIQAGGDRENIPSIWEAPPSSEPPNNVSTNSEWEAPTQKDKFPKPCNWRKNEFKKWTKLASQGRGIVNFERDKISNHWIQYYRRIPHRKLLTALQLRANVYPTREFLARGRQDQYIKACRHCDADNESCAHIIGNCPVTQDARIKRHNYICELLLEEAKKKDWVVFKEPHIRDSNKELYKPDLIFVKDGRALVVDVTVRYEAAKSSLEEAAAEKVRKYKHLETEVRHLTNAKDVTFVGFPLGARGKWHQDNFKLLTELGLSKSRQVKMAETFSTVALFSSVDIVHMFASRARKSMVM

SEQ ID NO: 1029 - protein, 1665 aa, synthetic construct
MAPKKKRKVNISGSSCGSPNSADTSSDFKDLWTKLKECHDREVQGLQVKVTKLKQERILDAQRLEEFFTKNQQLREQQKVLHETIKVLEDRLRAGLCDRCAVTEEHMRKKQQEFENIRQQNLKLITELMNERNTLQEENKKLSEQLQQKIENDQQHQAAELECEEDVIPDSPITAFSFSGVNRLRRKENPHVRYIEQTHTKLEHSVCANEMRKVSKSSTHPQHNPNENEILVADTYDQSQSPMAKAHGTSSYTPDKSSFNLATVVAETLGLGVQEESETQGPMSPLGDELYHCLEGNHKKQPFESGSETPGTSESATPEGSPKRKVSSAEGAAKEEPKRRSARLSAKPPAKVEAKPKKAAAKDKSSDKKVQTKGKRGAKGKQAEVANQETKEDLPAENGETKTEESPASDEAGEKEAKSDSGSETPGTSESATPESYEQLAPQPCVGETLHSSLPRDSELFVPEEGSSEKESEDAPKTSPPTPGKHGLEQTGEEKVMVTVPDKNPPCPCCGTRVNSVLNLIEHLKVSHGKRGVCFRCAKCGKENSNYHSVVCHFKKCRGPETEKAPAGEWICEVCNRDFTTKIGLGQHKRLAHPAVRNQERIVASQPKETSNRGAHKRCWTKEEEELLIRLEAQFEGNKNINKLIAEHITTKTAKQISDKRRLLSRKPAEEPREEPGTCHHTRRAAASLRTEPEMSHHAQAEDRDNGPGRRPLPGRAAAGGRTMDEIRRHPDKGNGQQRPTKQKSEEQLQAYYKKTLEERLSAGALNTFPRAFKQVMEGRDIKLVINQTAQDCFGCLESISQIRTATRDKKDTVTREKHPKKPFQKWMKKRAIKKGNYLRFQRLFYLDRGKLAKIILDDIECLSCDIPLSEIYSVFKTRWETTGSFKSLGDFKTYGKADNTAFRELITAKEIEKNVQEMSKGSAPGPDGITLGDVVKMDPEFSRTMEIFNLWLTTGKIPDMVRGCRTVLIPKSSKPDRLKDINNWRPITIGSILLRLFSRIVTARLSKACPLNPRQRGFIRAAGCSENLKLLQGIIWSAKREHRPLGVVFVDIAKAFDTVSHQHIIHALQQREVDPHIVGLVSNMYENISTYITTKRNTHTDKIQIRVGVKQGDPMSPLLFNLAMDPLLCKLEESGKGYHRGQSSITAMAFADDLVLLSDSWENMNTNISILETFCNLTGLKTQGQKCHGFYIKPTKDSYTINDCAAWTINGTPLNMIDPGESEKYLGLQFDPWIGIARSGLSTKLDFWLQRIDQAPLKPLQKTDILKTYTIPRLIYIADHSEVKSALLETLDQKIRTAVKEWLHLPPCTCDAILYSSTRDGGLGITKLAGLIPSVQARRLHRIAQSSDDTMKCFMEKEKMEQLHKKLWIQAGGDRENIPSIWEAPPSSEPPNNVSTNSEWEAPTQKDKFPKPCNWRKNEFKKWTKLASQGRGIVNFERDKISNHWIQYYRRIPHRKLLTALQLRANVYPTREFLARGRQDQYIKACRHCDADNESCAHIIGNCPVTQDARIKRHNYICELLLEEAKKKDWVVFKEPHIRDSNKELYKPDLIFVKDGRALVVDVTVRYEAAKSSLEEAAAEKVRKYKHLETEVRHLTNAKDVTFVGFPLGARGKWHQDNFKLLTELGLSKSRQVKMAETFSTVALFSSVDIVHMFASRARKSMVM

SEQ ID NO: 1030 - protein, 1665 aa, synthetic construct
MAPKKKRKVNISGSSCGSPNSADTSSDFKDLWTKLKECHDREVQGLQVKVTKLKQERILDAQRLEEFFTKNQQLREQQKVLHETIKVLEDRLRAGLCDRCAVTEEHMRKKQQEFENIRQQNLKLITELMNERNTLQEENKKLSEQLQQKIENDQQHQAAELECEEDVIPDSPITAFSFSGVNRLRRKENPHVRYIEQTHTKLEHSVCANEMRKVSKSSTHPQHNPNENEILVADTYDQSQSPMAKAHGTSSYTPDKSSFNLATVVAETLGLGVQEESETQGPMSPLGDELYHCLEGNHKKQPFESGSETPGTSESATPEGSPKRKVSSAEGAAKEEPKRRSARLSAKPPAKVEAKPKKAAAKDKSSDKKVQTKGKRGAKGKQAEVANQETKEDLPAENGETKTEESPASDEAGEKEAKSDSGSETPGTSESATPESYEQLAPQPCVGETLHSSLPRDSELFVPEEGSSEKESEDAPKTSPPTPGKHGLEQTGEEKVMVTVPDKNPPCPCCGTRVNSVLNLIEHLKVSHGKRGVCFRCAKCGKENSNYHSVVCHFKKCRGPETEKAPAGEWICEVCNRDFTTKIGLGQHKRLAHPAVRNQERIVASQPKETSNRGAHKRCWTKEEEELLIRLEAQFEGNKNINKLIAEHITTKTAKQISDKRRLLSRKPAEEPREEPGTCHHTRRAAASLRTEPEMSHHAQAEDRDNGPGRRPLPGRAAAGGRTMDEIRRHPDKGNGQQRPTKQKSEEQLQAYYKKTLEERLSAGALNTFPRAFKQVMEGRDIKLVINQTAQDCFGCLESISQIRTATRDKKDTVTREKHPKKPFQKWMKKRAIKKGNYLRFQRLFYLDRGKLAKIILDDIECLSCDIPLSEIYSVFKTRWETTGSFKSLGDFKTYGKADNTAFRELITAKEIEKNVQEMSKGSAPGPDGITLGDVVKMDPEFSRTMEIFNLWLTTGKIPDMVRGCRTVLIPKSSKPDRLKDINNWRPITIGSILLRLFSRIVTARLSKACPLNPRQRGFIRAAGCSENLKLLQTIIWSAKREHRPLGVVFVDIAKAFDTVSHQHIIHALRQREVDPHIVGLVSNMYENISTYITTKRNTHTDKIQIRVGVKQGDPMSPLLFNLAMDPLLCKLEESGKGYHRGQSSITAMAFADDLVLLSDSWENMNTNISILETFCNLTGLKTQGQKCHGFYIKPTKDSYTINDCAAWTINGTPLNMIDPGESEKYLGLQFDPWIGIARSGLSTKLDFWLQRIDQAPLKPLQKTDILKTYTIPRLIYIADHSEVKSALLETLDQKIRTAVKEWLHLPPCTCDAILYSSTRDGGLGITKLAGLIPSVQARRLHRIAQSSDDTMKCFMEKEKMEQLHKKLWIQAGGDRENIPSIWEAPPSSEPPNNVSTNSEWEAPTQKDKFPKPCNWRKNEFKKWTKLASQGRGIVNFERDKISNHWIQYYRRIPHRKLLTALQLRANVYPTREFLARGRQDQYIKACRHCDADNESCAHIIGNCPVTQDARIKRHNYICELLLEEAKKKDWVVFKEPHIRDSNKELYKPDLIFVKDGRALVVDVTVRYEAAKSSLEEAAAEKVRKYKHLETEVRHLTNAKDVTFVGFPLGARGKWHQDNFKLLTELGLSKSRQVKMAETFSTVALFSSVDIVHMFASRARKSMVM

SEQ ID NO: 1031 - protein, 1665 aa, synthetic construct
MAPKKKRKVNISGSSCGSPNSADTSSDFKDLWTKLKECHDREVQGLQVKVTKLKQERILDAQRLEEFFTKNQQLREQQKVLHETIKVLEDRLRAGLCDRCAVTEEHMRKKQQEFENIRQQNLKLITELMNERNTLQEENKKLSEQLQQKIENDQQHQAAELECEEDVIPDSPITAFSFSGVNRLRRKENPHVRYIEQTHTKLEHSVCANEMRKVSKSSTHPQHNPNENEILVADTYDQSQSPMAKAHGTSSYTPDKSSFNLATVVAETLGLGVQEESETQGPMSPLGDELYHCLEGNHKKQPFESGSETPGTSESATPEGSPKRKVSSAEGAAKEEPKRRSARLSAKPPAKVEAKPKKAAAKDKSSDKKVQTKGKRGAKGKQAEVANQETKEDLPAENGETKTEESPASDEAGEKEAKSDSGSETPGTSESATPESYEQLAPQPCVGETLHSSLPRDSELFVPEEGSSEKESEDAPKTSPPTPGKHGLEQTGEEKVMVTVPDKNPPCPCCGTRVNSVLNLIEHLKVSHGKRGVCFRCAKCGKENSNYHSVVCHFKKCRGPETEKAPAGEWICEVCNRDFTTKIGLGQHKRLAHPAVRNQERIVASQPKETSNRGAHKRCWTKEEEELLIRLEAQFEGNKNINKLIAEHITTKTAKQISDKRRLLSRKPAEEPREEPGTCHHTRRAAASLRTEPEMSHHAQAEDRDNGPGRRPLPGRAAAGGRTMDEIRRHPDKGNGQQRPTKQKSEEQLQAYYKKTLEERLSAGALNTFPRAFKQVMEGRDIKLVINQTAQDCFGCLESISQIRTATRDKKDTVTREKHPKKPFQKWMKKRAIKKGNYLRFQRLFYLDRGKLAKIILDDIECLSCDIPLSEIYSVFKTRWETTGSFKSLGDFKTYGKADNTAFRELITAKEIEKNVQEMSKGSAPGPDGITLGDVVKMDPEFSRTMEIFNLWLTTGKIPDMVRGCRTVLIPKSSKPDRLKDINNWRPITIGSILLRLFSRIVTARLSKACPLNPRQRGFIRAAGCSENLKLLQTIIWSAKREHRPLGVVFVDIAKAFDTVSHQHIIHALQQREVDPHIVGLVSNMYENCSTYITTKRNTHTDKIQIRVGVKQGDPMSPLLFNLAMDPLLCKLEESGKGYHRGQSSITAMAFADDLVLLSDSWENMNTNISILETFCNLTGLKTQGQKCHGFYIKPTKDSYTINDCAAWTINGTPLNMIDPGESEKYLGLQFDPWIGIARSGLSTKLDFWLQRIDQAPLKPLQKTDILKTYTIPRLIYIADHSEVKSALLETLDQKIRTAVKEWLHLPPCTCDAILYSSTRDGGLGITKLAGLIPSVQARRLHRIAQSSDDTMKCFMEKEKMEQLHKKLWIQAGGDRENIPSIWEAPPSSEPPNNVSTNSEWEAPTQKDKFPKPCNWRKNEFKKWTKLASQGRGIVNFERDKISNHWIQYYRRIPHRKLLTALQLRANVYPTREFLARGRQDQYIKACRHCDADNESCAHIIGNCPVTQDARIKRHNYICELLLEEAKKKDWVVFKEPHIRDSNKELYKPDLIFVKDGRALVVDVTVRYEAAKSSLEEAAAEKVRKYKHLETEVRHLTNAKDVTFVGFPLGARGKWHQDNFKLLTELGLSKSRQVKMAETFSTVALFSSVDIVHMFASRARKSMVM

SEQ ID NO: 1032 - protein, 1665 aa, synthetic construct
MAPKKKRKVNISGSSCGSPNSADTSSDFKDLWTKLKECHDREVQGLQVKVTKLKQERILDAQRLEEFFTKNQQLREQQKVLHETIKVLEDRLRAGLCDRCAVTEEHMRKKQQEFENIRQQNLKLITELMNERNTLQEENKKLSEQLQQKIENDQQHQAAELECEEDVIPDSPITAFSFSGVNRLRRKENPHVRYIEQTHTKLEHSVCANEMRKVSKSSTHPQHNPNENEILVADTYDQSQSPMAKAHGTSSYTPDKSSFNLATVVAETLGLGVQEESETQGPMSPLGDELYHCLEGNHKKQPFESGSETPGTSESATPEGSPKRKVSSAEGAAKEEPKRRSARLSAKPPAKVEAKPKKAAAKDKSSDKKVQTKGKRGAKGKQAEVANQETKEDLPAENGETKTEESPASDEAGEKEAKSDSGSETPGTSESATPESYEQLAPQPCVGETLHSSLPRDSELFVPEEGSSEKESEDAPKTSPPTPGKHGLEQTGEEKVMVTVPDKNPPCPCCGTRVNSVLNLIEHLKVSHGKRGVCFRCAKCGKENSNYHSVVCHFKKCRGPETEKAPAGEWICEVCNRDFTTKIGLGQHKRLAHPAVRNQERIVASQPKETSNRGAHKRCWTKEEEELLIRLEAQFEGNKNINKLIAEHITTKTAKQISDKRRLLSRKPAEEPREEPGTCHHTRRAAASLRTEPEMSHHAQAEDRDNGPGRRPLPGRAAAGGRTMDEIRRHPDKGNGQQRPTKQKSEEQLQAYYKKTLEERLSAGALNTFPRAFKQVMEGRDIKLVINQTAQDCFGCLESISQIRTATRDKKDTVTREKHPKKPFQKWMKKRAIKKGNYLRFQRLFYLDRGKLAKIILDDIECLSCDIPLSEIYSVFKTRWETTGSFKSLGDFKTYGKADNTAFRELITAKEIEKNVQEMSKGSAPGPDGITLGDVVKMDPEFSRTMEIFNLWLTTGKIPDMVRGCRTVLIPKSSKPDRLKDINNWRPITIGSILLRLFSRIVTARLSKACPLNPRQRGFIRAAGCSENLKLLQTIIWSAKREHRPLGVVFVDIAKAFDTVSHQHIIHALQQREVDPHIVGLVSNMYENISTRITTKRNTHTDKIQIRVGVKQGDPMSPLLFNLAMDPLLCKLEESGKGYHRGQSSITAMAFADDLVLLSDSWENMNTNISILETFCNLTGLKTQGQKCHGFYIKPTKDSYTINDCAAWTINGTPLNMIDPGESEKYLGLQFDPWIGIARSGLSTKLDFWLQRIDQAPLKPLQKTDILKTYTIPRLIYIADHSEVKSALLETLDQKIRTAVKEWLHLPPCTCDAILYSSTRDGGLGITKLAGLIPSVQARRLHRIAQSSDDTMKCFMEKEKMEQLHKKLWIQAGGDRENIPSIWEAPPSSEPPNNVSTNSEWEAPTQKDKFPKPCNWRKNEFKKWTKLASQGRGIVNFERDKISNHWIQYYRRIPHRKLLTALQLRANVYPTREFLARGRQDQYIKACRHCDADNESCAHIIGNCPVTQDARIKRHNYICELLLEEAKKKDWVVFKEPHIRDSNKELYKPDLIFVKDGRALVVDVTVRYEAAKSSLEEAAAEKVRKYKHLETEVRHLTNAKDVTFVGFPLGARGKWHQDNFKLLTELGLSKSRQVKMAETFSTVALFSSVDIVHMFASRARKSMVM

SEQ ID NO: 1033 - protein, 1665 aa, synthetic construct
MAPKKKRKVNISGSSCGSPNSADTSSDFKDLWTKLKECHDREVQGLQVKVTKLKQERILDAQRLEEFFTKNQQLREQQKVLHETIKVLEDRLRAGLCDRCAVTEEHMRKKQQEFENIRQQNLKLITELMNERNTLQEENKKLSEQLQQKIENDQQHQAAELECEEDVIPDSPITAFSFSGVNRLRRKENPHVRYIEQTHTKLEHSVCANEMRKVSKSSTHPQHNPNENEILVADTYDQSQSPMAKAHGTSSYTPDKSSFNLATVVAETLGLGVQEESETQGPMSPLGDELYHCLEGNHKKQPFESGSETPGTSESATPEGSPKRKVSSAEGAAKEEPKRRSARLSAKPPAKVEAKPKKAAAKDKSSDKKVQTKGKRGAKGKQAEVANQETKEDLPAENGETKTEESPASDEAGEKEAKSDSGSETPGTSESATPESYEQLAPQPCVGETLHSSLPRDSELFVPEEGSSEKESEDAPKTSPPTPGKHGLEQTGEEKVMVTVPDKNPPCPCCGTRVNSVLNLIEHLKVSHGKRGVCFRCAKCGKENSNYHSVVCHFKKCRGPETEKAPAGEWICEVCNRDFTTKIGLGQHKRLAHPAVRNQERIVASQPKETSNRGAHKRCWTKEEEELLIRLEAQFEGNKNINKLIAEHITTKTAKQISDKRRLLSRKPAEEPREEPGTCHHTRRAAASLRTEPEMSHHAQAEDRDNGPGRRPLPGRAAAGGRTMDEIRRHPDKGNGQQRPTKQKSEEQLQAYYKKTLEERLSAGALNTFPRAFKQVMEGRDIKLVINQTAQDCFGCLESISQIRTATRDKKDTVTREKHPKKPFQKWMKKRAIKKGNYLRFQRLFYLDRGKLAKIILDDIECLSCDIPLSEIYSVFKTRWETTGSFKSLGDFKTYGKADNTAFRELITAKEIEKNVQEMSKGSAPGPDGITLGDVVKMDPEFSRTMEIFNLWLTTGKIPDMVRGCRTVLIPKSSKPDRLKDINNWRPITIGSILLRLFSRIVTARLSKACPLNPRQRGFIRAAGCSENLKLLQTIIWSAKREHRPLGVVFVDIAKAFDTVSHQHIIHALQQREVDPHIVGLVSNMYENISTYIETKRNTHTDKIQIRVGVKQGDPMSPLLFNLAMDPLLCKLEESGKGYHRGQSSITAMAFADDLVLLSDSWENMNTNISILETFCNLTGLKTQGQKCHGFYIKPTKDSYTINDCAAWTINGTPLNMIDPGESEKYLGLQFDPWIGIARSGLSTKLDFWLQRIDQAPLKPLQKTDILKTYTIPRLIYIADHSEVKSALLETLDQKIRTAVKEWLHLPPCTCDAILYSSTRDGGLGITKLAGLIPSVQARRLHRIAQSSDDTMKCFMEKEKMEQLHKKLWIQAGGDRENIPSIWEAPPSSEPPNNVSTNSEWEAPTQKDKFPKPCNWRKNEFKKWTKLASQGRGIVNFERDKISNHWIQYYRRIPHRKLLTALQLRANVYPTREFLARGRQDQYIKACRHCDADNESCAHIIGNCPVTQDARIKRHNYICELLLEEAKKKDWVVFKEPHIRDSNKELYKPDLIFVKDGRALVVDVTVRYEAAKSSLEEAAAEKVRKYKHLETEVRHLTNAKDVTFVGFPLGARGKWHQDNFKLLTELGLSKSRQVKMAETFSTVALFSSVDIVHMFASRARKSMVM

SEQ ID NO: 1034 - protein, 1665 aa, synthetic construct
MAPKKKRKVNISGSSCGSPNSADTSSDFKDLWTKLKECHDREVQGLQVKVTKLKQERILDAQRLEEFFTKNQQLREQQKVLHETIKVLEDRLRAGLCDRCAVTEEHMRKKQQEFENIRQQNLKLITELMNERNTLQEENKKLSEQLQQKIENDQQHQAAELECEEDVIPDSPITAFSFSGVNRLRRKENPHVRYIEQTHTKLEHSVCANEMRKVSKSSTHPQHNPNENEILVADTYDQSQSPMAKAHGTSSYTPDKSSFNLATVVAETLGLGVQEESETQGPMSPLGDELYHCLEGNHKKQPFESGSETPGTSESATPEGSPKRKVSSAEGAAKEEPKRRSARLSAKPPAKVEAKPKKAAAKDKSSDKKVQTKGKRGAKGKQAEVANQETKEDLPAENGETKTEESPASDEAGEKEAKSDSGSETPGTSESATPESYEQLAPQPCVGETLHSSLPRDSELFVPEEGSSEKESEDAPKTSPPTPGKHGLEQTGEEKVMVTVPDKNPPCPCCGTRVNSVLNLIEHLKVSHGKRGVCFRCAKCGKENSNYHSVVCHFKKCRGPETEKAPAGEWICEVCNRDFTTKIGLGQHKRLAHPAVRNQERIVASQPKETSNRGAHKRCWTKEEEELLIRLEAQFEGNKNINKLIAEHITTKTAKQISDKRRLLSRKPAEEPREEPGTCHHTRRAAASLRTEPEMSHHAQAEDRDNGPGRRPLPGRAAAGGRTMDEIRRHPDKGNGQQRPTKQKSEEQLQAYYKKTLEERLSAGALNTFPRAFKQVMEGRDIKLVINQTAQDCFGCLESISQIRTATRDKKDTVTREKHPKKPFQKWMKKRAIKKGNYLRFQRLFYLDRGKLAKIILDDIECLSCDIPLSEIYSVFKTRWETTGSFKSLGDFKTYGKADNTAFRELITAKEIEKNVQEMSKGSAPGPDGITLGDVVKMDPEFSRTMEIFNLWLTTGKIPDMVRGCRTVLIPKSSKPDRLKDINNWRPITIGSILLRLFSRIVTARLSKACPLNPRQRGFIRAAGCSENLKLLQTIIWSAKREHRPLGVVFVDIAKAFDTVSHQHIIHALQQREVDPHIVGLVSNMYENISTYITTKRNTKTDKIQIRVGVKQGDPMSPLLFNLAMDPLLCKLEESGKGYHRGQSSITAMAFADDLVLLSDSWENMNTNISILETFCNLTGLKTQGQKCHGFYIKPTKDSYTINDCAAWTINGTPLNMIDPGESEKYLGLQFDPWIGIARSGLSTKLDFWLQRIDQAPLKPLQKTDILKTYTIPRLIYIADHSEVKSALLETLDQKIRTAVKEWLHLPPCTCDAILYSSTRDGGLGITKLAGLIPSVQARRLHRIAQSSDDTMKCFMEKEKMEQLHKKLWIQAGGDRENIPSIWEAPPSSEPPNNVSTNSEWEAPTQKDKFPKPCNWRKNEFKKWTKLASQGRGIVNFERDKISNHWIQYYRRIPHRKLLTALQLRANVYPTREFLARGRQDQYIKACRHCDADNESCAHIIGNCPVTQDARIKRHNYICELLLEEAKKKDWVVFKEPHIRDSNKELYKPDLIFVKDGRALVVDVTVRYEAAKSSLEEAAAEKVRKYKHLETEVRHLTNAKDVTFVGFPLGARGKWHQDNFKLLTELGLSKSRQVKMAETFSTVALFSSVDIVHMFASRARKSMVM

SEQ ID NO: 1035 - protein, 1665 aa, synthetic construct
MAPKKKRKVNISGSSCGSPNSADTSSDFKDLWTKLKECHDREVQGLQVKVTKLKQERILDAQRLEEFFTKNQQLREQQKVLHETIKVLEDRLRAGLCDRCAVTEEHMRKKQQEFENIRQQNLKLITELMNERNTLQEENKKLSEQLQQKIENDQQHQAAELECEEDVIPDSPITAFSFSGVNRLRRKENPHVRYIEQTHTKLEHSVCANEMRKVSKSSTHPQHNPNENEILVADTYDQSQSPMAKAHGTSSYTPDKSSFNLATVVAETLGLGVQEESETQGPMSPLGDELYHCLEGNHKKQPFESGSETPGTSESATPEGSPKRKVSSAEGAAKEEPKRRSARLSAKPPAKVEAKPKKAAAKDKSSDKKVQTKGKRGAKGKQAEVANQETKEDLPAENGETKTEESPASDEAGEKEAKSDSGSETPGTSESATPESYEQLAPQPCVGETLHSSLPRDSELFVPEEGSSEKESEDAPKTSPPTPGKHGLEQTGEEKVMVTVPDKNPPCPCCGTRVNSVLNLIEHLKVSHGKRGVCFRCAKCGKENSNYHSVVCHFKKCRGPETEKAPAGEWICEVCNRDFTTKIGLGQHKRLAHPAVRNQERIVASQPKETSNRGAHKRCWTKEEEELLIRLEAQFEGNKNINKLIAEHITTKTAKQISDKRRLLSRKPAEEPREEPGTCHHTRRAAASLRTEPEMSHHAQAEDRDNGPGRRPLPGRAAAGGRTMDEIRRHPDKGNGQQRPTKQKSEEQLQAYYKKTLEERLSAGALNTFPRAFKQVMEGRDIKLVINQTAQDCFGCLESISQIRTATRDKKDTVTREKHPKKPFQKWMKKRAIKKGNYLRFQRLFYLDRGKLAKIILDDIECLSCDIPLSEIYSVFKTRWETTGSFKSLGDFKTYGKADNTAFRELITAKEIEKNVQEMSKGSAPGPDGITLGDVVKMDPEFSRTMEIFNLWLTTGKIPDMVRGCRTVLIPKSSKPDRLKDINNWRPITIGSILLRLFSRIVTARLSKACPLNPRQRGFIRAAGCSENLKLLQTIIWSAKREHRPLGVVFVDIAKAFDTVSHQHIIHALQQREVDPHIVGLVSNMYENISTYITTKRNTHTDKIQIRVGVKQGDPMSPLLFNLAMDPLLCKLEESGKGYHRGGSSITAMAFADDLVLLSDSWENMNTNISILETFCNLTGLKTQGQKCHGFYIKPTKDSYTINDCAAWTINGTPLNMIDPGESEKYLGLQFDPWIGIARSGLSTKLDFWLQRIDQAPLKPLQKTDILKTYTIPRLIYIADHSEVKSALLETLDQKIRTAVKEWLHLPPCTCDAILYSSTRDGGLGITKLAGLIPSVQARRLHRIAQSSDDTMKCFMEKEKMEQLHKKLWIQAGGDRENIPSIWEAPPSSEPPNNVSTNSEWEAPTQKDKFPKPCNWRKNEFKKWTKLASQGRGIVNFERDKISNHWIQYYRRIPHRKLLTALQLRANVYPTREFLARGRQDQYIKACRHCDADNESCAHIIGNCPVTQDARIKRHNYICELLLEEAKKKDWVVFKEPHIRDSNKELYKPDLIFVKDGRALVVDVTVRYEAAKSSLEEAAAEKVRKYKHLETEVRHLTNAKDVTFVGFPLGARGKWHQDNFKLLTELGLSKSRQVKMAETFSTVALFSSVDIVHMFASRARKSMVM

SEQ ID NO: 1036 - protein, 1665 aa, synthetic construct
MAPKKKRKVNISGSSCGSPNSADTSSDFKDLWTKLKECHDREVQGLQVKVTKLKQERILDAQRLEEFFTKNQQLREQQKVLHETIKVLEDRLRAGLCDRCAVTEEHMRKKQQEFENIRQQNLKLITELMNERNTLQEENKKLSEQLQQKIENDQQHQAAELECEEDVIPDSPITAFSFSGVNRLRRKENPHVRYIEQTHTKLEHSVCANEMRKVSKSSTHPQHNPNENEILVADTYDQSQSPMAKAHGTSSYTPDKSSFNLATVVAETLGLGVQEESETQGPMSPLGDELYHCLEGNHKKQPFESGSETPGTSESATPEGSPKRKVSSAEGAAKEEPKRRSARLSAKPPAKVEAKPKKAAAKDKSSDKKVQTKGKRGAKGKQAEVANQETKEDLPAENGETKTEESPASDEAGEKEAKSDSGSETPGTSESATPESYEQLAPQPCVGETLHSSLPRDSELFVPEEGSSEKESEDAPKTSPPTPGKHGLEQTGEEKVMVTVPDKNPPCPCCGTRVNSVLNLIEHLKVSHGKRGVCFRCAKCGKENSNYHSVVCHFKKCRGPETEKAPAGEWICEVCNRDFTTKIGLGQHKRLAHPAVRNQERIVASQPKETSNRGAHKRCWTKEEEELLIRLEAQFEGNKNINKLIAEHITTKTAKQISDKRRLLSRKPAEEPREEPGTCHHTRRAAASLRTEPEMSHHAQAEDRDNGPGRRPLPGRAAAGGRTMDEIRRHPDKGNGQQRPTKQKSEEQLQAYYKKTLEERLSAGALNTFPRAFKQVMEGRDIKLVINQTAQDCFGCLESISQIRTATRDKKDTVTREKHPKKPFQKWMKKRAIKKGNYLRFQRLFYLDRGKLAKIILDDIECLSCDIPLSEIYSVFKTRWETTGSFKSLGDFKTYGKADNTAFRELITAKEIEKNVQEMSKGSAPGPDGITLGDVVKMDPEFSRTMEIFNLWLTTGKIPDMVRGCRTVLIPKSSKPDRLKDINNWRPITIGSILLRLFSRIVTARLSKACPLNPRQRGFIRAAGCSENLKLLQTIIWSAKREHRPLGVVFVDIAKAFDTVSHQHIIHALQQREVDPHIVGLVSNMYENISTYITTKRNTHTDKIQIRVGVKQGDPMSPLLFNLAMDPLLCKLEESGKGYHRGDSSITAMAFADDLVLLSDSWENMNTNISILETFCNLTGLKTQGQKCHGFYIKPTKDSYTINDCAAWTINGTPLNMIDPGESEKYLGLQFDPWIGIARSGLSTKLDFWLQRIDQAPLKPLQKTDILKTYTIPRLIYIADHSEVKSALLETLDQKIRTAVKEWLHLPPCTCDAILYSSTRDGGLGITKLAGLIPSVQARRLHRIAQSSDDTMKCFMEKEKMEQLHKKLWIQAGGDRENIPSIWEAPPSSEPPNNVSTNSEWEAPTQKDKFPKPCNWRKNEFKKWTKLASQGRGIVNFERDKISNHWIQYYRRIPHRKLLTALQLRANVYPTREFLARGRQDQYIKACRHCDADNESCAHIIGNCPVTQDARIKRHNYICELLLEEAKKKDWVVFKEPHIRDSNKELYKPDLIFVKDGRALVVDVTVRYEAAKSSLEEAAAEKVRKYKHLETEVRHLTNAKDVTFVGFPLGARGKWHQDNFKLLTELGLSKSRQVKMAETFSTVALFSSVDIVHMFASRARKSMVM

SEQ ID NO: 1037 - protein, 1665 aa, synthetic construct
MAPKKKRKVNISGSSCGSPNSADTSSDFKDLWTKLKECHDREVQGLQVKVTKLKQERILDAQRLEEFFTKNQQLREQQKVLHETIKVLEDRLRAGLCDRCAVTEEHMRKKQQEFENIRQQNLKLITELMNERNTLQEENKKLSEQLQQKIENDQQHQAAELECEEDVIPDSPITAFSFSGVNRLRRKENPHVRYIEQTHTKLEHSVCANEMRKVSKSSTHPQHNPNENEILVADTYDQSQSPMAKAHGTSSYTPDKSSFNLATVVAETLGLGVQEESETQGPMSPLGDELYHCLEGNHKKQPFESGSETPGTSESATPEGSPKRKVSSAEGAAKEEPKRRSARLSAKPPAKVEAKPKKAAAKDKSSDKKVQTKGKRGAKGKQAEVANQETKEDLPAENGETKTEESPASDEAGEKEAKSDSGSETPGTSESATPESYEQLAPQPCVGETLHSSLPRDSELFVPEEGSSEKESEDAPKTSPPTPGKHGLEQTGEEKVMVTVPDKNPPCPCCGTRVNSVLNLIEHLKVSHGKRGVCFRCAKCGKENSNYHSVVCHFKKCRGPETEKAPAGEWICEVCNRDFTTKIGLGQHKRLAHPAVRNQERIVASQPKETSNRGAHKRCWTKEEEELLIRLEAQFEGNKNINKLIAEHITTKTAKQISDKRRLLSRKPAEEPREEPGTCHHTRRAAASLRTEPEMSHHAQAEDRDNGPGRRPLPGRAAAGGRTMDEIRRHPDKGNGQQRPTKQKSEEQLQAYYKKTLEERLSAGALNTFPRAFKQVMEGRDIKLVINQTAQDCFGCLESISQIRTATRDKKDTVTREKHPKKPFQKWMKKRAIKKGNYLRFQRLFYLDRGKLAKIILDDIECLSCDIPLSEIYSVFKTRWETTGSFKSLGDFKTYGKADNTAFRELITAKEIEKNVQEMSKGSAPGPDGITLGDVVKMDPEFSRTMEIFNLWLTTGKIPDMVRGCRTVLIPKSSKPDRLKDINNWRPITIGSILLRLFSRIVTARLSKACPLNPRQRGFIRAAGCSENLKLLQTIIWSAKREHRPLGVVFVDIAKAFDTVSHQHIIHALQQREVDPHIVGLVSNMYENISTYITTKRNTHTDKIQIRVGVKQGDPMSPLLFNLAMDPLLCKLEESGKGYHRGQSSITAMAFADDLVLLSDSWENMNTNISILETFCNLTGLKTQGKKCHGFYIKPTKDSYTINDCAAWTINGTPLNMIDPGESEKYLGLQFDPWIGIARSGLSTKLDFWLQRIDQAPLKPLQKTDILKTYTIPRLIYIADHSEVKSALLETLDQKIRTAVKEWLHLPPCTCDAILYSSTRDGGLGITKLAGLIPSVQARRLHRIAQSSDDTMKCFMEKEKMEQLHKKLWIQAGGDRENIPSIWEAPPSSEPPNNVSTNSEWEAPTQKDKFPKPCNWRKNEFKKWTKLASQGRGIVNFERDKISNHWIQYYRRIPHRKLLTALQLRANVYPTREFLARGRQDQYIKACRHCDADNESCAHIIGNCPVTQDARIKRHNYICELLLEEAKKKDWVVFKEPHIRDSNKELYKPDLIFVKDGRALVVDVTVRYEAAKSSLEEAAAEKVRKYKHLETEVRHLTNAKDVTFVGFPLGARGKWHQDNFKLLTELGLSKSRQVKMAETFSTVALFSSVDIVHMFASRARKSMVM

SEQ ID NO: 1038 - protein, 1665 aa, synthetic construct
MAPKKKRKVNISGSSCGSPNSADTSSDFKDLWTKLKECHDREVQGLQVKVTKLKQERILDAQRLEEFFTKNQQLREQQKVLHETIKVLEDRLRAGLCDRCAVTEEHMRKKQQEFENIRQQNLKLITELMNERNTLQEENKKLSEQLQQKIENDQQHQAAELECEEDVIPDSPITAFSFSGVNRLRRKENPHVRYIEQTHTKLEHSVCANEMRKVSKSSTHPQHNPNENEILVADTYDQSQSPMAKAHGTSSYTPDKSSFNLATVVAETLGLGVQEESETQGPMSPLGDELYHCLEGNHKKQPFESGSETPGTSESATPEGSPKRKVSSAEGAAKEEPKRRSARLSAKPPAKVEAKPKKAAAKDKSSDKKVQTKGKRGAKGKQAEVANQETKEDLPAENGETKTEESPASDEAGEKEAKSDSGSETPGTSESATPESYEQLAPQPCVGETLHSSLPRDSELFVPEEGSSEKESEDAPKTSPPTPGKHGLEQTGEEKVMVTVPDKNPPCPCCGTRVNSVLNLIEHLKVSHGKRGVCFRCAKCGKENSNYHSVVCHFKKCRGPETEKAPAGEWICEVCNRDFTTKIGLGQHKRLAHPAVRNQERIVASQPKETSNRGAHKRCWTKEEEELLIRLEAQFEGNKNINKLIAEHITTKTAKQISDKRRLLSRKPAEEPREEPGTCHHTRRAAASLRTEPEMSHHAQAEDRDNGPGRRPLPGRAAAGGRTMDEIRRHPDKGNGQQRPTKQKSEEQLQAYYKKTLEERLSAGALNTFPRAFKQVMEGRDIKLVINQTAQDCFGCLESISQIRTATRDKKDTVTREKHPKKPFQKWMKKRAIKKGNYLRFQRLFYLDRGKLAKIILDDIECLSCDIPLSEIYSVFKTRWETTGSFKSLGDFKTYGKADNTAFRELITAKEIEKNVQEMSKGSAPGPDGITLGDVVKMDPEFSRTMEIFNLWLTTGKIPDMVRGCRTVLIPKSSKPDRLKDINNWRPITIGSILLRLFSRIVTARLSKACPLNPRQRGFIRAAGCSENLKLLQTIIWSAKREHRPLGVVFVDIAKAFDTVSHQHIIHALQQREVDPHIVGLVSNMYENISTYITTKRNTHTDKIQIRVGVKQGDPMSPLLFNLAMDPLLCKLEESGKGYHRGQSSITAMAFADDLVLLSDSWENMNTNISILETFCNLTGLKTQGSKCHGFYIKPTKDSYTINDCAAWTINGTPLNMIDPGESEKYLGLQFDPWIGIARSGLSTKLDFWLQRIDQAPLKPLQKTDILKTYTIPRLIYIADHSEVKSALLETLDQKIRTAVKEWLHLPPCTCDAILYSSTRDGGLGITKLAGLIPSVQARRLHRIAQSSDDTMKCFMEKEKMEQLHKKLWIQAGGDRENIPSIWEAPPSSEPPNNVSTNSEWEAPTQKDKFPKPCNWRKNEFKKWTKLASQGRGIVNFERDKISNHWIQYYRRIPHRKLLTALQLRANVYPTREFLARGRQDQYIKACRHCDADNESCAHIIGNCPVTQDARIKRHNYICELLLEEAKKKDWVVFKEPHIRDSNKELYKPDLIFVKDGRALVVDVTVRYEAAKSSLEEAAAEKVRKYKHLETEVRHLTNAKDVTFVGFPLGARGKWHQDNFKLLTELGLSKSRQVKMAETFSTVALFSSVDIVHMFASRARKSMVM

SEQ ID NO: 1039 - protein, 1665 aa, synthetic construct
MAPKKKRKVNISGSSCGSPNSADTSSDFKDLWTKLKECHDREVQGLQVKVTKLKQERILDAQRLEEFFTKNQQLREQQKVLHETIKVLEDRLRAGLCDRCAVTEEHMRKKQQEFENIRQQNLKLITELMNERNTLQEENKKLSEQLQQKIENDQQHQAAELECEEDVIPDSPITAFSFSGVNRLRRKENPHVRYIEQTHTKLEHSVCANEMRKVSKSSTHPQHNPNENEILVADTYDQSQSPMAKAHGTSSYTPDKSSFNLATVVAETLGLGVQEESETQGPMSPLGDELYHCLEGNHKKQPFESGSETPGTSESATPEGSPKRKVSSAEGAAKEEPKRRSARLSAKPPAKVEAKPKKAAAKDKSSDKKVQTKGKRGAKGKQAEVANQETKEDLPAENGETKTEESPASDEAGEKEAKSDSGSETPGTSESATPESYEQLAPQPCVGETLHSSLPRDSELFVPEEGSSEKESEDAPKTSPPTPGKHGLEQTGEEKVMVTVPDKNPPCPCCGTRVNSVLNLIEHLKVSHGKRGVCFRCAKCGKENSNYHSVVCHFKKCRGPETEKAPAGEWICEVCNRDFTTKIGLGQHKRLAHPAVRNQERIVASQPKETSNRGAHKRCWTKEEEELLIRLEAQFEGNKNINKLIAEHITTKTAKQISDKRRLLSRKPAEEPREEPGTCHHTRRAAASLRTEPEMSHHAQAEDRDNGPGRRPLPGRAAAGGRTMDEIRRHPDKGNGQQRPTKQKSEEQLQAYYKKTLEERLSAGALNTFPRAFKQVMEGRDIKLVINQTAQDCFGCLESISQIRTATRDKKDTVTREKHPKKPFQKWMKKRAIKKGNYLRFQRLFYLDRGKLAKIILDDIECLSCDIPLSEIYSVFKTRWETTGSFKSLGDFKTYGKADNTAFRELITAKEIEKNVQEMSKGSAPGPDGITLGDVVKMDPEFSRTMEIFNLWLTTGKIPDMVRGCRTVLIPKSSKPDRLKDINNWRPITIGSILLRLFSRIVTARLSKACPLNPRQRGFIRAAGCSENLKLLQTIIWSAKREHRPLGVVFVDIAKAFDTVSHQHIIHALQQREVDPHIVGLVSNMYENISTYITTKRNTHTDKIQIRVGVKQGDPMSPLLFNLAMDPLLCKLEESGKGYHRGQSSITAMAFADDLVLLSDSWENMNTNISILETFCNLTGLKTQGQKCHGFYIKPTKDSYTINDCPAWTINGTPLNMIDPGESEKYLGLQFDPWIGIARSGLSTKLDFWLQRIDQAPLKPLQKTDILKTYTIPRLIYIADHSEVKSALLETLDQKIRTAVKEWLHLPPCTCDAILYSSTRDGGLGITKLAGLIPSVQARRLHRIAQSSDDTMKCFMEKEKMEQLHKKLWIQAGGDRENIPSIWEAPPSSEPPNNVSTNSEWEAPTQKDKFPKPCNWRKNEFKKWTKLASQGRGIVNFERDKISNHWIQYYRRIPHRKLLTALQLRANVYPTREFLARGRQDQYIKACRHCDADNESCAHIIGNCPVTQDARIKRHNYICELLLEEAKKKDWVVFKEPHIRDSNKELYKPDLIFVKDGRALVVDVTVRYEAAKSSLEEAAAEKVRKYKHLETEVRHLTNAKDVTFVGFPLGARGKWHQDNFKLLTELGLSKSRQVKMAETFSTVALFSSVDIVHMFASRARKSMVM

SEQ ID NO: 1040 - protein, 1665 aa, synthetic construct
MAPKKKRKVNISGSSCGSPNSADTSSDFKDLWTKLKECHDREVQGLQVKVTKLKQERILDAQRLEEFFTKNQQLREQQKVLHETIKVLEDRLRAGLCDRCAVTEEHMRKKQQEFENIRQQNLKLITELMNERNTLQEENKKLSEQLQQKIENDQQHQAAELECEEDVIPDSPITAFSFSGVNRLRRKENPHVRYIEQTHTKLEHSVCANEMRKVSKSSTHPQHNPNENEILVADTYDQSQSPMAKAHGTSSYTPDKSSFNLATVVAETLGLGVQEESETQGPMSPLGDELYHCLEGNHKKQPFESGSETPGTSESATPEGSPKRKVSSAEGAAKEEPKRRSARLSAKPPAKVEAKPKKAAAKDKSSDKKVQTKGKRGAKGKQAEVANQETKEDLPAENGETKTEESPASDEAGEKEAKSDSGSETPGTSESATPESYEQLAPQPCVGETLHSSLPRDSELFVPEEGSSEKESEDAPKTSPPTPGKHGLEQTGEEKVMVTVPDKNPPCPCCGTRVNSVLNLIEHLKVSHGKRGVCFRCAKCGKENSNYHSVVCHFKKCRGPETEKAPAGEWICEVCNRDFTTKIGLGQHKRLAHPAVRNQERIVASQPKETSNRGAHKRCWTKEEEELLIRLEAQFEGNKNINKLIAEHITTKTAKQISDKRRLLSRKPAEEPREEPGTCHHTRRAAASLRTEPEMSHHAQAEDRDNGPGRRPLPGRAAAGGRTMDEIRRHPDKGNGQQRPTKQKSEEQLQAYYKKTLEERLSAGALNTFPRAFKQVMEGRDIKLVINQTAQDCFGCLESISQIRTATRDKKDTVTREKHPKKPFQKWMKKRAIKKGNYLRFQRLFYLDRGKLAKIILDDIECLSCDIPLSEIYSVFKTRWETTGSFKSLGDFKTYGKADNTAFRELITAKEIEKNVQEMSKGSAPGPDGITLGDVVKMDPEFSRTMEIFNLWLTTGKIPDMVRGCRTVLIPKSSKPDRLKDINNWRPITIGSILLRLFSRIVTARLSKACPLNPRQRGFIRAAGCSENLKLLQTIIWSAKREHRPLGVVFVDIAKAFDTVSHQHIIHALQQREVDPHIVGLVSNMYENISTYITTKRNTHTDKIQIRVGVKQGDPMSPLLFNLAMDPLLCKLEESGKGYHRGQSSITAMAFADDLVLLSDSWENMNTNISILETFCNLTGLKTQGQKCHGFYIKPTKDSYTINDCAAWTINGTPLNMIGPGESEKYLGLQFDPWIGIARSGLSTKLDFWLQRIDQAPLKPLQKTDILKTYTIPRLIYIADHSEVKSALLETLDQKIRTAVKEWLHLPPCTCDAILYSSTRDGGLGITKLAGLIPSVQARRLHRIAQSSDDTMKCFMEKEKMEQLHKKLWIQAGGDRENIPSIWEAPPSSEPPNNVSTNSEWEAPTQKDKFPKPCNWRKNEFKKWTKLASQGRGIVNFERDKISNHWIQYYRRIPHRKLLTALQLRANVYPTREFLARGRQDQYIKACRHCDADNESCAHIIGNCPVTQDARIKRHNYICELLLEEAKKKDWVVFKEPHIRDSNKELYKPDLIFVKDGRALVVDVTVRYEAAKSSLEEAAAEKVRKYKHLETEVRHLTNAKDVTFVGFPLGARGKWHQDNFKLLTELGLSKSRQVKMAETFSTVALFSSVDIVHMFASRARKSMVM

SEQ ID NO: 1041 - protein, 1665 aa, synthetic construct
MAPKKKRKVNISGSSCGSPNSADTSSDFKDLWTKLKECHDREVQGLQVKVTKLKQERILDAQRLEEFFTKNQQLREQQKVLHETIKVLEDRLRAGLCDRCAVTEEHMRKKQQEFENIRQQNLKLITELMNERNTLQEENKKLSEQLQQKIENDQQHQAAELECEEDVIPDSPITAFSFSGVNRLRRKENPHVRYIEQTHTKLEHSVCANEMRKVSKSSTHPQHNPNENEILVADTYDQSQSPMAKAHGTSSYTPDKSSFNLATVVAETLGLGVQEESETQGPMSPLGDELYHCLEGNHKKQPFESGSETPGTSESATPEGSPKRKVSSAEGAAKEEPKRRSARLSAKPPAKVEAKPKKAAAKDKSSDKKVQTKGKRGAKGKQAEVANQETKEDLPAENGETKTEESPASDEAGEKEAKSDSGSETPGTSESATPESYEQLAPQPCVGETLHSSLPRDSELFVPEEGSSEKESEDAPKTSPPTPGKHGLEQTGEEKVMVTVPDKNPPCPCCGTRVNSVLNLIEHLKVSHGKRGVCFRCAKCGKENSNYHSVVCHFKKCRGPETEKAPAGEWICEVCNRDFTTKIGLGQHKRLAHPAVRNQERIVASQPKETSNRGAHKRCWTKEEEELLIRLEAQFEGNKNINKLIAEHITTKTAKQISDKRRLLSRKPAEEPREEPGTCHHTRRAAASLRTEPEMSHHAQAEDRDNGPGRRPLPGRAAAGGRTMDEIRRHPDKGNGQQRPTKQKSEEQLQAYYKKTLEERLSAGALNTFPRAFKQVMEGRDIKLVINQTAQDCFGCLESISQIRTATRDKKDTVTREKHPKKPFQKWMKKRAIKKGNYLRFQRLFYLDRGKLAKIILDDIECLSCDIPLSEIYSVFKTRWETTGSFKSLGDFKTYGKADNTAFRELITAKEIEKNVQEMSKGSAPGPDGITLGDVVKMDPEFSRTMEIFNLWLTTGKIPDMVRGCRTVLIPKSSKPDRLKDINNWRPITIGSILLRLFSRIVTARLSKACPLNPRQRGFIRAAGCSENLKLLQTIIWSAKREHRPLGVVFVDIAKAFDTVSHQHIIHALQQREVDPHIVGLVSNMYENISTYITTKRNTHTDKIQIRVGVKQGDPMSPLLFNLAMDPLLCKLEESGKGYHRGQSSITAMAFADDLVLLSDSWENMNTNISILETFCNLTGLKTQGQKCHGFYIKPTKDSYTINDCAAWTINGTPLNMIDPGESEKYLGLQFDPWIGIARSGLSTKLDSWLQRIDQAPLKPLQKTDILKTYTIPRLIYIADHSEVKSALLETLDQKIRTAVKEWLHLPPCTCDAILYSSTRDGGLGITKLAGLIPSVQARRLHRIAQSSDDTMKCFMEKEKMEQLHKKLWIQAGGDRENIPSIWEAPPSSEPPNNVSTNSEWEAPTQKDKFPKPCNWRKNEFKKWTKLASQGRGIVNFERDKISNHWIQYYRRIPHRKLLTALQLRANVYPTREFLARGRQDQYIKACRHCDADNESCAHIIGNCPVTQDARIKRHNYICELLLEEAKKKDWVVFKEPHIRDSNKELYKPDLIFVKDGRALVVDVTVRYEAAKSSLEEAAAEKVRKYKHLETEVRHLTNAKDVTFVGFPLGARGKWHQDNFKLLTELGLSKSRQVKMAETFSTVALFSSVDIVHMFASRARKSMVM

SEQ ID NO: 1042 - protein, 1665 aa, synthetic construct
MAPKKKRKVNISGSSCGSPNSADTSSDFKDLWTKLKECHDREVQGLQVKVTKLKQERILDAQRLEEFFTKNQQLREQQKVLHETIKVLEDRLRAGLCDRCAVTEEHMRKKQQEFENIRQQNLKLITELMNERNTLQEENKKLSEQLQQKIENDQQHQAAELECEEDVIPDSPITAFSFSGVNRLRRKENPHVRYIEQTHTKLEHSVCANEMRKVSKSSTHPQHNPNENEILVADTYDQSQSPMAKAHGTSSYTPDKSSFNLATVVAETLGLGVQEESETQGPMSPLGDELYHCLEGNHKKQPFESGSETPGTSESATPEGSPKRKVSSAEGAAKEEPKRRSARLSAKPPAKVEAKPKKAAAKDKSSDKKVQTKGKRGAKGKQAEVANQETKEDLPAENGETKTEESPASDEAGEKEAKSDSGSETPGTSESATPESYEQLAPQPCVGETLHSSLPRDSELFVPEEGSSEKESEDAPKTSPPTPGKHGLEQTGEEKVMVTVPDKNPPCPCCGTRVNSVLNLIEHLKVSHGKRGVCFRCAKCGKENSNYHSVVCHFKKCRGPETEKAPAGEWICEVCNRDFTTKIGLGQHKRLAHPAVRNQERIVASQPKETSNRGAHKRCWTKEEEELLIRLEAQFEGNKNINKLIAEHITTKTAKQISDKRRLLSRKPAEEPREEPGTCHHTRRAAASLRTEPEMSHHAQAEDRDNGPGRRPLPGRAAAGGRTMDEIRRHPDKGNGQQRPTKQKSEEQLQAYYKKTLEERLSAGALNTFPRAFKQVMEGRDIKLVINQTAQDCFGCLESISQIRTATRDKKDTVTREKHPKKPFQKWMKKRAIKKGNYLRFQRLFYLDRGKLAKIILDDIECLSCDIPLSEIYSVFKTRWETTGSFKSLGDFKTYGKADNTAFRELITAKEIEKNVQEMSKGSAPGPDGITLGDVVKMDPEFSRTMEIFNLWLTTGKIPDMVRGCRTVLIPKSSKPDRLKDINNWRPITIGSILLRLFSRIVTARLSKACPLNPRQRGFIRAAGCSENLKLLQTIIWSAKREHRPLGVVFVDIAKAFDTVSHQHIIHALQQREVDPHIVGLVSNMYENISTYITTKRNTHTDKIQIRVGVKQGDPMSPLLFNLAMDPLLCKLEESGKGYHRGQSSITAMAFADDLVLLSDSWENMNTNISILETFCNLTGLKTQGQKCHGFYIKPTKDSYTINDCAAWTINGTPLNMIDPGESEKYLGLQFDPWIGIARSGLSTKLDFWLQRIDQAPLKPLQKTDILKTYTIPRLIYIADHSEVKSSLLETLDQKIRTAVKEWLHLPPCTCDAILYSSTRDGGLGITKLAGLIPSVQARRLHRIAQSSDDTMKCFMEKEKMEQLHKKLWIQAGGDRENIPSIWEAPPSSEPPNNVSTNSEWEAPTQKDKFPKPCNWRKNEFKKWTKLASQGRGIVNFERDKISNHWIQYYRRIPHRKLLTALQLRANVYPTREFLARGRQDQYIKACRHCDADNESCAHIIGNCPVTQDARIKRHNYICELLLEEAKKKDWVVFKEPHIRDSNKELYKPDLIFVKDGRALVVDVTVRYEAAKSSLEEAAAEKVRKYKHLETEVRHLTNAKDVTFVGFPLGARGKWHQDNFKLLTELGLSKSRQVKMAETFSTVALFSSVDIVHMFASRARKSMVM

SEQ ID NO: 1043 - protein, 1665 aa, synthetic construct
MAPKKKRKVNISGSSCGSPNSADTSSDFKDLWTKLKECHDREVQGLQVKVTKLKQERILDAQRLEEFFTKNQQLREQQKVLHETIKVLEDRLRAGLCDRCAVTEEHMRKKQQEFENIRQQNLKLITELMNERNTLQEENKKLSEQLQQKIENDQQHQAAELECEEDVIPDSPITAFSFSGVNRLRRKENPHVRYIEQTHTKLEHSVCANEMRKVSKSSTHPQHNPNENEILVADTYDQSQSPMAKAHGTSSYTPDKSSFNLATVVAETLGLGVQEESETQGPMSPLGDELYHCLEGNHKKQPFESGSETPGTSESATPEGSPKRKVSSAEGAAKEEPKRRSARLSAKPPAKVEAKPKKAAAKDKSSDKKVQTKGKRGAKGKQAEVANQETKEDLPAENGETKTEESPASDEAGEKEAKSDSGSETPGTSESATPESYEQLAPQPCVGETLHSSLPRDSELFVPEEGSSEKESEDAPKTSPPTPGKHGLEQTGEEKVMVTVPDKNPPCPCCGTRVNSVLNLIEHLKVSHGKRGVCFRCAKCGKENSNYHSVVCHFKKCRGPETEKAPAGEWICEVCNRDFTTKIGLGQHKRLAHPAVRNQERIVASQPKETSNRGAHKRCWTKEEEELLIRLEAQFEGNKNINKLIAEHITTKTAKQISDKRRLLSRKPAEEPREEPGTCHHTRRAAASLRTEPEMSHHAQAEDRDNGPGRRPLPGRAAAGGRTMDEIRRHPDKGNGQQRPTKQKSEEQLQAYYKKTLEERLSAGALNTFPRAFKQVMEGRDIKLVINQTAQDCFGCLESISQIRTATRDKKDTVTREKHPKKPFQKWMKKRAIKKGNYLRFQRLFYLDRGKLAKIILDDIECLSCDIPLSEIYSVFKTRWETTGSFKSLGDFKTYGKADNTAFRELITAKEIEKNVQEMSKGSAPGPDGITYGDVVKMDPEFSRTMEIFNLWLTTGKIPDMVRGCRTVLIPKSSKPDRLKDINNWRPITIGSILLRLFSRIVTARLSKACPLNPRQRGFIRAAGCSENLKLLQTIIWSAKREHRPLGVVFVDIAKAFDTVSHQHIIHALQQREVDPHIVGLVSNMYENISTYITTKRNTHTDKIQIRVGVKQGDPMSPLLFNLAMDPLLCKLEESGKGYHRGQSSITAMAFADDLVLLSDSWENMNTNISILETFCNLTGLKTQGQKCHGFYIKPTKDSYTINDCAAWTINGTPLNMIDPGESEKYLGLQFDPWIGIARSGLSTKLDFWLQRIDQAPLKPLQKTDILKTYTIPRLIYIADHSEVKSALLETLDQKIRTAVKEWLHLPPCTCDAILYSSTRDGGLGITKLAGLIPSVQARRLHRIAQSSDDTMKCFMEKEKMEQLHKKLWIQAGGDRENIPSIWEAPPSSEPPNNVSTNSEWEAPTQKDKFPKPCNWRKNEFKKWTKLASQGRGIVNFERDKISNHWIQYYRRIPHRKLLTALQLRANVYPTREFLARGRQDQYIKACRHCDADNESCAHIIGNCPVTQDARIKRHNYICELLLEEAKKKDWVVFKEPHIRDSNKELYKPDLIFVKDGRALVVDVTVRYEAAKSSLEEAAAEKVRKYKHLETEVRHLTNAKDVTFVGFPLGARGKWHQDNFKLLTELGLSKSRQVKMAETFSTVALFSSVDIVHMFASRARKSMVM

SEQ ID NO: 1044 - protein, 1665 aa, synthetic construct
MAPKKKRKVNISGSSCGSPNSADTSSDFKDLWTKLKECHDREVQGLQVKVTKLKQERILDAQRLEEFFTKNQQLREQQKVLHETIKVLEDRLRAGLCDRCAVTEEHMRKKQQEFENIRQQNLKLITELMNERNTLQEENKKLSEQLQQKIENDQQHQAAELECEEDVIPDSPITAFSFSGVNRLRRKENPHVRYIEQTHTKLEHSVCANEMRKVSKSSTHPQHNPNENEILVADTYDQSQSPMAKAHGTSSYTPDKSSFNLATVVAETLGLGVQEESETQGPMSPLGDELYHCLEGNHKKQPFESGSETPGTSESATPEGSPKRKVSSAEGAAKEEPKRRSARLSAKPPAKVEAKPKKAAAKDKSSDKKVQTKGKRGAKGKQAEVANQETKEDLPAENGETKTEESPASDEAGEKEAKSDSGSETPGTSESATPESYEQLAPQPCVGETLHSSLPRDSELFVPEEGSSEKESEDAPKTSPPTPGKHGLEQTGEEKVMVTVPDKNPPCPCCGTRVNSVLNLIEHLKVSHGKRGVCFRCAKCGKENSNYHSVVCHFKKCRGPETEKAPAGEWICEVCNRDFTTKIGLGQHKRLAHPAVRNQERIVASQPKETSNRGAHKRCWTKEEEELLIRLEAQFEGNKNINKLIAEHITTKTAKQISDKRRLLSRKPAEEPREEPGTCHHTRRAAASLRTEPEMSHHAQAEDRDNGPGRRPLPGRAAAGGRTMDEIRRHPDKGNGQQRPTKQKSEEQLQAYYKKTLEERLSAGALNTFPRAFKQVMEGRDIKLVINQTAQDCFGCLESISQIRTATRDKKDTVTREKHPKKPFQKWMKKRAIKKGNYLRFQRLFYLDRGKLAKIILDDIECLSCDIPLSEIYSVFKTRWETTGSFKSLGDFKTYGKADNTAFRELITAKEIEKNVQEMSKGSAPGPDGITLGDVVKMDPEFSRTMEIFNLWLTTGKIPDMVRGCRTVLIPKSGKPDRLKDINNWRPITIGSILLRLFSRIVTARLSKACPLNPRQRGFIRAAGCSENLKLLQTIIWSAKREHRPLGVVFVDIAKAFDTVSHQHIIHALQQREVDPHIVGLVSNMYENISTYITTKRNTHTDKIQIRVGVKQGDPMSPLLFNLAMDPLLCKLEESGKGYHRGQSSITAMAFADDLVLLSDSWENMNTNISILETFCNLTGLKTQGQKCHGFYIKPTKDSYTINDCAAWTINGTPLNMIDPGESEKYLGLQFDPWIGIARSGLSTKLDFWLQRIDQAPLKPLQKTDILKTYTIPRLIYIADHSEVKSALLETLDQKIRTAVKEWLHLPPCTCDAILYSSTRDGGLGITKLAGLIPSVQARRLHRIAQSSDDTMKCFMEKEKMEQLHKKLWIQAGGDRENIPSIWEAPPSSEPPNNVSTNSEWEAPTQKDKFPKPCNWRKNEFKKWTKLASQGRGIVNFERDKISNHWIQYYRRIPHRKLLTALQLRANVYPTREFLARGRQDQYIKACRHCDADNESCAHIIGNCPVTQDARIKRHNYICELLLEEAKKKDWVVFKEPHIRDSNKELYKPDLIFVKDGRALVVDVTVRYEAAKSSLEEAAAEKVRKYKHLETEVRHLTNAKDVTFVGFPLGARGKWHQDNFKLLTELGLSKSRQVKMAETFSTVALFSSVDIVHMFASRARKSMVM

SEQ ID NO: 1045 - protein, 1665 aa, synthetic construct
MAPKKKRKVNISGSSCGSPNSADTSSDFKDLWTKLKECHDREVQGLQVKVTKLKQERILDAQRLEEFFTKNQQLREQQKVLHETIKVLEDRLRAGLCDRCAVTEEHMRKKQQEFENIRQQNLKLITELMNERNTLQEENKKLSEQLQQKIENDQQHQAAELECEEDVIPDSPITAFSFSGVNRLRRKENPHVRYIEQTHTKLEHSVCANEMRKVSKSSTHPQHNPNENEILVADTYDQSQSPMAKAHGTSSYTPDKSSFNLATVVAETLGLGVQEESETQGPMSPLGDELYHCLEGNHKKQPFESGSETPGTSESATPEGSPKRKVSSAEGAAKEEPKRRSARLSAKPPAKVEAKPKKAAAKDKSSDKKVQTKGKRGAKGKQAEVANQETKEDLPAENGETKTEESPASDEAGEKEAKSDSGSETPGTSESATPESYEQLAPQPCVGETLHSSLPRDSELFVPEEGSSEKESEDAPKTSPPTPGKHGLEQTGEEKVMVTVPDKNPPCPCCGTRVNSVLNLIEHLKVSHGKRGVCFRCAKCGKENSNYHSVVCHFKKCRGPETEKAPAGEWICEVCNRDFTTKIGLGQHKRLAHPAVRNQERIVASQPKETSNRGAHKRCWTKEEEELLIRLEAQFEGNKNINKLIAEHITTKTAKQISDKRRLLSRKPAEEPREEPGTCHHTRRAAASLRTEPEMSHHAQAEDRDNGPGRRPLPGRAAAGGRTMDEIRRHPDKGNGQQRPTKQKSEEQLQAYYKKTLEERLSAGALNTFPRAFKQVMEGRDIKLVINQTAQDCFGCLESISQIRTATRDKKDTVTREKHPKKPFQKWMKKRAIKKGNYLRFQRLFYLDRGKLAKIILDDIECLSCDIPLSEIYSVFKTRWETTGSFKSLGDFKTYGKADNTAFRELITAKEIEKNVQEMSKGSAPGPDGITLGDVVKMDPEFSRTMEIFNLWLTTGKIPDMVRGCRTVLIPKSSKPDRLKDPNNWRPITIGSILLRLFSRIVTARLSKACPLNPRQRGFIRAAGCSENLKLLQTIIWSAKREHRPLGVVFVDIAKAFDTVSHQHIIHALQQREVDPHIVGLVSNMYENISTYITTKRNTHTDKIQIRVGVKQGDPMSPLLFNLAMDPLLCKLEESGKGYHRGQSSITAMAFADDLVLLSDSWENMNTNISILETFCNLTGLKTQGQKCHGFYIKPTKDSYTINDCAAWTINGTPLNMIDPGESEKYLGLQFDPWIGIARSGLSTKLDFWLQRIDQAPLKPLQKTDILKTYTIPRLIYIADHSEVKSALLETLDQKIRTAVKEWLHLPPCTCDAILYSSTRDGGLGITKLAGLIPSVQARRLHRIAQSSDDTMKCFMEKEKMEQLHKKLWIQAGGDRENIPSIWEAPPSSEPPNNVSTNSEWEAPTQKDKFPKPCNWRKNEFKKWTKLASQGRGIVNFERDKISNHWIQYYRRIPHRKLLTALQLRANVYPTREFLARGRQDQYIKACRHCDADNESCAHIIGNCPVTQDARIKRHNYICELLLEEAKKKDWVVFKEPHIRDSNKELYKPDLIFVKDGRALVVDVTVRYEAAKSSLEEAAAEKVRKYKHLETEVRHLTNAKDVTFVGFPLGARGKWHQDNFKLLTELGLSKSRQVKMAETFSTVALFSSVDIVHMFASRARKSMVM

SEQ ID NO: 1046 - protein, 1665 aa, synthetic construct
MAPKKKRKVNISGSSCGSPNSADTSSDFKDLWTKLKECHDREVQGLQVKVTKLKQERILDAQRLEEFFTKNQQLREQQKVLHETIKVLEDRLRAGLCDRCAVTEEHMRKKQQEFENIRQQNLKLITELMNERNTLQEENKKLSEQLQQKIENDQQHQAAELECEEDVIPDSPITAFSFSGVNRLRRKENPHVRYIEQTHTKLEHSVCANEMRKVSKSSTHPQHNPNENEILVADTYDQSQSPMAKAHGTSSYTPDKSSFNLATVVAETLGLGVQEESETQGPMSPLGDELYHCLEGNHKKQPFESGSETPGTSESATPEGSPKRKVSSAEGAAKEEPKRRSARLSAKPPAKVEAKPKKAAAKDKSSDKKVQTKGKRGAKGKQAEVANQETKEDLPAENGETKTEESPASDEAGEKEAKSDSGSETPGTSESATPESYEQLAPQPCVGETLHSSLPRDSELFVPEEGSSEKESEDAPKTSPPTPGKHGLEQTGEEKVMVTVPDKNPPCPCCGTRVNSVLNLIEHLKVSHGKRGVCFRCAKCGKENSNYHSVVCHFKKCRGPETEKAPAGEWICEVCNRDFTTKIGLGQHKRLAHPAVRNQERIVASQPKETSNRGAHKRCWTKEEEELLIRLEAQFEGNKNINKLIAEHITTKTAKQISDKRRLLSRKPAEEPREEPGTCHHTRRAAASLRTEPEMSHHAQAEDRDNGPGRRPLPGRAAAGGRTMDEIRRHPDKGNGQQRPTKQKSEEQLQAYYKKTLEERLSAGALNTFPRAFKQVMEGRDIKLVINQTAQDCFGCLESISQIRTATRDKKDTVTREKHPKKPFQKWMKKRAIKKGNYLRFQRLFYLDRGKLAKIILDDIECLSCDIPLSEIYSVFKTRWETTGSFKSLGDFKTYGKADNTAFRELITAKEIEKNVQEMSKGSAPGPDGITLGDVVKMDPEFSRTMEIFNLWLTTGKIPDMVRGCRTVLIPKSSKPDRLKDINNYRPITIGSILLRLFSRIVTARLSKACPLNPRQRGFIRAAGCSENLKLLQTIIWSAKREHRPLGVVFVDIAKAFDTVSHQHIIHALQQREVDPHIVGLVSNMYENISTYITTKRNTHTDKIQIRVGVKQGDPMSPLLFNLAMDPLLCKLEESGKGYHRGQSSITAMAFADDLVLLSDSWENMNTNISILETFCNLTGLKTQGQKCHGFYIKPTKDSYTINDCAAWTINGTPLNMIDPGESEKYLGLQFDPWIGIARSGLSTKLDFWLQRIDQAPLKPLQKTDILKTYTIPRLIYIADHSEVKSALLETLDQKIRTAVKEWLHLPPCTCDAILYSSTRDGGLGITKLAGLIPSVQARRLHRIAQSSDDTMKCFMEKEKMEQLHKKLWIQAGGDRENIPSIWEAPPSSEPPNNVSTNSEWEAPTQKDKFPKPCNWRKNEFKKWTKLASQGRGIVNFERDKISNHWIQYYRRIPHRKLLTALQLRANVYPTREFLARGRQDQYIKACRHCDADNESCAHIIGNCPVTQDARIKRHNYICELLLEEAKKKDWVVFKEPHIRDSNKELYKPDLIFVKDGRALVVDVTVRYEAAKSSLEEAAAEKVRKYKHLETEVRHLTNAKDVTFVGFPLGARGKWHQDNFKLLTELGLSKSRQVKMAETFSTVALFSSVDIVHMFASRARKSMVM

SEQ ID NO: 1047 - protein, 1665 aa, synthetic construct
MAPKKKRKVNISGSSCGSPNSADTSSDFKDLWTKLKECHDREVQGLQVKVTKLKQERILDAQRLEEFFTKNQQLREQQKVLHETIKVLEDRLRAGLCDRCAVTEEHMRKKQQEFENIRQQNLKLITELMNERNTLQEENKKLSEQLQQKIENDQQHQAAELECEEDVIPDSPITAFSFSGVNRLRRKENPHVRYIEQTHTKLEHSVCANEMRKVSKSSTHPQHNPNENEILVADTYDQSQSPMAKAHGTSSYTPDKSSFNLATVVAETLGLGVQEESETQGPMSPLGDELYHCLEGNHKKQPFESGSETPGTSESATPEGSPKRKVSSAEGAAKEEPKRRSARLSAKPPAKVEAKPKKAAAKDKSSDKKVQTKGKRGAKGKQAEVANQETKEDLPAENGETKTEESPASDEAGEKEAKSDSGSETPGTSESATPESYEQLAPQPCVGETLHSSLPRDSELFVPEEGSSEKESEDAPKTSPPTPGKHGLEQTGEEKVMVTVPDKNPPCPCCGTRVNSVLNLIEHLKVSHGKRGVCFRCAKCGKENSNYHSVVCHFKKCRGPETEKAPAGEWICEVCNRDFTTKIGLGQHKRLAHPAVRNQERIVASQPKETSNRGAHKRCWTKEEEELLIRLEAQFEGNKNINKLIAEHITTKTAKQISDKRRLLSRKPAEEPREEPGTCHHTRRAAASLRTEPEMSHHAQAEDRDNGPGRRPLPGRAAAGGRTMDEIRRHPDKGNGQQRPTKQKSEEQLQAYYKKTLEERLSAGALNTFPRAFKQVMEGRDIKLVINQTAQDCFGCLESISQIRTATRDKKDTVTREKHPKKPFQKWMKKRAIKKGNYLRFQRLFYLDRGKLAKIILDDIECLSCDIPLSEIYSVFKTRWETTGSFKSLGDFKTYGKADNTAFRELITAKEIEKNVQEMSKGSAPGPDGITLGDVVKMDPEFSRTMEIFNLWLTTGKIPDMVRGCRTVLIPKSSKPDRLKDINNWRPIAIGSILLRLFSRIVTARLSKACPLNPRQRGFIRAAGCSENLKLLQTIIWSAKREHRPLGVVFVDIAKAFDTVSHQHIIHALQQREVDPHIVGLVSNMYENISTYITTKRNTHTDKIQIRVGVKQGDPMSPLLFNLAMDPLLCKLEESGKGYHRGQSSITAMAFADDLVLLSDSWENMNTNISILETFCNLTGLKTQGQKCHGFYIKPTKDSYTINDCAAWTINGTPLNMIDPGESEKYLGLQFDPWIGIARSGLSTKLDFWLQRIDQAPLKPLQKTDILKTYTIPRLIYIADHSEVKSALLETLDQKIRTAVKEWLHLPPCTCDAILYSSTRDGGLGITKLAGLIPSVQARRLHRIAQSSDDTMKCFMEKEKMEQLHKKLWIQAGGDRENIPSIWEAPPSSEPPNNVSTNSEWEAPTQKDKFPKPCNWRKNEFKKWTKLASQGRGIVNFERDKISNHWIQYYRRIPHRKLLTALQLRANVYPTREFLARGRQDQYIKACRHCDADNESCAHIIGNCPVTQDARIKRHNYICELLLEEAKKKDWVVFKEPHIRDSNKELYKPDLIFVKDGRALVVDVTVRYEAAKSSLEEAAAEKVRKYKHLETEVRHLTNAKDVTFVGFPLGARGKWHQDNFKLLTELGLSKSRQVKMAETFSTVALFSSVDIVHMFASRARKSMVM

SEQ ID NO: 1048 - protein, 1665 aa, synthetic construct
MAPKKKRKVNISGSSCGSPNSADTSSDFKDLWTKLKECHDREVQGLQVKVTKLKQERILDAQRLEEFFTKNQQLREQQKVLHETIKVLEDRLRAGLCDRCAVTEEHMRKKQQEFENIRQQNLKLITELMNERNTLQEENKKLSEQLQQKIENDQQHQAAELECEEDVIPDSPITAFSFSGVNRLRRKENPHVRYIEQTHTKLEHSVCANEMRKVSKSSTHPQHNPNENEILVADTYDQSQSPMAKAHGTSSYTPDKSSFNLATVVAETLGLGVQEESETQGPMSPLGDELYHCLEGNHKKQPFESGSETPGTSESATPEGSPKRKVSSAEGAAKEEPKRRSARLSAKPPAKVEAKPKKAAAKDKSSDKKVQTKGKRGAKGKQAEVANQETKEDLPAENGETKTEESPASDEAGEKEAKSDSGSETPGTSESATPESYEQLAPQPCVGETLHSSLPRDSELFVPEEGSSEKESEDAPKTSPPTPGKHGLEQTGEEKVMVTVPDKNPPCPCCGTRVNSVLNLIEHLKVSHGKRGVCFRCAKCGKENSNYHSVVCHFKKCRGPETEKAPAGEWICEVCNRDFTTKIGLGQHKRLAHPAVRNQERIVASQPKETSNRGAHKRCWTKEEEELLIRLEAQFEGNKNINKLIAEHITTKTAKQISDKRRLLSRKPAEEPREEPGTCHHTRRAAASLRTEPEMSHHAQAEDRDNGPGRRPLPGRAAAGGRTMDEIRRHPDKGNGQQRPTKQKSEEQLQAYYKKTLEERLSAGALNTFPRAFKQVMEGRDIKLVINQTAQDCFGCLESISQIRTATRDKKDTVTREKHPKKPFQKWMKKRAIKKGNYLRFQRLFYLDRGKLAKIILDDIECLSCDIPLSEIYSVFKTRWETTGSFKSLGDFKTYGKADNTAFRELITAKEIEKNVQEMSKGSAPGPDGITLGDVVKMDPEFSRTMEIFNLWLTTGKIPDMVRGCRTVLIPKSSKPDRLKDINNWRPITIGSTLLRLFSRIVTARLSKACPLNPRQRGFIRAAGCSENLKLLQTIIWSAKREHRPLGVVFVDIAKAFDTVSHQHIIHALQQREVDPHIVGLVSNMYENISTYITTKRNTHTDKIQIRVGVKQGDPMSPLLFNLAMDPLLCKLEESGKGYHRGQSSITAMAFADDLVLLSDSWENMNTNISILETFCNLTGLKTQGQKCHGFYIKPTKDSYTINDCAAWTINGTPLNMIDPGESEKYLGLQFDPWIGIARSGLSTKLDFWLQRIDQAPLKPLQKTDILKTYTIPRLIYIADHSEVKSALLETLDQKIRTAVKEWLHLPPCTCDAILYSSTRDGGLGITKLAGLIPSVQARRLHRIAQSSDDTMKCFMEKEKMEQLHKKLWIQAGGDRENIPSIWEAPPSSEPPNNVSTNSEWEAPTQKDKFPKPCNWRKNEFKKWTKLASQGRGIVNFERDKISNHWIQYYRRIPHRKLLTALQLRANVYPTREFLARGRQDQYIKACRHCDADNESCAHIIGNCPVTQDARIKRHNYICELLLEEAKKKDWVVFKEPHIRDSNKELYKPDLIFVKDGRALVVDVTVRYEAAKSSLEEAAAEKVRKYKHLETEVRHLTNAKDVTFVGFPLGARGKWHQDNFKLLTELGLSKSRQVKMAETFSTVALFSSVDIVHMFASRARKSMVM

SEQ ID NO: 1049 - protein, 1665 aa, synthetic construct
MAPKKKRKVNISGSSCGSPNSADTSSDFKDLWTKLKECHDREVQGLQVKVTKLKQERILDAQRLEEFFTKNQQLREQQKVLHETIKVLEDRLRAGLCDRCAVTEEHMRKKQQEFENIRQQNLKLITELMNERNTLQEENKKLSEQLQQKIENDQQHQAAELECEEDVIPDSPITAFSFSGVNRLRRKENPHVRYIEQTHTKLEHSVCANEMRKVSKSSTHPQHNPNENEILVADTYDQSQSPMAKAHGTSSYTPDKSSFNLATVVAETLGLGVQEESETQGPMSPLGDELYHCLEGNHKKQPFESGSETPGTSESATPEGSPKRKVSSAEGAAKEEPKRRSARLSAKPPAKVEAKPKKAAAKDKSSDKKVQTKGKRGAKGKQAEVANQETKEDLPAENGETKTEESPASDEAGEKEAKSDSGSETPGTSESATPESYEQLAPQPCVGETLHSSLPRDSELFVPEEGSSEKESEDAPKTSPPTPGKHGLEQTGEEKVMVTVPDKNPPCPCCGTRVNSVLNLIEHLKVSHGKRGVCFRCAKCGKENSNYHSVVCHFKKCRGPETEKAPAGEWICEVCNRDFTTKIGLGQHKRLAHPAVRNQERIVASQPKETSNRGAHKRCWTKEEEELLIRLEAQFEGNKNINKLIAEHITTKTAKQISDKRRLLSRKPAEEPREEPGTCHHTRRAAASLRTEPEMSHHAQAEDRDNGPGRRPLPGRAAAGGRTMDEIRRHPDKGNGQQRPTKQKSEEQLQAYYKKTLEERLSAGALNTFPRAFKQVMEGRDIKLVINQTAQDCFGCLESISQIRTATRDKKDTVTREKHPKKPFQKWMKKRAIKKGNYLRFQRLFYLDRGKLAKIILDDIECLSCDIPLSEIYSVFKTRWETTGSFKSLGDFKTYGKADNTAFRELITAKEIEKNVQEMSKGSAPGPDGITLGDVVKMDPEFSRTMEIFNLWLTTGKIPDMVRGCRTVLIPKSSKPDRLKDINNWRPITIGSILLRLFSRVVTARLSKACPLNPRQRGFIRAAGCSENLKLLQTIIWSAKREHRPLGVVFVDIAKAFDTVSHQHIIHALQQREVDPHIVGLVSNMYENISTYITTKRNTHTDKIQIRVGVKQGDPMSPLLFNLAMDPLLCKLEESGKGYHRGQSSITAMAFADDLVLLSDSWENMNTNISILETFCNLTGLKTQGQKCHGFYIKPTKDSYTINDCAAWTINGTPLNMIDPGESEKYLGLQFDPWIGIARSGLSTKLDFWLQRIDQAPLKPLQKTDILKTYTIPRLIYIADHSEVKSALLETLDQKIRTAVKEWLHLPPCTCDAILYSSTRDGGLGITKLAGLIPSVQARRLHRIAQSSDDTMKCFMEKEKMEQLHKKLWIQAGGDRENIPSIWEAPPSSEPPNNVSTNSEWEAPTQKDKFPKPCNWRKNEFKKWTKLASQGRGIVNFERDKISNHWIQYYRRIPHRKLLTALQLRANVYPTREFLARGRQDQYIKACRHCDADNESCAHIIGNCPVTQDARIKRHNYICELLLEEAKKKDWVVFKEPHIRDSNKELYKPDLIFVKDGRALVVDVTVRYEAAKSSLEEAAAEKVRKYKHLETEVRHLTNAKDVTFVGFPLGARGKWHQDNFKLLTELGLSKSRQVKMAETFSTVALFSSVDIVHMFASRARKSMVM

SEQ ID NO: 1050 - protein, 1665 aa, synthetic construct
MAPKKKRKVNISGSSCGSPNSADTSSDFKDLWTKLKECHDREVQGLQVKVTKLKQERILDAQRLEEFFTKNQQLREQQKVLHETIKVLEDRLRAGLCDRCAVTEEHMRKKQQEFENIRQQNLKLITELMNERNTLQEENKKLSEQLQQKIENDQQHQAAELECEEDVIPDSPITAFSFSGVNRLRRKENPHVRYIEQTHTKLEHSVCANEMRKVSKSSTHPQHNPNENEILVADTYDQSQSPMAKAHGTSSYTPDKSSFNLATVVAETLGLGVQEESETQGPMSPLGDELYHCLEGNHKKQPFESGSETPGTSESATPEGSPKRKVSSAEGAAKEEPKRRSARLSAKPPAKVEAKPKKAAAKDKSSDKKVQTKGKRGAKGKQAEVANQETKEDLPAENGETKTEESPASDEAGEKEAKSDSGSETPGTSESATPESYEQLAPQPCVGETLHSSLPRDSELFVPEEGSSEKESEDAPKTSPPTPGKHGLEQTGEEKVMVTVPDKNPPCPCCGTRVNSVLNLIEHLKVSHGKRGVCFRCAKCGKENSNYHSVVCHFKKCRGPETEKAPAGEWICEVCNRDFTTKIGLGQHKRLAHPAVRNQERIVASQPKETSNRGAHKRCWTKEEEELLIRLEAQFEGNKNINKLIAEHITTKTAKQISDKRRLLSRKPAEEPREEPGTCHHTRRAAASLRTEPEMSHHAQAEDRDNGPGRRPLPGRAAAGGRTMDEIRRHPDKGNGQQRPTKQKSEEQLQAYYKKTLEERLSAGALNTFPRAFKQVMEGRDIKLVINQTAQDCFGCLESISQIRTATRDKKDTVTREKHPKKPFQKWMKKRAIKKGNYLRFQRLFYLDRGKLAKIILDDIECLSCDIPLSEIYSVFKTRWETTGSFKSLGDFKTYGKADNTAFRELITAKEIEKNVQEMSKGSAPGPDGITLGDVVKMDPEFSRTMEIFNLWLTTGKIPDMVRGCRTVLIPKSSKPDRLKDINNWRPITIGSILLRLFSRIVTARLSKACPLNPRQRGFIRAAGCSENLKLLQTIIWSAKREHRPLGVVFVDISKAFDTVSHQHIIHALQQREVDPHIVGLVSNMYENISTYITTKRNTHTDKIQIRVGVKQGDPMSPLLFNLAMDPLLCKLEESGKGYHRGQSSITAMAFADDLVLLSDSWENMNTNISILETFCNLTGLKTQGQKCHGFYIKPTKDSYTINDCAAWTINGTPLNMIDPGESEKYLGLQFDPWIGIARSGLSTKLDFWLQRIDQAPLKPLQKTDILKTYTIPRLIYIADHSEVKSALLETLDQKIRTAVKEWLHLPPCTCDAILYSSTRDGGLGITKLAGLIPSVQARRLHRIAQSSDDTMKCFMEKEKMEQLHKKLWIQAGGDRENIPSIWEAPPSSEPPNNVSTNSEWEAPTQKDKFPKPCNWRKNEFKKWTKLASQGRGIVNFERDKISNHWIQYYRRIPHRKLLTALQLRANVYPTREFLARGRQDQYIKACRHCDADNESCAHIIGNCPVTQDARIKRHNYICELLLEEAKKKDWVVFKEPHIRDSNKELYKPDLIFVKDGRALVVDVTVRYEAAKSSLEEAAAEKVRKYKHLETEVRHLTNAKDVTFVGFPLGARGKWHQDNFKLLTELGLSKSRQVKMAETFSTVALFSSVDIVHMFASRARKSMVM

SEQ ID NO: 1051 - protein, 1665 aa, synthetic construct
MAPKKKRKVNISGSSCGSPNSADTSSDFKDLWTKLKECHDREVQGLQVKVTKLKQERILDAQRLEEFFTKNQQLREQQKVLHETIKVLEDRLRAGLCDRCAVTEEHMRKKQQEFENIRQQNLKLITELMNERNTLQEENKKLSEQLQQKIENDQQHQAAELECEEDVIPDSPITAFSFSGVNRLRRKENPHVRYIEQTHTKLEHSVCANEMRKVSKSSTHPQHNPNENEILVADTYDQSQSPMAKAHGTSSYTPDKSSFNLATVVAETLGLGVQEESETQGPMSPLGDELYHCLEGNHKKQPFESGSETPGTSESATPEGSPKRKVSSAEGAAKEEPKRRSARLSAKPPAKVEAKPKKAAAKDKSSDKKVQTKGKRGAKGKQAEVANQETKEDLPAENGETKTEESPASDEAGEKEAKSDSGSETPGTSESATPESYEQLAPQPCVGETLHSSLPRDSELFVPEEGSSEKESEDAPKTSPPTPGKHGLEQTGEEKVMVTVPDKNPPCPCCGTRVNSVLNLIEHLKVSHGKRGVCFRCAKCGKENSNYHSVVCHFKKCRGPETEKAPAGEWICEVCNRDFTTKIGLGQHKRLAHPAVRNQERIVASQPKETSNRGAHKRCWTKEEEELLIRLEAQFEGNKNINKLIAEHITTKTAKQISDKRRLLSRKPAEEPREEPGTCHHTRRAAASLRTEPEMSHHAQAEDRDNGPGRRPLPGRAAAGGRTMDEIRRHPDKGNGQQRPTKQKSEEQLQAYYKKTLEERLSAGALNTFPRAFKQVMEGRDIKLVINQTAQDCFGCLESISQIRTATRDKKDTVTREKHPKKPFQKWMKKRAIKKGNYLRFQRLFYLDRGKLAKIILDDIECLSCDIPLSEIYSVFKTRWETTGSFKSLGDFKTYGKADNTAFRELITAKEIEKNVQEMSKGSAPGPDGITLGDVVKMDPEFSRTMEIFNLWLTTGKIPDMVRGCRTVLIPKSSKPDRLKDINNWRPITIGSILLRLFSRIVTARLSKACPLNPRQRGFIRAAGCSENLKLLQTIIWSAKREHRPLGVVFVDIAKAFDTVSHQHIIHALQQREVDPHIVGLVSNMYEGISTYITTKRNTHTDKIQIRVGVKQGDPMSPLLFNLAMDPLLCKLEESGKGYHRGQSSITAMAFADDLVLLSDSWENMNTNISILETFCNLTGLKTQGQKCHGFYIKPTKDSYTINDCAAWTINGTPLNMIDPGESEKYLGLQFDPWIGIARSGLSTKLDFWLQRIDQAPLKPLQKTDILKTYTIPRLIYIADHSEVKSALLETLDQKIRTAVKEWLHLPPCTCDAILYSSTRDGGLGITKLAGLIPSVQARRLHRIAQSSDDTMKCFMEKEKMEQLHKKLWIQAGGDRENIPSIWEAPPSSEPPNNVSTNSEWEAPTQKDKFPKPCNWRKNEFKKWTKLASQGRGIVNFERDKISNHWIQYYRRIPHRKLLTALQLRANVYPTREFLARGRQDQYIKACRHCDADNESCAHIIGNCPVTQDARIKRHNYICELLLEEAKKKDWVVFKEPHIRDSNKELYKPDLIFVKDGRALVVDVTVRYEAAKSSLEEAAAEKVRKYKHLETEVRHLTNAKDVTFVGFPLGARGKWHQDNFKLLTELGLSKSRQVKMAETFSTVALFSSVDIVHMFASRARKSMVM

SEQ ID NO: 1052 - protein, 1665 aa, synthetic construct
MAPKKKRKVNISGSSCGSPNSADTSSDFKDLWTKLKECHDREVQGLQVKVTKLKQERILDAQRLEEFFTKNQQLREQQKVLHETIKVLEDRLRAGLCDRCAVTEEHMRKKQQEFENIRQQNLKLITELMNERNTLQEENKKLSEQLQQKIENDQQHQAAELECEEDVIPDSPITAFSFSGVNRLRRKENPHVRYIEQTHTKLEHSVCANEMRKVSKSSTHPQHNPNENEILVADTYDQSQSPMAKAHGTSSYTPDKSSFNLATVVAETLGLGVQEESETQGPMSPLGDELYHCLEGNHKKQPFESGSETPGTSESATPEGSPKRKVSSAEGAAKEEPKRRSARLSAKPPAKVEAKPKKAAAKDKSSDKKVQTKGKRGAKGKQAEVANQETKEDLPAENGETKTEESPASDEAGEKEAKSDSGSETPGTSESATPESYEQLAPQPCVGETLHSSLPRDSELFVPEEGSSEKESEDAPKTSPPTPGKHGLEQTGEEKVMVTVPDKNPPCPCCGTRVNSVLNLIEHLKVSHGKRGVCFRCAKCGKENSNYHSVVCHFKKCRGPETEKAPAGEWICEVCNRDFTTKIGLGQHKRLAHPAVRNQERIVASQPKETSNRGAHKRCWTKEEEELLIRLEAQFEGNKNINKLIAEHITTKTAKQISDKRRLLSRKPAEEPREEPGTCHHTRRAAASLRTEPEMSHHAQAEDRDNGPGRRPLPGRAAAGGRTMDEIRRHPDKGNGQQRPTKQKSEEQLQAYYKKTLEERLSAGALNTFPRAFKQVMEGRDIKLVINQTAQDCFGCLESISQIRTATRDKKDTVTREKHPKKPFQKWMKKRAIKKGNYLRFQRLFYLDRGKLAKIILDDIECLSCDIPLSEIYSVFKTRWETTGSFKSLGDFKTYGKADNTAFRELITAKEIEKNVQEMSKGSAPGPDGITLGDVVKMDPEFSRTMEIFNLWLTTGKIPDMVRGCRTVLIPKSSKPDRLKDINNWRPITIGSILLRLFSRIVTARLSKACPLNPRQRGFIRAAGCSENLKLLQTIIWSAKREHRPLGVVFVDIAKAFDTVSHQHIIHALQQREVDPHIVGLVSNMYENISTYITTKRNTHTDKIQIRVGVKQGDPMSPLLFNLAMDPLLCKLEESGKGYHRGQSSITAMAFADDLTLLSDSWENMNTNISILETFCNLTGLKTQGQKCHGFYIKPTKDSYTINDCAAWTINGTPLNMIDPGESEKYLGLQFDPWIGIARSGLSTKLDFWLQRIDQAPLKPLQKTDILKTYTIPRLIYIADHSEVKSALLETLDQKIRTAVKEWLHLPPCTCDAILYSSTRDGGLGITKLAGLIPSVQARRLHRIAQSSDDTMKCFMEKEKMEQLHKKLWIQAGGDRENIPSIWEAPPSSEPPNNVSTNSEWEAPTQKDKFPKPCNWRKNEFKKWTKLASQGRGIVNFERDKISNHWIQYYRRIPHRKLLTALQLRANVYPTREFLARGRQDQYIKACRHCDADNESCAHIIGNCPVTQDARIKRHNYICELLLEEAKKKDWVVFKEPHIRDSNKELYKPDLIFVKDGRALVVDVTVRYEAAKSSLEEAAAEKVRKYKHLETEVRHLTNAKDVTFVGFPLGARGKWHQDNFKLLTELGLSKSRQVKMAETFSTVALFSSVDIVHMFASRARKSMVM

SEQ ID NO: 1053 - protein, 1665 aa, synthetic construct
MAPKKKRKVNISGSSCGSPNSADTSSDFKDLWTKLKECHDREVQGLQVKVTKLKQERILDAQRLEEFFTKNQQLREQQKVLHETIKVLEDRLRAGLCDRCAVTEEHMRKKQQEFENIRQQNLKLITELMNERNTLQEENKKLSEQLQQKIENDQQHQAAELECEEDVIPDSPITAFSFSGVNRLRRKENPHVRYIEQTHTKLEHSVCANEMRKVSKSSTHPQHNPNENEILVADTYDQSQSPMAKAHGTSSYTPDKSSFNLATVVAETLGLGVQEESETQGPMSPLGDELYHCLEGNHKKQPFESGSETPGTSESATPEGSPKRKVSSAEGAAKEEPKRRSARLSAKPPAKVEAKPKKAAAKDKSSDKKVQTKGKRGAKGKQAEVANQETKEDLPAENGETKTEESPASDEAGEKEAKSDSGSETPGTSESATPESYEQLAPQPCVGETLHSSLPRDSELFVPEEGSSEKESEDAPKTSPPTPGKHGLEQTGEEKVMVTVPDKNPPCPCCGTRVNSVLNLIEHLKVSHGKRGVCFRCAKCGKENSNYHSVVCHFKKCRGPETEKAPAGEWICEVCNRDFTTKIGLGQHKRLAHPAVRNQERIVASQPKETSNRGAHKRCWTKEEEELLIRLEAQFEGNKNINKLIAEHITTKTAKQISDKRRLLSRKPAEEPREEPGTCHHTRRAAASLRTEPEMSHHAQAEDRDNGPGRRPLPGRAAAGGRTMDEIRRHPDKGNGQQRPTKQKSEEQLQAYYKKTLEERLSAGALNTFPRAFKQVMEGRDIKLVINQTAQDCFGCLESISQIRTATRDKKDTVTREKHPKKPFQKWMKKRAIKKGNYLRFQRLFYLDRGKLAKIILDDIECLSCDIPLSEIYSVFKTRWETTGSFKSLGDFKTYGKADNTAFRELITAKEIEKNVQEMSKGSAPGPDGITLGDVVKMDPEFSRTMEIFNLWLTTGKIPDMVRGCRTVLIPKSSKPDRLKDINNWRPITIGSILLRLFSRIVTARLSKACPLNPRQRGFIRAAGCSENLKLLQTIIWSAKREHRPLGVVFVDIAKAFDTVSHQHIIHALQQREVDPHIVGLVSNMYENISTYITTKRNTHTDKIQIRVGVKQGDPMSPLLFNLAMDPLLCKLEESGKGYHRGQSSITAMAFADDLVLLSDSWENMNTNISILETFCNLTGMKTQGQKCHGFYIKPTKDSYTINDCAAWTINGTPLNMIDPGESEKYLGLQFDPWIGIARSGLSTKLDFWLQRIDQAPLKPLQKTDILKTYTIPRLIYIADHSEVKSALLETLDQKIRTAVKEWLHLPPCTCDAILYSSTRDGGLGITKLAGLIPSVQARRLHRIAQSSDDTMKCFMEKEKMEQLHKKLWIQAGGDRENIPSIWEAPPSSEPPNNVSTNSEWEAPTQKDKFPKPCNWRKNEFKKWTKLASQGRGIVNFERDKISNHWIQYYRRIPHRKLLTALQLRANVYPTREFLARGRQDQYIKACRHCDADNESCAHIIGNCPVTQDARIKRHNYICELLLEEAKKKDWVVFKEPHIRDSNKELYKPDLIFVKDGRALVVDVTVRYEAAKSSLEEAAAEKVRKYKHLETEVRHLTNAKDVTFVGFPLGARGKWHQDNFKLLTELGLSKSRQVKMAETFSTVALFSSVDIVHMFASRARKSMVM

SEQ ID NO: 1054 - protein, 1665 aa, synthetic construct
MAPKKKRKVNISGSSCGSPNSADTSSDFKDLWTKLKECHDREVQGLQVKVTKLKQERILDAQRLEEFFTKNQQLREQQKVLHETIKVLEDRLRAGLCDRCAVTEEHMRKKQQEFENIRQQNLKLITELMNERNTLQEENKKLSEQLQQKIENDQQHQAAELECEEDVIPDSPITAFSFSGVNRLRRKENPHVRYIEQTHTKLEHSVCANEMRKVSKSSTHPQHNPNENEILVADTYDQSQSPMAKAHGTSSYTPDKSSFNLATVVAETLGLGVQEESETQGPMSPLGDELYHCLEGNHKKQPFESGSETPGTSESATPEGSPKRKVSSAEGAAKEEPKRRSARLSAKPPAKVEAKPKKAAAKDKSSDKKVQTKGKRGAKGKQAEVANQETKEDLPAENGETKTEESPASDEAGEKEAKSDSGSETPGTSESATPESYEQLAPQPCVGETLHSSLPRDSELFVPEEGSSEKESEDAPKTSPPTPGKHGLEQTGEEKVMVTVPDKNPPCPCCGTRVNSVLNLIEHLKVSHGKRGVCFRCAKCGKENSNYHSVVCHFKKCRGPETEKAPAGEWICEVCNRDFTTKIGLGQHKRLAHPAVRNQERIVASQPKETSNRGAHKRCWTKEEEELLIRLEAQFEGNKNINKLIAEHITTKTAKQISDKRRLLSRKPAEEPREEPGTCHHTRRAAASLRTEPEMSHHAQAEDRDNGPGRRPLPGRAAAGGRTMDEIRRHPDKGNGQQRPTKQKSEEQLQAYYKKTLEERLSAGALNTFPRAFKQVMEGRDIKLVINQTAQDCFGCLESISQIRTATRDKKDTVTREKHPKKPFQKWMKKRAIKKGNYLRFQRLFYLDRGKLAKIILDDIECLSCDIPLSEIYSVFKTRWETTGSFKSLGDFKTYGKADNTAFRELITAKEIEKNVQEMSKGKAPGPDGITLGDVVKMDPEFSRTMEIFNLWLTTGKIPDMVRGCRTVLIPKSSKPDRLKDINNWRPITIGSILLRLFSRIVTARLSKACPLNPRQRGFIRAAGCSENLKLLQTIIWSAKREHRPLGVVFVDIAKAFDTVSHQHIIHALQQREVDPHIVGLVSNMYENISTYITTKRNTHTDKIQIRVGVKQGDPMSPLLFNLAMDPLLCKLEESGKGYHRGQSSITAMAFADDLVLLSDSWENMNTNISILETFCNLTGLKTQGQKCHGFYIKPTKDSYTINDCAAWTINGTPLNMIDPGESEKYLGLQFDPWIGIARSGLSTKLDFWLQRIDQAPLKPLQKTDILKTYTIPRLIYIADHSEVKSALLETLDQKIRTAVKEWLHLPPCTCDAILYSSTRDGGLGITKLAGLIPSVQARRLHRIAQSSDDTMKCFMEKEKMEQLHKKLWIQAGGDRENIPSIWEAPPSSEPPNNVSTNSEWEAPTQKDKFPKPCNWRKNEFKKWTKLASQGRGIVNFERDKISNHWIQYYRRIPHRKLLTALQLRANVYPTREFLARGRQDQYIKACRHCDADNESCAHIIGNCPVTQDARIKRHNYICELLLEEAKKKDWVVFKEPHIRDSNKELYKPDLIFVKDGRALVVDVTVRYEAAKSSLEEAAAEKVRKYKHLETEVRHLTNAKDVTFVGFPLGARGKWHQDNFKLLTELGLSKSRQVKMAETFSTVALFSSVDIVHMFASRARKSMVM

SEQ ID NO: 1055 - protein, 1665 aa, synthetic construct
MAPKKKRKVNISGSSCGSPNSADTSSDFKDLWTKLKECHDREVQGLQVKVTKLKQERILDAQRLEEFFTKNQQLREQQKVLHETIKVLEDRLRAGLCDRCAVTEEHMRKKQQEFENIRQQNLKLITELMNERNTLQEENKKLSEQLQQKIENDQQHQAAELECEEDVIPDSPITAFSFSGVNRLRRKENPHVRYIEQTHTKLEHSVCANEMRKVSKSSTHPQHNPNENEILVADTYDQSQSPMAKAHGTSSYTPDKSSFNLATVVAETLGLGVQEESETQGPMSPLGDELYHCLEGNHKKQPFESGSETPGTSESATPEGSPKRKVSSAEGAAKEEPKRRSARLSAKPPAKVEAKPKKAAAKDKSSDKKVQTKGKRGAKGKQAEVANQETKEDLPAENGETKTEESPASDEAGEKEAKSDSGSETPGTSESATPESYEQLAPQPCVGETLHSSLPRDSELFVPEEGSSEKESEDAPKTSPPTPGKHGLEQTGEEKVMVTVPDKNPPCPCCGTRVNSVLNLIEHLKVSHGKRGVCFRCAKCGKENSNYHSVVCHFKKCRGPETEKAPAGEWICEVCNRDFTTKIGLGQHKRLAHPAVRNQERIVASQPKETSNRGAHKRCWTKEEEELLIRLEAQFEGNKNINKLIAEHITTKTAKQISDKRRLLSRKPAEEPREEPGTCHHTRRAAASLRTEPEMSHHAQAEDRDNGPGRRPLPGRAAAGGRTMDEIRRHPDKGNGQQRPTKQKSEEQLQAYYKKTLEERLSAGALNTFPRAFKQVMEGRDIKLVINQTAQDCFGCLESISQIRTATRDKKDTVTREKHPKKPFQKWMKKRAIKKGNYLRFQRLFYLDRGKLAKIILDDIECLSCDIPLSEIYSVFKTRWETTGSFKSLGDFKTYGKADNTAFRELITAKEIEKNVQEMSKGSAPGPDGITLGDVVKMDPEFSRTMEIFNLWLTTGKIPDMVRGCRTVLIPKSKKPDRLKDINNWRPITIGSILLRLFSRIVTARLSKACPLNPRQRGFIRAAGCSENLKLLQTIIWSAKREHRPLGVVFVDIAKAFDTVSHQHIIHALQQREVDPHIVGLVSNMYENISTYITTKRNTHTDKIQIRVGVKQGDPMSPLLFNLAMDPLLCKLEESGKGYHRGQSSITAMAFADDLVLLSDSWENMNTNISILETFCNLTGLKTQGQKCHGFYIKPTKDSYTINDCAAWTINGTPLNMIDPGESEKYLGLQFDPWIGIARSGLSTKLDFWLQRIDQAPLKPLQKTDILKTYTIPRLIYIADHSEVKSALLETLDQKIRTAVKEWLHLPPCTCDAILYSSTRDGGLGITKLAGLIPSVQARRLHRIAQSSDDTMKCFMEKEKMEQLHKKLWIQAGGDRENIPSIWEAPPSSEPPNNVSTNSEWEAPTQKDKFPKPCNWRKNEFKKWTKLASQGRGIVNFERDKISNHWIQYYRRIPHRKLLTALQLRANVYPTREFLARGRQDQYIKACRHCDADNESCAHIIGNCPVTQDARIKRHNYICELLLEEAKKKDWVVFKEPHIRDSNKELYKPDLIFVKDGRALVVDVTVRYEAAKSSLEEAAAEKVRKYKHLETEVRHLTNAKDVTFVGFPLGARGKWHQDNFKLLTELGLSKSRQVKMAETFSTVALFSSVDIVHMFASRARKSMVM

SEQ ID NO: 1056 - protein, 1665 aa, synthetic construct
MAPKKKRKVNISGSSCGSPNSADTSSDFKDLWTKLKECHDREVQGLQVKVTKLKQERILDAQRLEEFFTKNQQLREQQKVLHETIKVLEDRLRAGLCDRCAVTEEHMRKKQQEFENIRQQNLKLITELMNERNTLQEENKKLSEQLQQKIENDQQHQAAELECEEDVIPDSPITAFSFSGVNRLRRKENPHVRYIEQTHTKLEHSVCANEMRKVSKSSTHPQHNPNENEILVADTYDQSQSPMAKAHGTSSYTPDKSSFNLATVVAETLGLGVQEESETQGPMSPLGDELYHCLEGNHKKQPFESGSETPGTSESATPEGSPKRKVSSAEGAAKEEPKRRSARLSAKPPAKVEAKPKKAAAKDKSSDKKVQTKGKRGAKGKQAEVANQETKEDLPAENGETKTEESPASDEAGEKEAKSDSGSETPGTSESATPESYEQLAPQPCVGETLHSSLPRDSELFVPEEGSSEKESEDAPKTSPPTPGKHGLEQTGEEKVMVTVPDKNPPCPCCGTRVNSVLNLIEHLKVSHGKRGVCFRCAKCGKENSNYHSVVCHFKKCRGPETEKAPAGEWICEVCNRDFTTKIGLGQHKRLAHPAVRNQERIVASQPKETSNRGAHKRCWTKEEEELLIRLEAQFEGNKNINKLIAEHITTKTAKQISDKRRLLSRKPAEEPREEPGTCHHTRRAAASLRTEPEMSHHAQAEDRDNGPGRRPLPGRAAAGGRTMDEIRRHPDKGNGQQRPTKQKSEEQLQAYYKKTLEERLSAGALNTFPRAFKQVMEGRDIKLVINQTAQDCFGCLESISQIRTATRDKKDTVTREKHPKKPFQKWMKKRAIKKGNYLRFQRLFYLDRGKLAKIILDDIECLSCDIPLSEIYSVFKTRWETTGSFKSLGDFKTYGKADNTAFRELITAKEIEKNVQEMSKGSAPGPDGITLGDVVKMDPEFSRTMEIFNLWLTTGKIPDMVRGCRTVLIPKSSKPDRLKDINNWRPITIGPILLRLFSRIVTARLSKACPLNPRQRGFIRAAGCSENLKLLQTIIWSAKREHRPLGVVFVDIAKAFDTVSHQHIIHALQQREVDPHIVGLVSNMYENISTYITTKRNTHTDKIQIRVGVKQGDPMSPLLFNLAMDPLLCKLEESGKGYHRGQSSITAMAFADDLVLLSDSWENMNTNISILETFCNLTGLKTQGQKCHGFYIKPTKDSYTINDCAAWTINGTPLNMIDPGESEKYLGLQFDPWIGIARSGLSTKLDFWLQRIDQAPLKPLQKTDILKTYTIPRLIYIADHSEVKSALLETLDQKIRTAVKEWLHLPPCTCDAILYSSTRDGGLGITKLAGLIPSVQARRLHRIAQSSDDTMKCFMEKEKMEQLHKKLWIQAGGDRENIPSIWEAPPSSEPPNNVSTNSEWEAPTQKDKFPKPCNWRKNEFKKWTKLASQGRGIVNFERDKISNHWIQYYRRIPHRKLLTALQLRANVYPTREFLARGRQDQYIKACRHCDADNESCAHIIGNCPVTQDARIKRHNYICELLLEEAKKKDWVVFKEPHIRDSNKELYKPDLIFVKDGRALVVDVTVRYEAAKSSLEEAAAEKVRKYKHLETEVRHLTNAKDVTFVGFPLGARGKWHQDNFKLLTELGLSKSRQVKMAETFSTVALFSSVDIVHMFASRARKSMVM

SEQ ID NO: 1057 - protein, 1665 aa, synthetic construct
MAPKKKRKVNISGSSCGSPNSADTSSDFKDLWTKLKECHDREVQGLQVKVTKLKQERILDAQRLEEFFTKNQQLREQQKVLHETIKVLEDRLRAGLCDRCAVTEEHMRKKQQEFENIRQQNLKLITELMNERNTLQEENKKLSEQLQQKIENDQQHQAAELECEEDVIPDSPITAFSFSGVNRLRRKENPHVRYIEQTHTKLEHSVCANEMRKVSKSSTHPQHNPNENEILVADTYDQSQSPMAKAHGTSSYTPDKSSFNLATVVAETLGLGVQEESETQGPMSPLGDELYHCLEGNHKKQPFESGSETPGTSESATPEGSPKRKVSSAEGAAKEEPKRRSARLSAKPPAKVEAKPKKAAAKDKSSDKKVQTKGKRGAKGKQAEVANQETKEDLPAENGETKTEESPASDEAGEKEAKSDSGSETPGTSESATPESYEQLAPQPCVGETLHSSLPRDSELFVPEEGSSEKESEDAPKTSPPTPGKHGLEQTGEEKVMVTVPDKNPPCPCCGTRVNSVLNLIEHLKVSHGKRGVCFRCAKCGKENSNYHSVVCHFKKCRGPETEKAPAGEWICEVCNRDFTTKIGLGQHKRLAHPAVRNQERIVASQPKETSNRGAHKRCWTKEEEELLIRLEAQFEGNKNINKLIAEHITTKTAKQISDKRRLLSRKPAEEPREEPGTCHHTRRAAASLRTEPEMSHHAQAEDRDNGPGRRPLPGRAAAGGRTMDEIRRHPDKGNGQQRPTKQKSEEQLQAYYKKTLEERLSAGALNTFPRAFKQVMEGRDIKLVINQTAQDCFGCLESISQIRTATRDKKDTVTREKHPKKPFQKWMKKRAIKKGNYLRFQRLFYLDRGKLAKIILDDIECLSCDIPLSEIYSVFKTRWETTGSFKSLGDFKTYGKADNTAFRELITAKEIEKNVQEMSKGSAPGPDGITLGDVVKMDPEFSRTMEIFNLWLTTGKIPDMVRGCRTVLIPKSSKPDRLKDINNWRPITIGSILLRLFSRIVTARLSKACPLNPRQRGFIRARGCSENLKLLQTIIWSAKREHRPLGVVFVDIAKAFDTVSHQHIIHALQQREVDPHIVGLVSNMYENISTYITTKRNTHTDKIQIRVGVKQGDPMSPLLFNLAMDPLLCKLEESGKGYHRGQSSITAMAFADDLVLLSDSWENMNTNISILETFCNLTGLKTQGQKCHGFYIKPTKDSYTINDCAAWTINGTPLNMIDPGESEKYLGLQFDPWIGIARSGLSTKLDFWLQRIDQAPLKPLQKTDILKTYTIPRLIYIADHSEVKSALLETLDQKIRTAVKEWLHLPPCTCDAILYSSTRDGGLGITKLAGLIPSVQARRLHRIAQSSDDTMKCFMEKEKMEQLHKKLWIQAGGDRENIPSIWEAPPSSEPPNNVSTNSEWEAPTQKDKFPKPCNWRKNEFKKWTKLASQGRGIVNFERDKISNHWIQYYRRIPHRKLLTALQLRANVYPTREFLARGRQDQYIKACRHCDADNESCAHIIGNCPVTQDARIKRHNYICELLLEEAKKKDWVVFKEPHIRDSNKELYKPDLIFVKDGRALVVDVTVRYEAAKSSLEEAAAEKVRKYKHLETEVRHLTNAKDVTFVGFPLGARGKWHQDNFKLLTELGLSKSRQVKMAETFSTVALFSSVDIVHMFASRARKSMVM

SEQ ID NO: 1058 - protein, 1665 aa, synthetic construct
MAPKKKRKVNISGSSCGSPNSADTSSDFKDLWTKLKECHDREVQGLQVKVTKLKQERILDAQRLEEFFTKNQQLREQQKVLHETIKVLEDRLRAGLCDRCAVTEEHMRKKQQEFENIRQQNLKLITELMNERNTLQEENKKLSEQLQQKIENDQQHQAAELECEEDVIPDSPITAFSFSGVNRLRRKENPHVRYIEQTHTKLEHSVCANEMRKVSKSSTHPQHNPNENEILVADTYDQSQSPMAKAHGTSSYTPDKSSFNLATVVAETLGLGVQEESETQGPMSPLGDELYHCLEGNHKKQPFESGSETPGTSESATPEGSPKRKVSSAEGAAKEEPKRRSARLSAKPPAKVEAKPKKAAAKDKSSDKKVQTKGKRGAKGKQAEVANQETKEDLPAENGETKTEESPASDEAGEKEAKSDSGSETPGTSESATPESYEQLAPQPCVGETLHSSLPRDSELFVPEEGSSEKESEDAPKTSPPTPGKHGLEQTGEEKVMVTVPDKNPPCPCCGTRVNSVLNLIEHLKVSHGKRGVCFRCAKCGKENSNYHSVVCHFKKCRGPETEKAPAGEWICEVCNRDFTTKIGLGQHKRLAHPAVRNQERIVASQPKETSNRGAHKRCWTKEEEELLIRLEAQFEGNKNINKLIAEHITTKTAKQISDKRRLLSRKPAEEPREEPGTCHHTRRAAASLRTEPEMSHHAQAEDRDNGPGRRPLPGRAAAGGRTMDEIRRHPDKGNGQQRPTKQKSEEQLQAYYKKTLEERLSAGALNTFPRAFKQVMEGRDIKLVINQTAQDCFGCLESISQIRTATRDKKDTVTREKHPKKPFQKWMKKRAIKKGNYLRFQRLFYLDRGKLAKIILDDIECLSCDIPLSEIYSVFKTRWETTGSFKSLGDFKTYGKADNTAFRELITAKEIEKNVQEMSKGSAPGPDGITLGDVVKMDPEFSRTMEIFNLWLTTGKIPDMVRGCRTVLIPKSSKPDRLKDINNWRPITIGSILLRLFSRIVTARLSKACPLNPRQRGFIRAAGCSENLKLLQTIIWSAKREHRPLGVVFVDIKKAFDTVSHQHIIHALQQREVDPHIVGLVSNMYENISTYITTKRNTHTDKIQIRVGVKQGDPMSPLLFNLAMDPLLCKLEESGKGYHRGQSSITAMAFADDLVLLSDSWENMNTNISILETFCNLTGLKTQGQKCHGFYIKPTKDSYTINDCAAWTINGTPLNMIDPGESEKYLGLQFDPWIGIARSGLSTKLDFWLQRIDQAPLKPLQKTDILKTYTIPRLIYIADHSEVKSALLETLDQKIRTAVKEWLHLPPCTCDAILYSSTRDGGLGITKLAGLIPSVQARRLHRIAQSSDDTMKCFMEKEKMEQLHKKLWIQAGGDRENIPSIWEAPPSSEPPNNVSTNSEWEAPTQKDKFPKPCNWRKNEFKKWTKLASQGRGIVNFERDKISNHWIQYYRRIPHRKLLTALQLRANVYPTREFLARGRQDQYIKACRHCDADNESCAHIIGNCPVTQDARIKRHNYICELLLEEAKKKDWVVFKEPHIRDSNKELYKPDLIFVKDGRALVVDVTVRYEAAKSSLEEAAAEKVRKYKHLETEVRHLTNAKDVTFVGFPLGARGKWHQDNFKLLTELGLSKSRQVKMAETFSTVALFSSVDIVHMFASRARKSMVM

SEQ ID NO: 1059 - protein, 1665 aa, synthetic construct
MAPKKKRKVNISGSSCGSPNSADTSSDFKDLWTKLKECHDREVQGLQVKVTKLKQERILDAQRLEEFFTKNQQLREQQKVLHETIKVLEDRLRAGLCDRCAVTEEHMRKKQQEFENIRQQNLKLITELMNERNTLQEENKKLSEQLQQKIENDQQHQAAELECEEDVIPDSPITAFSFSGVNRLRRKENPHVRYIEQTHTKLEHSVCANEMRKVSKSSTHPQHNPNENEILVADTYDQSQSPMAKAHGTSSYTPDKSSFNLATVVAETLGLGVQEESETQGPMSPLGDELYHCLEGNHKKQPFESGSETPGTSESATPEGSPKRKVSSAEGAAKEEPKRRSARLSAKPPAKVEAKPKKAAAKDKSSDKKVQTKGKRGAKGKQAEVANQETKEDLPAENGETKTEESPASDEAGEKEAKSDSGSETPGTSESATPESYEQLAPQPCVGETLHSSLPRDSELFVPEEGSSEKESEDAPKTSPPTPGKHGLEQTGEEKVMVTVPDKNPPCPCCGTRVNSVLNLIEHLKVSHGKRGVCFRCAKCGKENSNYHSVVCHFKKCRGPETEKAPAGEWICEVCNRDFTTKIGLGQHKRLAHPAVRNQERIVASQPKETSNRGAHKRCWTKEEEELLIRLEAQFEGNKNINKLIAEHITTKTAKQISDKRRLLSRKPAEEPREEPGTCHHTRRAAASLRTEPEMSHHAQAEDRDNGPGRRPLPGRAAAGGRTMDEIRRHPDKGNGQQRPTKQKSEEQLQAYYKKTLEERLSAGALNTFPRAFKQVMEGRDIKLVINQTAQDCFGCLESISQIRTATRDKKDTVTREKHPKKPFQKWMKKRAIKKGNYLRFQRLFYLDRGKLAKIILDDIECLSCDIPLSEIYSVFKTRWETTGSFKSLGDFKTYGKADNTAFRELITAKEIEKNVQEMSKGSAPGPDGITLGDVVKMDPEFSRTMEIFNLWLTTGKIPDMVRGCRTVLIPKSSKPDRLKDINNWRPITIGSILLRLFSRIVTARLSKACPLNPRQRGFIRAAGCSENLKLLQTIIWSAKREHRPLGVVFVDIAKAFGTVSHQHIIHALQQREVDPHIVGLVSNMYENISTYITTKRNTHTDKIQIRVGVKQGDPMSPLLFNLAMDPLLCKLEESGKGYHRGQSSITAMAFADDLVLLSDSWENMNTNISILETFCNLTGLKTQGQKCHGFYIKPTKDSYTINDCAAWTINGTPLNMIDPGESEKYLGLQFDPWIGIARSGLSTKLDFWLQRIDQAPLKPLQKTDILKTYTIPRLIYIADHSEVKSALLETLDQKIRTAVKEWLHLPPCTCDAILYSSTRDGGLGITKLAGLIPSVQARRLHRIAQSSDDTMKCFMEKEKMEQLHKKLWIQAGGDRENIPSIWEAPPSSEPPNNVSTNSEWEAPTQKDKFPKPCNWRKNEFKKWTKLASQGRGIVNFERDKISNHWIQYYRRIPHRKLLTALQLRANVYPTREFLARGRQDQYIKACRHCDADNESCAHIIGNCPVTQDARIKRHNYICELLLEEAKKKDWVVFKEPHIRDSNKELYKPDLIFVKDGRALVVDVTVRYEAAKSSLEEAAAEKVRKYKHLETEVRHLTNAKDVTFVGFPLGARGKWHQDNFKLLTELGLSKSRQVKMAETFSTVALFSSVDIVHMFASRARKSMVM

SEQ ID NO: 1060 - protein, 1665 aa, synthetic construct
MAPKKKRKVNISGSSCGSPNSADTSSDFKDLWTKLKECHDREVQGLQVKVTKLKQERILDAQRLEEFFTKNQQLREQQKVLHETIKVLEDRLRAGLCDRCAVTEEHMRKKQQEFENIRQQNLKLITELMNERNTLQEENKKLSEQLQQKIENDQQHQAAELECEEDVIPDSPITAFSFSGVNRLRRKENPHVRYIEQTHTKLEHSVCANEMRKVSKSSTHPQHNPNENEILVADTYDQSQSPMAKAHGTSSYTPDKSSFNLATVVAETLGLGVQEESETQGPMSPLGDELYHCLEGNHKKQPFESGSETPGTSESATPEGSPKRKVSSAEGAAKEEPKRRSARLSAKPPAKVEAKPKKAAAKDKSSDKKVQTKGKRGAKGKQAEVANQETKEDLPAENGETKTEESPASDEAGEKEAKSDSGSETPGTSESATPESYEQLAPQPCVGETLHSSLPRDSELFVPEEGSSEKESEDAPKTSPPTPGKHGLEQTGEEKVMVTVPDKNPPCPCCGTRVNSVLNLIEHLKVSHGKRGVCFRCAKCGKENSNYHSVVCHFKKCRGPETEKAPAGEWICEVCNRDFTTKIGLGQHKRLAHPAVRNQERIVASQPKETSNRGAHKRCWTKEEEELLIRLEAQFEGNKNINKLIAEHITTKTAKQISDKRRLLSRKPAEEPREEPGTCHHTRRAAASLRTEPEMSHHAQAEDRDNGPGRRPLPGRAAAGGRTMDEIRRHPDKGNGQQRPTKQKSEEQLQAYYKKTLEERLSAGALNTFPRAFKQVMEGRDIKLVINQTAQDCFGCLESISQIRTATRDKKDTVTREKHPKKPFQKWMKKRAIKKGNYLRFQRLFYLDRGKLAKIILDDIECLSCDIPLSEIYSVFKTRWETTGSFKSLGDFKTYGKADNTAFRELITAKEIEKNVQEMSKGSAPGPDGITLGDVVKMDPEFSRTMEIFNLWLTTGKIPDMVRGCRTVLIPKSSKPDRLKDINNWRPITIGSILLRLFSRIVTARLSKACPLNPRQRGFIRAAGCSENLKLLQTIIWSAKREHRPLGVVFVDIAKAFDTVSHQHIIHALQQREVDPHIVGLVSNMYENISTYITTKRNTHTDKIQIRVGVKQGDPMSPLLFNLAMNPLLCKLEESGKGYHRGQSSITAMAFADDLVLLSDSWENMNTNISILETFCNLTGLKTQGQKCHGFYIKPTKDSYTINDCAAWTINGTPLNMIDPGESEKYLGLQFDPWIGIARSGLSTKLDFWLQRIDQAPLKPLQKTDILKTYTIPRLIYIADHSEVKSALLETLDQKIRTAVKEWLHLPPCTCDAILYSSTRDGGLGITKLAGLIPSVQARRLHRIAQSSDDTMKCFMEKEKMEQLHKKLWIQAGGDRENIPSIWEAPPSSEPPNNVSTNSEWEAPTQKDKFPKPCNWRKNEFKKWTKLASQGRGIVNFERDKISNHWIQYYRRIPHRKLLTALQLRANVYPTREFLARGRQDQYIKACRHCDADNESCAHIIGNCPVTQDARIKRHNYICELLLEEAKKKDWVVFKEPHIRDSNKELYKPDLIFVKDGRALVVDVTVRYEAAKSSLEEAAAEKVRKYKHLETEVRHLTNAKDVTFVGFPLGARGKWHQDNFKLLTELGLSKSRQVKMAETFSTVALFSSVDIVHMFASRARKSMVM

SEQ ID NO: 1061 - protein, 1665 aa, synthetic construct
MAPKKKRKVNISGSSCGSPNSADTSSDFKDLWTKLKECHDREVQGLQVKVTKLKQERILDAQRLEEFFTKNQQLREQQKVLHETIKVLEDRLRAGLCDRCAVTEEHMRKKQQEFENIRQQNLKLITELMNERNTLQEENKKLSEQLQQKIENDQQHQAAELECEEDVIPDSPITAFSFSGVNRLRRKENPHVRYIEQTHTKLEHSVCANEMRKVSKSSTHPQHNPNENEILVADTYDQSQSPMAKAHGTSSYTPDKSSFNLATVVAETLGLGVQEESETQGPMSPLGDELYHCLEGNHKKQPFESGSETPGTSESATPEGSPKRKVSSAEGAAKEEPKRRSARLSAKPPAKVEAKPKKAAAKDKSSDKKVQTKGKRGAKGKQAEVANQETKEDLPAENGETKTEESPASDEAGEKEAKSDSGSETPGTSESATPESYEQLAPQPCVGETLHSSLPRDSELFVPEEGSSEKESEDAPKTSPPTPGKHGLEQTGEEKVMVTVPDKNPPCPCCGTRVNSVLNLIEHLKVSHGKRGVCFRCAKCGKENSNYHSVVCHFKKCRGPETEKAPAGEWICEVCNRDFTTKIGLGQHKRLAHPAVRNQERIVASQPKETSNRGAHKRCWTKEEEELLIRLEAQFEGNKNINKLIAEHITTKTAKQISDKRRLLSRKPAEEPREEPGTCHHTRRAAASLRTEPEMSHHAQAEDRDNGPGRRPLPGRAAAGGRTMDEIRRHPDKGNGQQRPTKQKSEEQLQAYYKKTLEERLSAGALNTFPRAFKQVMEGRDIKLVINQTAQDCFGCLESISQIRTATRDKKDTVTREKHPKKPFQKWMKKRAIKKGNYLRFQRLFYLDRGKLAKIILDDIECLSCDIPLSEIYSVFKTRWETTGSFKSLGDFKTYGKADNTAFRELITAKEIEKNVQEMSKGSAPGPDGITLGDVVKMDPEFSRTMEIFNLWLTTGKIPDMVRGCRTVLIPKSSKPDRLKDINNWRPITIGSILLRLFSRIVTARLSKACPLNPRQRGFIRAAGCSENLKLLQTIIWSAKREHRPLGVVFVDIAKAFDTVSHQHIIHALQQREVPPHIVGLVSNMYENISTYITTKRNTHTDKIQIRVGVKQGDPMSPLLFNLAMDPLLCKLEESGKGYHRGQSSITAMAFADDLVLLSDSWENMNTNISILETFCNLTGLKTQGQKCHGFYIKPTKDSYTINDCAAWTINGTPLNMIDPGESEKYLGLQFDPWIGIARSGLSTKLDFWLQRIDQAPLKPLQKTDILKTYTIPRLIYIADHSEVKSALLETLDQKIRTAVKEWLHLPPCTCDAILYSSTRDGGLGITKLAGLIPSVQARRLHRIAQSSDDTMKCFMEKEKMEQLHKKLWIQAGGDRENIPSIWEAPPSSEPPNNVSTNSEWEAPTQKDKFPKPCNWRKNEFKKWTKLASQGRGIVNFERDKISNHWIQYYRRIPHRKLLTALQLRANVYPTREFLARGRQDQYIKACRHCDADNESCAHIIGNCPVTQDARIKRHNYICELLLEEAKKKDWVVFKEPHIRDSNKELYKPDLIFVKDGRALVVDVTVRYEAAKSSLEEAAAEKVRKYKHLETEVRHLTNAKDVTFVGFPLGARGKWHQDNFKLLTELGLSKSRQVKMAETFSTVALFSSVDIVHMFASRARKSMVM

SEQ ID NO: 1062 - protein, 1665 aa, synthetic construct
MAPKKKRKVNISGSSCGSPNSADTSSDFKDLWTKLKECHDREVQGLQVKVTKLKQERILDAQRLEEFFTKNQQLREQQKVLHETIKVLEDRLRAGLCDRCAVTEEHMRKKQQEFENIRQQNLKLITELMNERNTLQEENKKLSEQLQQKIENDQQHQAAELECEEDVIPDSPITAFSFSGVNRLRRKENPHVRYIEQTHTKLEHSVCANEMRKVSKSSTHPQHNPNENEILVADTYDQSQSPMAKAHGTSSYTPDKSSFNLATVVAETLGLGVQEESETQGPMSPLGDELYHCLEGNHKKQPFESGSETPGTSESATPEGSPKRKVSSAEGAAKEEPKRRSARLSAKPPAKVEAKPKKAAAKDKSSDKKVQTKGKRGAKGKQAEVANQETKEDLPAENGETKTEESPASDEAGEKEAKSDSGSETPGTSESATPESYEQLAPQPCVGETLHSSLPRDSELFVPEEGSSEKESEDAPKTSPPTPGKHGLEQTGEEKVMVTVPDKNPPCPCCGTRVNSVLNLIEHLKVSHGKRGVCFRCAKCGKENSNYHSVVCHFKKCRGPETEKAPAGEWICEVCNRDFTTKIGLGQHKRLAHPAVRNQERIVASQPKETSNRGAHKRCWTKEEEELLIRLEAQFEGNKNINKLIAEHITTKTAKQISDKRRLLSRKPAEEPREEPGTCHHTRRAAASLRTEPEMSHHAQAEDRDNGPGRRPLPGRAAAGGRTMDEIRRHPDKGNGQQRPTKQKSEEQLQAYYKKTLEERLSAGALNTFPRAFKQVMEGRDIKLVINQTAQDCFGCLESISQIRTATRDKKDTVTREKHPKKPFQKWMKKRAIKKGNYLRFQRLFYLDRGKLAKIILDDIECLSCDIPLSEIYSVFKTRWETTGSFKSLGDFKTYGKADNTAFRELITAKEIEKNVQEMSKGSAPGPDGITLGDVVKMDPEFSRTMEIFNLWLTTGKIPDMVRGCRTVLIPKSSKPDRLKDINNWRPITIGSILLRLFSRIVTARLSKACPLNPRQRGFIRAAGCSENLKLLQTIIWSAKREHRPLGVVFVDIAKAFDTVSHQHIIHALQQREVDPHIVGLVSNMYENISTYITTKRNTHTDKIQIRVGVKQGDPMSPLLFNLAMDPLLCKLEESGKGYHRGQSSITAMAFADDLVLLSDSWENMNTNISILETFCNLTGLKTQGQKCHGFYIKPTKDSYTINDCAAWTINGTPLNMIDPGESYKYLGLQFDPWIGIARSGLSTKLDFWLQRIDQAPLKPLQKTDILKTYTIPRLIYIADHSEVKSALLETLDQKIRTAVKEWLHLPPCTCDAILYSSTRDGGLGITKLAGLIPSVQARRLHRIAQSSDDTMKCFMEKEKMEQLHKKLWIQAGGDRENIPSIWEAPPSSEPPNNVSTNSEWEAPTQKDKFPKPCNWRKNEFKKWTKLASQGRGIVNFERDKISNHWIQYYRRIPHRKLLTALQLRANVYPTREFLARGRQDQYIKACRHCDADNESCAHIIGNCPVTQDARIKRHNYICELLLEEAKKKDWVVFKEPHIRDSNKELYKPDLIFVKDGRALVVDVTVRYEAAKSSLEEAAAEKVRKYKHLETEVRHLTNAKDVTFVGFPLGARGKWHQDNFKLLTELGLSKSRQVKMAETFSTVALFSSVDIVHMFASRARKSMVM

SEQ ID NO: 1063 - protein, 1665 aa, synthetic construct
MAPKKKRKVNISGSSCGSPNSADISSDFKDLWTKLKECHDREVQGLQVKVTKLKQERILDAQRLEEFFTKNQQLREQQKVLHETIKVLEDRLRAGLCDRCAVTEEHMRKKQQEFENIRQQNLKLITELMNERNTLQEENKKLSEQLQQKIENDQQHQAAELECEEDVIPDSPITAFSFSGVNRLRRKENPHVRYIEQTHTKLEHSVCANEMRKVSKSSTHPQHNPNENEILVADTYDQSQSPMAKAHGTSSYTPDKSSFNLATVVAETLGLGVQEESETQGPMSPLGDELYHCLEGNHKKQPFESGSETPGTSESATPEGSPKRKVSSAEGAAKEEPKRRSARLSAKPPAKVEAKPKKAAAKDKSSDKKVQTKGKRGAKGKQAEVANQETKEDLPAENGETKTEESPASDEAGEKEAKSDSGSETPGTSESATPESYEQLAPQPCVGETLHSSLPRDSELFVPEEGSSEKESEDAPKTSPPTPGKHGLEQTGEEKVMVTVPDKNPPCPCCGTRVNSVLNLIEHLKVSHGKRGVCFRCAKCGKENSNYHSVVCHFKKCRGPETEKAPAGEWICEVCNRDFTTKIGLGQHKRLAHPAVRNQERIVASQPKETSNRGAHKRCWTKEEEELLIRLEAQFEGNKNINKLIAEHITTKTAKQISDKRRLLSRKPAEEPREEPGTCHHTRRAAASLRTEPEMSHHAQAEDRDNGPGRRPLPGRAAAGGRTMDEIRRHPDKGNGQQRPTKQKSEEQLQAYYKKTLEERLSAGALNTFPRAFKQVMEGRDIKLVINQTAQDCFGCLESISQIRTATRDKKDTVTREKHPKKPFQKWMKKRAIKKGNYLRFQRLFYLDRGKLAKIILDDIECLSCDIPLSEIYSVFKTRWETTGSFKSLGDFKTYGKADNTAFRELITAKEIEKNVQEMSKGSAPGPDGITLGDVVKMDPEFSRTMEIFNLWLTTGKIPDMVRGCRTVLIPKSSKPDRLKDINNWRPITIGSILLRLFSRIVTARLSKACPLNPRQRGFIRAAGCSENLKLLQTIIWSAKREHRPLGVVFVDIAKAFDTVSHQHIIHALQQREVDPHIVGLVSNMYENISTYITTKRNTHTDKIQIRVGVKQGDPMSPLLFNLAMDPLLCKLEESGKGYHRGQSSITAMAFADDLVLLSDSWENMNTNISILETFCNLTGLKTQGQKCHGFYIKPTKDSYTINDCAAWTINGTPLNMIDPGESEKYLGLQFDPWIGIARSGLSTKLDFWLQRIDQAPLKPLQKTDILKTYTIPRLIYIADHSEVKSALLETLDQKIRTAVKEWLHLPPCTCDAILYSSTRDGGLGITKLAGLIPSVQARRLHRIAQSSDDTMKCFMEKEKMEQLHKKLWIQAGGDRENIPSIWEAPPSSEPPNNVSTNSEWEAPTQKDKFPKPCNWRKNEFKKWTKLASQGRGIVNFERDKISNHWIQYYRRIPHRKLLTALQLRANVYPTREFLARGRQDQYIKACRHCDADNESCAHIIGNCPVTQDARIKRHNYICELLLEEAKKKDWVVFKEPHIRDSNKELYKPDLIFVKDGRALVVDVTVRYEAAKSSLEEAAAEKVRKYKHLETEVRHLTNAKDVTFVGFPLGARGKWHQDNFKLLTELGLSKSRQVKMAETFSTVALFSSVDIVHMFASRARKSMVM

SEQ ID NO: 1064 - protein, 1665 aa, synthetic construct
MAPKKKRKVNISGSSCGSPNSADTSSDFKDLWTKLKECHDREVQGLQVKVTKLKQERILDAQRLEEFFTKNQQLREQQKVLHETIKVLEDRLRAGLCDRCAVTEEHMRKKQQEFENIRQQNLKLITELMNEKNTLQEENKKLSEQLQQKIENDQQHQAAELECEEDVIPDSPITAFSFSGVNRLRRKENPHVRYIEQTHTKLEHSVCANEMRKVSKSSTHPQHNPNENEILVADTYDQSQSPMAKAHGTSSYTPDKSSFNLATVVAETLGLGVQEESETQGPMSPLGDELYHCLEGNHKKQPFESGSETPGTSESATPEGSPKRKVSSAEGAAKEEPKRRSARLSAKPPAKVEAKPKKAAAKDKSSDKKVQTKGKRGAKGKQAEVANQETKEDLPAENGETKTEESPASDEAGEKEAKSDSGSETPGTSESATPESYEQLAPQPCVGETLHSSLPRDSELFVPEEGSSEKESEDAPKTSPPTPGKHGLEQTGEEKVMVTVPDKNPPCPCCGTRVNSVLNLIEHLKVSHGKRGVCFRCAKCGKENSNYHSVVCHFKKCRGPETEKAPAGEWICEVCNRDFTTKIGLGQHKRLAHPAVRNQERIVASQPKETSNRGAHKRCWTKEEEELLIRLEAQFEGNKNINKLIAEHITTKTAKQISDKRRLLSRKPAEEPREEPGTCHHTRRAAASLRTEPEMSHHAQAEDRDNGPGRRPLPGRAAAGGRTMDEIRRHPDKGNGQQRPTKQKSEEQLQAYYKKTLEERLSAGALNTFPRAFKQVMEGRDIKLVINQTAQDCFGCLESISQIRTATRDKKDTVTREKHPKKPFQKWMKKRAIKKGNYLRFQRLFYLDRGKLAKIILDDIECLSCDIPLSEIYSVFKTRWETTGSFKSLGDFKTYGKADNTAFRELITAKEIEKNVQEMSKGSAPGPDGITLGDVVKMDPEFSRTMEIFNLWLTTGKIPDMVRGCRTVLIPKSSKPDRLKDINNWRPITIGSILLRLFSRIVTARLSKACPLNPRQRGFIRAAGCSENLKLLQTIIWSAKREHRPLGVVFVDIAKAFDTVSHQHIIHALQQREVDPHIVGLVSNMYENISTYITTKRNTHTDKIQIRVGVKQGDPMSPLLFNLAMDPLLCKLEESGKGYHRGQSSITAMAFADDLVLLSDSWENMNTNISILETFCNLTGLKTQGQKCHGFYIKPTKDSYTINDCAAWTINGTPLNMIDPGESEKYLGLQFDPWIGIARSGLSTKLDFWLQRIDQAPLKPLQKTDILKTYTIPRLIYIADHSEVKSALLETLDQKIRTAVKEWLHLPPCTCDAILYSSTRDGGLGITKLAGLIPSVQARRLHRIAQSSDDTMKCFMEKEKMEQLHKKLWIQAGGDRENIPSIWEAPPSSEPPNNVSTNSEWEAPTQKDKFPKPCNWRKNEFKKWTKLASQGRGIVNFERDKISNHWIQYYRRIPHRKLLTALQLRANVYPTREFLARGRQDQYIKACRHCDADNESCAHIIGNCPVTQDARIKRHNYICELLLEEAKKKDWVVFKEPHIRDSNKELYKPDLIFVKDGRALVVDVTVRYEAAKSSLEEAAAEKVRKYKHLETEVRHLTNAKDVTFVGFPLGARGKWHQDNFKLLTELGLSKSRQVKMAETFSTVALFSSVDIVHMFASRARKSMVM

SEQ ID NO: 1065 - protein, 1665 aa, synthetic construct
MAPKKKRKVNISGSSCGSPNSADTSSDFKDLWTKLKECHDREVQGLQVKVTKLKQERILDAQRLEEFFTKNQQLREQQKVLHETIKVLEDRLRAGLCDRCAVTEEHMRKKQQEFENIRQQNLKLITELMNERNTLQEENKKLSEQLQQKIENDQQHQAAELECEEDVIPDSPITAFSFSGVNRLRRKENLHVRYIEQTHTKLEHSVCANEMRKVSKSSTHPQHNPNENEILVADTYDQSQSPMAKAHGTSSYTPDKSSFNLATVVAETLGLGVQEESETQGPMSPLGDELYHCLEGNHKKQPFESGSETPGTSESATPEGSPKRKVSSAEGAAKEEPKRRSARLSAKPPAKVEAKPKKAAAKDKSSDKKVQTKGKRGAKGKQAEVANQETKEDLPAENGETKTEESPASDEAGEKEAKSDSGSETPGTSESATPESYEQLAPQPCVGETLHSSLPRDSELFVPEEGSSEKESEDAPKTSPPTPGKHGLEQTGEEKVMVTVPDKNPPCPCCGTRVNSVLNLIEHLKVSHGKRGVCFRCAKCGKENSNYHSVVCHFKKCRGPETEKAPAGEWICEVCNRDFTTKIGLGQHKRLAHPAVRNQERIVASQPKETSNRGAHKRCWTKEEEELLIRLEAQFEGNKNINKLIAEHITTKTAKQISDKRRLLSRKPAEEPREEPGTCHHTRRAAASLRTEPEMSHHAQAEDRDNGPGRRPLPGRAAAGGRTMDEIRRHPDKGNGQQRPTKQKSEEQLQAYYKKTLEERLSAGALNTFPRAFKQVMEGRDIKLVINQTAQDCFGCLESISQIRTATRDKKDTVTREKHPKKPFQKWMKKRAIKKGNYLRFQRLFYLDRGKLAKIILDDIECLSCDIPLSEIYSVFKTRWETTGSFKSLGDFKTYGKADNTAFRELITAKEIEKNVQEMSKGSAPGPDGITLGDVVKMDPEFSRTMEIFNLWLTTGKIPDMVRGCRTVLIPKSSKPDRLKDINNWRPITIGSILLRLFSRIVTARLSKACPLNPRQRGFIRAAGCSENLKLLQTIIWSAKREHRPLGVVFVDIAKAFDTVSHQHIIHALQQREVDPHIVGLVSNMYENISTYITTKRNTHTDKIQIRVGVKQGDPMSPLLFNLAMDPLLCKLEESGKGYHRGQSSITAMAFADDLVLLSDSWENMNTNISILETFCNLTGLKTQGQKCHGFYIKPTKDSYTINDCAAWTINGTPLNMIDPGESEKYLGLQFDPWIGIARSGLSTKLDFWLQRIDQAPLKPLQKTDILKTYTIPRLIYIADHSEVKSALLETLDQKIRTAVKEWLHLPPCTCDAILYSSTRDGGLGITKLAGLIPSVQARRLHRIAQSSDDTMKCFMEKEKMEQLHKKLWIQAGGDRENIPSIWEAPPSSEPPNNVSTNSEWEAPTQKDKFPKPCNWRKNEFKKWTKLASQGRGIVNFERDKISNHWIQYYRRIPHRKLLTALQLRANVYPTREFLARGRQDQYIKACRHCDADNESCAHIIGNCPVTQDARIKRHNYICELLLEEAKKKDWVVFKEPHIRDSNKELYKPDLIFVKDGRALVVDVTVRYEAAKSSLEEAAAEKVRKYKHLETEVRHLTNAKDVTFVGFPLGARGKWHQDNFKLLTELGLSKSRQVKMAETFSTVALFSSVDIVHMFASRARKSMVM

SEQ ID NO: 1066 - protein, 1665 aa, synthetic construct
MAPKKKRKVNISGSSCGSPNSADTSSDFKDLWTKLKECHDREVQGLQVKVTKLKQERILDAQRLEEFFTKNQQLREQQKVLHETIKVLEDRLRAGLCDRCAVTEEHMRKKQQEFENIRQQNLKLITELMNERNTLQEENKKLSEQLQQKIENDQQHQAAELECEEDVIPDSPITAFSFSGVNRLRRKENPHVRYIEQTHTKLEHSVCANELRKVSKSSTHPQHNPNENEILVADTYDQSQSPMAKAHGTSSYTPDKSSFNLATVVAETLGLGVQEESETQGPMSPLGDELYHCLEGNHKKQPFESGSETPGTSESATPEGSPKRKVSSAEGAAKEEPKRRSARLSAKPPAKVEAKPKKAAAKDKSSDKKVQTKGKRGAKGKQAEVANQETKEDLPAENGETKTEESPASDEAGEKEAKSDSGSETPGTSESATPESYEQLAPQPCVGETLHSSLPRDSELFVPEEGSSEKESEDAPKTSPPTPGKHGLEQTGEEKVMVTVPDKNPPCPCCGTRVNSVLNLIEHLKVSHGKRGVCFRCAKCGKENSNYHSVVCHFKKCRGPETEKAPAGEWICEVCNRDFTTKIGLGQHKRLAHPAVRNQERIVASQPKETSNRGAHKRCWTKEEEELLIRLEAQFEGNKNINKLIAEHITTKTAKQISDKRRLLSRKPAEEPREEPGTCHHTRRAAASLRTEPEMSHHAQAEDRDNGPGRRPLPGRAAAGGRTMDEIRRHPDKGNGQQRPTKQKSEEQLQAYYKKTLEERLSAGALNTFPRAFKQVMEGRDIKLVINQTAQDCFGCLESISQIRTATRDKKDTVTREKHPKKPFQKWMKKRAIKKGNYLRFQRLFYLDRGKLAKIILDDIECLSCDIPLSEIYSVFKTRWETTGSFKSLGDFKTYGKADNTAFRELITAKEIEKNVQEMSKGSAPGPDGITLGDVVKMDPEFSRTMEIFNLWLTTGKIPDMVRGCRTVLIPKSSKPDRLKDINNWRPITIGSILLRLFSRIVTARLSKACPLNPRQRGFIRAAGCSENLKLLQTIIWSAKREHRPLGVVFVDIAKAFDTVSHQHIIHALQQREVDPHIVGLVSNMYENISTYITTKRNTHTDKIQIRVGVKQGDPMSPLLFNLAMDPLLCKLEESGKGYHRGQSSITAMAFADDLVLLSDSWENMNTNISILETFCNLTGLKTQGQKCHGFYIKPTKDSYTINDCAAWTINGTPLNMIDPGESEKYLGLQFDPWIGIARSGLSTKLDFWLQRIDQAPLKPLQKTDILKTYTIPRLIYIADHSEVKSALLETLDQKIRTAVKEWLHLPPCTCDAILYSSTRDGGLGITKLAGLIPSVQARRLHRIAQSSDDTMKCFMEKEKMEQLHKKLWIQAGGDRENIPSIWEAPPSSEPPNNVSTNSEWEAPTQKDKFPKPCNWRKNEFKKWTKLASQGRGIVNFERDKISNHWIQYYRRIPHRKLLTALQLRANVYPTREFLARGRQDQYIKACRHCDADNESCAHIIGNCPVTQDARIKRHNYICELLLEEAKKKDWVVFKEPHIRDSNKELYKPDLIFVKDGRALVVDVTVRYEAAKSSLEEAAAEKVRKYKHLETEVRHLTNAKDVTFVGFPLGARGKWHQDNFKLLTELGLSKSRQVKMAETFSTVALFSSVDIVHMFASRARKSMVM

SEQ ID NO: 1067 - protein, 1665 aa, synthetic construct
MAPKKKRKVNISGSSCGSPNSADTSSDFKDLWTKLKECHDREVQGLQVKVTKLKQERILDAQRLEEFFTKNQQLREQQKVLHETIKVLEDRLRAGLCDRCAVTEEHMRKKQQEFENIRQQNLKLITELMNERNTLQEENKKLSEQLQQKIENDQQHQAAELECEEDVIPDSPITAFSFSGVNRLRRKENPHVRYIEQTHTKLEHSVCANEFRKVSKSSTHPQHNPNENEILVADTYDQSQSPMAKAHGTSSYTPDKSSFNLATVVAETLGLGVQEESETQGPMSPLGDELYHCLEGNHKKQPFESGSETPGTSESATPEGSPKRKVSSAEGAAKEEPKRRSARLSAKPPAKVEAKPKKAAAKDKSSDKKVQTKGKRGAKGKQAEVANQETKEDLPAENGETKTEESPASDEAGEKEAKSDSGSETPGTSESATPESYEQLAPQPCVGETLHSSLPRDSELFVPEEGSSEKESEDAPKTSPPTPGKHGLEQTGEEKVMVTVPDKNPPCPCCGTRVNSVLNLIEHLKVSHGKRGVCFRCAKCGKENSNYHSVVCHFKKCRGPETEKAPAGEWICEVCNRDFTTKIGLGQHKRLAHPAVRNQERIVASQPKETSNRGAHKRCWTKEEEELLIRLEAQFEGNKNINKLIAEHITTKTAKQISDKRRLLSRKPAEEPREEPGTCHHTRRAAASLRTEPEMSHHAQAEDRDNGPGRRPLPGRAAAGGRTMDEIRRHPDKGNGQQRPTKQKSEEQLQAYYKKTLEERLSAGALNTFPRAFKQVMEGRDIKLVINQTAQDCFGCLESISQIRTATRDKKDTVTREKHPKKPFQKWMKKRAIKKGNYLRFQRLFYLDRGKLAKIILDDIECLSCDIPLSEIYSVFKTRWETTGSFKSLGDFKTYGKADNTAFRELITAKEIEKNVQEMSKGSAPGPDGITLGDVVKMDPEFSRTMEIFNLWLTTGKIPDMVRGCRTVLIPKSSKPDRLKDINNWRPITIGSILLRLFSRIVTARLSKACPLNPRQRGFIRAAGCSENLKLLQTIIWSAKREHRPLGVVFVDIAKAFDTVSHQHIIHALQQREVDPHIVGLVSNMYENISTYITTKRNTHTDKIQIRVGVKQGDPMSPLLFNLAMDPLLCKLEESGKGYHRGQSSITAMAFADDLVLLSDSWENMNTNISILETFCNLTGLKTQGQKCHGFYIKPTKDSYTINDCAAWTINGTPLNMIDPGESEKYLGLQFDPWIGIARSGLSTKLDFWLQRIDQAPLKPLQKTDILKTYTIPRLIYIADHSEVKSALLETLDQKIRTAVKEWLHLPPCTCDAILYSSTRDGGLGITKLAGLIPSVQARRLHRIAQSSDDTMKCFMEKEKMEQLHKKLWIQAGGDRENIPSIWEAPPSSEPPNNVSTNSEWEAPTQKDKFPKPCNWRKNEFKKWTKLASQGRGIVNFERDKISNHWIQYYRRIPHRKLLTALQLRANVYPTREFLARGRQDQYIKACRHCDADNESCAHIIGNCPVTQDARIKRHNYICELLLEEAKKKDWVVFKEPHIRDSNKELYKPDLIFVKDGRALVVDVTVRYEAAKSSLEEAAAEKVRKYKHLETEVRHLTNAKDVTFVGFPLGARGKWHQDNFKLLTELGLSKSRQVKMAETFSTVALFSSVDIVHMFASRARKSMVM

SEQ ID NO: 1068 - protein, 1665 aa, synthetic construct
MAPKKKRKVNISGSSCGSPNSADTSSDFKDLWTKLKECHDREVQGLQVKVTKLKQERILDAQRLEEFFTKNQQLREQQKVLHETIKVLEDRLRAGLCDRCAVTEEHMRKKQQEFENIRQQNLKLITELMNERNTLQEENKKLSEQLQQKIENDQQHQAAELECEEDVIPDSPITAFSFSGVNRLRRKENPHVRYIEQTHTKLEHSVCANETRKVSKSSTHPQHNPNENEILVADTYDQSQSPMAKAHGTSSYTPDKSSFNLATVVAETLGLGVQEESETQGPMSPLGDELYHCLEGNHKKQPFESGSETPGTSESATPEGSPKRKVSSAEGAAKEEPKRRSARLSAKPPAKVEAKPKKAAAKDKSSDKKVQTKGKRGAKGKQAEVANQETKEDLPAENGETKTEESPASDEAGEKEAKSDSGSETPGTSESATPESYEQLAPQPCVGETLHSSLPRDSELFVPEEGSSEKESEDAPKTSPPTPGKHGLEQTGEEKVMVTVPDKNPPCPCCGTRVNSVLNLIEHLKVSHGKRGVCFRCAKCGKENSNYHSVVCHFKKCRGPETEKAPAGEWICEVCNRDFTTKIGLGQHKRLAHPAVRNQERIVASQPKETSNRGAHKRCWTKEEEELLIRLEAQFEGNKNINKLIAEHITTKTAKQISDKRRLLSRKPAEEPREEPGTCHHTRRAAASLRTEPEMSHHAQAEDRDNGPGRRPLPGRAAAGGRTMDEIRRHPDKGNGQQRPTKQKSEEQLQAYYKKTLEERLSAGALNTFPRAFKQVMEGRDIKLVINQTAQDCFGCLESISQIRTATRDKKDTVTREKHPKKPFQKWMKKRAIKKGNYLRFQRLFYLDRGKLAKIILDDIECLSCDIPLSEIYSVFKTRWETTGSFKSLGDFKTYGKADNTAFRELITAKEIEKNVQEMSKGSAPGPDGITLGDVVKMDPEFSRTMEIFNLWLTTGKIPDMVRGCRTVLIPKSSKPDRLKDINNWRPITIGSILLRLFSRIVTARLSKACPLNPRQRGFIRAAGCSENLKLLQTIIWSAKREHRPLGVVFVDIAKAFDTVSHQHIIHALQQREVDPHIVGLVSNMYENISTYITTKRNTHTDKIQIRVGVKQGDPMSPLLFNLAMDPLLCKLEESGKGYHRGQSSITAMAFADDLVLLSDSWENMNTNISILETFCNLTGLKTQGQKCHGFYIKPTKDSYTINDCAAWTINGTPLNMIDPGESEKYLGLQFDPWIGIARSGLSTKLDFWLQRIDQAPLKPLQKTDILKTYTIPRLIYIADHSEVKSALLETLDQKIRTAVKEWLHLPPCTCDAILYSSTRDGGLGITKLAGLIPSVQARRLHRIAQSSDDTMKCFMEKEKMEQLHKKLWIQAGGDRENIPSIWEAPPSSEPPNNVSTNSEWEAPTQKDKFPKPCNWRKNEFKKWTKLASQGRGIVNFERDKISNHWIQYYRRIPHRKLLTALQLRANVYPTREFLARGRQDQYIKACRHCDADNESCAHIIGNCPVTQDARIKRHNYICELLLEEAKKKDWVVFKEPHIRDSNKELYKPDLIFVKDGRALVVDVTVRYEAAKSSLEEAAAEKVRKYKHLETEVRHLTNAKDVTFVGFPLGARGKWHQDNFKLLTELGLSKSRQVKMAETFSTVALFSSVDIVHMFASRARKSMVM

SEQ ID NO: 1069 - protein, 1665 aa, synthetic construct
MAPKKKRKVNISGSSCGSPNSADTSSDFKDLWTKLKECHDREVQGLQVKVTKLKQERILDAQRLEEFFTKNQQLREQQKVLHETIKVLEDRLRAGLCDRCAVTEEHMRKKQQEFENIRQQNLKLITELMNERNTLQEENKKLSEQLQQKIENDQQHQAAELECEEDVIPDSPITAFSFSGVNRLRRKENPHVRYIEQTHTKLEHSVCANEMRKVSKSSTHPQHNPNENEILVADTYDQSQSPMAKTHGTSSYTPDKSSFNLATVVAETLGLGVQEESETQGPMSPLGDELYHCLEGNHKKQPFESGSETPGTSESATPEGSPKRKVSSAEGAAKEEPKRRSARLSAKPPAKVEAKPKKAAAKDKSSDKKVQTKGKRGAKGKQAEVANQETKEDLPAENGETKTEESPASDEAGEKEAKSDSGSETPGTSESATPESYEQLAPQPCVGETLHSSLPRDSELFVPEEGSSEKESEDAPKTSPPTPGKHGLEQTGEEKVMVTVPDKNPPCPCCGTRVNSVLNLIEHLKVSHGKRGVCFRCAKCGKENSNYHSVVCHFKKCRGPETEKAPAGEWICEVCNRDFTTKIGLGQHKRLAHPAVRNQERIVASQPKETSNRGAHKRCWTKEEEELLIRLEAQFEGNKNINKLIAEHITTKTAKQISDKRRLLSRKPAEEPREEPGTCHHTRRAAASLRTEPEMSHHAQAEDRDNGPGRRPLPGRAAAGGRTMDEIRRHPDKGNGQQRPTKQKSEEQLQAYYKKTLEERLSAGALNTFPRAFKQVMEGRDIKLVINQTAQDCFGCLESISQIRTATRDKKDTVTREKHPKKPFQKWMKKRAIKKGNYLRFQRLFYLDRGKLAKIILDDIECLSCDIPLSEIYSVFKTRWETTGSFKSLGDFKTYGKADNTAFRELITAKEIEKNVQEMSKGSAPGPDGITLGDVVKMDPEFSRTMEIFNLWLTTGKIPDMVRGCRTVLIPKSSKPDRLKDINNWRPITIGSILLRLFSRIVTARLSKACPLNPRQRGFIRAAGCSENLKLLQTIIWSAKREHRPLGVVFVDIAKAFDTVSHQHIIHALQQREVDPHIVGLVSNMYENISTYITTKRNTHTDKIQIRVGVKQGDPMSPLLFNLAMDPLLCKLEESGKGYHRGQSSITAMAFADDLVLLSDSWENMNTNISILETFCNLTGLKTQGQKCHGFYIKPTKDSYTINDCAAWTINGTPLNMIDPGESEKYLGLQFDPWIGIARSGLSTKLDFWLQRIDQAPLKPLQKTDILKTYTIPRLIYIADHSEVKSALLETLDQKIRTAVKEWLHLPPCTCDAILYSSTRDGGLGITKLAGLIPSVQARRLHRIAQSSDDTMKCFMEKEKMEQLHKKLWIQAGGDRENIPSIWEAPPSSEPPNNVSTNSEWEAPTQKDKFPKPCNWRKNEFKKWTKLASQGRGIVNFERDKISNHWIQYYRRIPHRKLLTALQLRANVYPTREFLARGRQDQYIKACRHCDADNESCAHIIGNCPVTQDARIKRHNYICELLLEEAKKKDWVVFKEPHIRDSNKELYKPDLIFVKDGRALVVDVTVRYEAAKSSLEEAAAEKVRKYKHLETEVRHLTNAKDVTFVGFPLGARGKWHQDNFKLLTELGLSKSRQVKMAETFSTVALFSSVDIVHMFASRARKSMVM

SEQ ID NO: 1070 - protein, 1665 aa, synthetic construct
MAPKKKRKVNISGSSCGSPNSADTSSDFKDLWTKLKECHDREVQGLQVKVTKLKQERILDAQRLEEFFTKNQQLREQQKVLHETIKVLEDRLRAGLCDRCAVTEEHMRKKQQEFENIRQQNLKLITELMNERNTLQEENKKLSEQLQQKIENDQQHQAAELECEEDVIPDSPITAFSFSGVNRLRRKENPHVRYIEQTHTKLEHSVCANEMRKVSKSSTHPQHNPNENEILVADTYDQSQSPMAKIHGTSSYTPDKSSFNLATVVAETLGLGVQEESETQGPMSPLGDELYHCLEGNHKKQPFESGSETPGTSESATPEGSPKRKVSSAEGAAKEEPKRRSARLSAKPPAKVEAKPKKAAAKDKSSDKKVQTKGKRGAKGKQAEVANQETKEDLPAENGETKTEESPASDEAGEKEAKSDSGSETPGTSESATPESYEQLAPQPCVGETLHSSLPRDSELFVPEEGSSEKESEDAPKTSPPTPGKHGLEQTGEEKVMVTVPDKNPPCPCCGTRVNSVLNLIEHLKVSHGKRGVCFRCAKCGKENSNYHSVVCHFKKCRGPETEKAPAGEWICEVCNRDFTTKIGLGQHKRLAHPAVRNQERIVASQPKETSNRGAHKRCWTKEEEELLIRLEAQFEGNKNINKLIAEHITTKTAKQISDKRRLLSRKPAEEPREEPGTCHHTRRAAASLRTEPEMSHHAQAEDRDNGPGRRPLPGRAAAGGRTMDEIRRHPDKGNGQQRPTKQKSEEQLQAYYKKTLEERLSAGALNTFPRAFKQVMEGRDIKLVINQTAQDCFGCLESISQIRTATRDKKDTVTREKHPKKPFQKWMKKRAIKKGNYLRFQRLFYLDRGKLAKIILDDIECLSCDIPLSEIYSVFKTRWETTGSFKSLGDFKTYGKADNTAFRELITAKEIEKNVQEMSKGSAPGPDGITLGDVVKMDPEFSRTMEIFNLWLTTGKIPDMVRGCRTVLIPKSSKPDRLKDINNWRPITIGSILLRLFSRIVTARLSKACPLNPRQRGFIRAAGCSENLKLLQTIIWSAKREHRPLGVVFVDIAKAFDTVSHQHIIHALQQREVDPHIVGLVSNMYENISTYITTKRNTHTDKIQIRVGVKQGDPMSPLLFNLAMDPLLCKLEESGKGYHRGQSSITAMAFADDLVLLSDSWENMNTNISILETFCNLTGLKTQGQKCHGFYIKPTKDSYTINDCAAWTINGTPLNMIDPGESEKYLGLQFDPWIGIARSGLSTKLDFWLQRIDQAPLKPLQKTDILKTYTIPRLIYIADHSEVKSALLETLDQKIRTAVKEWLHLPPCTCDAILYSSTRDGGLGITKLAGLIPSVQARRLHRIAQSSDDTMKCFMEKEKMEQLHKKLWIQAGGDRENIPSIWEAPPSSEPPNNVSTNSEWEAPTQKDKFPKPCNWRKNEFKKWTKLASQGRGIVNFERDKISNHWIQYYRRIPHRKLLTALQLRANVYPTREFLARGRQDQYIKACRHCDADNESCAHIIGNCPVTQDARIKRHNYICELLLEEAKKKDWVVFKEPHIRDSNKELYKPDLIFVKDGRALVVDVTVRYEAAKSSLEEAAAEKVRKYKHLETEVRHLTNAKDVTFVGFPLGARGKWHQDNFKLLTELGLSKSRQVKMAETFSTVALFSSVDIVHMFASRARKSMVM

SEQ ID NO: 1071 - protein, 1665 aa, synthetic construct
MAPKKKRKVNISGSSCGSPNSADTSSDFKDLWTKLKECHDREVQGLQVKVTKLKQERILDAQRLEEFFTKNQQLREQQKVLHETIKVLEDRLRAGLCDRCAVTEEHMRKKQQEFENIRQQNLKLITELMNERNTLQEENKKLSEQLQQKIENDQQHQAAELECEEDVIPDSPITAFSFSGVNRLRRKENPHVRYIEQTHTKLEHSVCANEMRKVSKSSTHPQHNPNENEILVADTYDQSQSPMAKNHGTSSYTPDKSSFNLATVVAETLGLGVQEESETQGPMSPLGDELYHCLEGNHKKQPFESGSETPGTSESATPEGSPKRKVSSAEGAAKEEPKRRSARLSAKPPAKVEAKPKKAAAKDKSSDKKVQTKGKRGAKGKQAEVANQETKEDLPAENGETKTEESPASDEAGEKEAKSDSGSETPGTSESATPESYEQLAPQPCVGETLHSSLPRDSELFVPEEGSSEKESEDAPKTSPPTPGKHGLEQTGEEKVMVTVPDKNPPCPCCGTRVNSVLNLIEHLKVSHGKRGVCFRCAKCGKENSNYHSVVCHFKKCRGPETEKAPAGEWICEVCNRDFTTKIGLGQHKRLAHPAVRNQERIVASQPKETSNRGAHKRCWTKEEEELLIRLEAQFEGNKNINKLIAEHITTKTAKQISDKRRLLSRKPAEEPREEPGTCHHTRRAAASLRTEPEMSHHAQAEDRDNGPGRRPLPGRAAAGGRTMDEIRRHPDKGNGQQRPTKQKSEEQLQAYYKKTLEERLSAGALNTFPRAFKQVMEGRDIKLVINQTAQDCFGCLESISQIRTATRDKKDTVTREKHPKKPFQKWMKKRAIKKGNYLRFQRLFYLDRGKLAKIILDDIECLSCDIPLSEIYSVFKTRWETTGSFKSLGDFKTYGKADNTAFRELITAKEIEKNVQEMSKGSAPGPDGITLGDVVKMDPEFSRTMEIFNLWLTTGKIPDMVRGCRTVLIPKSSKPDRLKDINNWRPITIGSILLRLFSRIVTARLSKACPLNPRQRGFIRAAGCSENLKLLQTIIWSAKREHRPLGVVFVDIAKAFDTVSHQHIIHALQQREVDPHIVGLVSNMYENISTYITTKRNTHTDKIQIRVGVKQGDPMSPLLFNLAMDPLLCKLEESGKGYHRGQSSITAMAFADDLVLLSDSWENMNTNISILETFCNLTGLKTQGQKCHGFYIKPTKDSYTINDCAAWTINGTPLNMIDPGESEKYLGLQFDPWIGIARSGLSTKLDFWLQRIDQAPLKPLQKTDILKTYTIPRLIYIADHSEVKSALLETLDQKIRTAVKEWLHLPPCTCDAILYSSTRDGGLGITKLAGLIPSVQARRLHRIAQSSDDTMKCFMEKEKMEQLHKKLWIQAGGDRENIPSIWEAPPSSEPPNNVSTNSEWEAPTQKDKFPKPCNWRKNEFKKWTKLASQGRGIVNFERDKISNHWIQYYRRIPHRKLLTALQLRANVYPTREFLARGRQDQYIKACRHCDADNESCAHIIGNCPVTQDARIKRHNYICELLLEEAKKKDWVVFKEPHIRDSNKELYKPDLIFVKDGRALVVDVTVRYEAAKSSLEEAAAEKVRKYKHLETEVRHLTNAKDVTFVGFPLGARGKWHQDNFKLLTELGLSKSRQVKMAETFSTVALFSSVDIVHMFASRARKSMVM

SEQ ID NO: 1072 - protein, 1665 aa, synthetic construct
MAPKKKRKVNISGSSCGSPNSADTSSDFKDLWTKLKECHDREVQGLQVKVTKLKQERILDAQRLEEFFTKNQQLREQQKVLHETIKVLEDRLRAGLCDRCAVTEEHMRKKQQEFENIRQQNLKLITELMNERNTLQEENKKLSEQLQQKIENDQQHQAAELECEEDVIPDSPITAFSFSGVNRLRRKENPHVRYIEQTHTKLEHSVCANEMRKVSKSSTHPQHNPNENEILVADTYDQSQSPMAKKHGTSSYTPDKSSFNLATVVAETLGLGVQEESETQGPMSPLGDELYHCLEGNHKKQPFESGSETPGTSESATPEGSPKRKVSSAEGAAKEEPKRRSARLSAKPPAKVEAKPKKAAAKDKSSDKKVQTKGKRGAKGKQAEVANQETKEDLPAENGETKTEESPASDEAGEKEAKSDSGSETPGTSESATPESYEQLAPQPCVGETLHSSLPRDSELFVPEEGSSEKESEDAPKTSPPTPGKHGLEQTGEEKVMVTVPDKNPPCPCCGTRVNSVLNLIEHLKVSHGKRGVCFRCAKCGKENSNYHSVVCHFKKCRGPETEKAPAGEWICEVCNRDFTTKIGLGQHKRLAHPAVRNQERIVASQPKETSNRGAHKRCWTKEEEELLIRLEAQFEGNKNINKLIAEHITTKTAKQISDKRRLLSRKPAEEPREEPGTCHHTRRAAASLRTEPEMSHHAQAEDRDNGPGRRPLPGRAAAGGRTMDEIRRHPDKGNGQQRPTKQKSEEQLQAYYKKTLEERLSAGALNTFPRAFKQVMEGRDIKLVINQTAQDCFGCLESISQIRTATRDKKDTVTREKHPKKPFQKWMKKRAIKKGNYLRFQRLFYLDRGKLAKIILDDIECLSCDIPLSEIYSVFKTRWETTGSFKSLGDFKTYGKADNTAFRELITAKEIEKNVQEMSKGSAPGPDGITLGDVVKMDPEFSRTMEIFNLWLTTGKIPDMVRGCRTVLIPKSSKPDRLKDINNWRPITIGSILLRLFSRIVTARLSKACPLNPRQRGFIRAAGCSENLKLLQTIIWSAKREHRPLGVVFVDIAKAFDTVSHQHIIHALQQREVDPHIVGLVSNMYENISTYITTKRNTHTDKIQIRVGVKQGDPMSPLLFNLAMDPLLCKLEESGKGYHRGQSSITAMAFADDLVLLSDSWENMNTNISILETFCNLTGLKTQGQKCHGFYIKPTKDSYTINDCAAWTINGTPLNMIDPGESEKYLGLQFDPWIGIARSGLSTKLDFWLQRIDQAPLKPLQKTDILKTYTIPRLIYIADHSEVKSALLETLDQKIRTAVKEWLHLPPCTCDAILYSSTRDGGLGITKLAGLIPSVQARRLHRIAQSSDDTMKCFMEKEKMEQLHKKLWIQAGGDRENIPSIWEAPPSSEPPNNVSTNSEWEAPTQKDKFPKPCNWRKNEFKKWTKLASQGRGIVNFERDKISNHWIQYYRRIPHRKLLTALQLRANVYPTREFLARGRQDQYIKACRHCDADNESCAHIIGNCPVTQDARIKRHNYICELLLEEAKKKDWVVFKEPHIRDSNKELYKPDLIFVKDGRALVVDVTVRYEAAKSSLEEAAAEKVRKYKHLETEVRHLTNAKDVTFVGFPLGARGKWHQDNFKLLTELGLSKSRQVKMAETFSTVALFSSVDIVHMFASRARKSMVM

SEQ ID NO: 1073 - protein, 1665 aa, synthetic construct
MAPKKKRKVNISGSSCGSPNSADTSSDFKDLWTKLKECHDREVQGLQVKVTKLKQERILDAQRLEEFFTKNQQLREQQKVLHETIKVLEDRLRAGLCDRCAVTEEHMRKKQQEFENIRQQNLKLITELMNERNTLQEENKKLSEQLQQKIENDQQHQAAELECEEDVIPDSPITAFSFSGVNRLRRKENPHVRYIEQTHTKLEHSVCANEMRKVSKSSTHPQHNPNENEILVADTYDQSQSPMAKAHGTSSYTPDKSSFNLATVVAETLGLGVQEESETQGPMSPLGDELYHCLEGDHKKQPFESGSETPGTSESATPEGSPKRKVSSAEGAAKEEPKRRSARLSAKPPAKVEAKPKKAAAKDKSSDKKVQTKGKRGAKGKQAEVANQETKEDLPAENGETKTEESPASDEAGEKEAKSDSGSETPGTSESATPESYEQLAPQPCVGETLHSSLPRDSELFVPEEGSSEKESEDAPKTSPPTPGKHGLEQTGEEKVMVTVPDKNPPCPCCGTRVNSVLNLIEHLKVSHGKRGVCFRCAKCGKENSNYHSVVCHFKKCRGPETEKAPAGEWICEVCNRDFTTKIGLGQHKRLAHPAVRNQERIVASQPKETSNRGAHKRCWTKEEEELLIRLEAQFEGNKNINKLIAEHITTKTAKQISDKRRLLSRKPAEEPREEPGTCHHTRRAAASLRTEPEMSHHAQAEDRDNGPGRRPLPGRAAAGGRTMDEIRRHPDKGNGQQRPTKQKSEEQLQAYYKKTLEERLSAGALNTFPRAFKQVMEGRDIKLVINQTAQDCFGCLESISQIRTATRDKKDTVTREKHPKKPFQKWMKKRAIKKGNYLRFQRLFYLDRGKLAKIILDDIECLSCDIPLSEIYSVFKTRWETTGSFKSLGDFKTYGKADNTAFRELITAKEIEKNVQEMSKGSAPGPDGITLGDVVKMDPEFSRTMEIFNLWLTTGKIPDMVRGCRTVLIPKSSKPDRLKDINNWRPITIGSILLRLFSRIVTARLSKACPLNPRQRGFIRAAGCSENLKLLQTIIWSAKREHRPLGVVFVDIAKAFDTVSHQHIIHALQQREVDPHIVGLVSNMYENISTYITTKRNTHTDKIQIRVGVKQGDPMSPLLFNLAMDPLLCKLEESGKGYHRGQSSITAMAFADDLVLLSDSWENMNTNISILETFCNLTGLKTQGQKCHGFYIKPTKDSYTINDCAAWTINGTPLNMIDPGESEKYLGLQFDPWIGIARSGLSTKLDFWLQRIDQAPLKPLQKTDILKTYTIPRLIYIADHSEVKSALLETLDQKIRTAVKEWLHLPPCTCDAILYSSTRDGGLGITKLAGLIPSVQARRLHRIAQSSDDTMKCFMEKEKMEQLHKKLWIQAGGDRENIPSIWEAPPSSEPPNNVSTNSEWEAPTQKDKFPKPCNWRKNEFKKWTKLASQGRGIVNFERDKISNHWIQYYRRIPHRKLLTALQLRANVYPTREFLARGRQDQYIKACRHCDADNESCAHIIGNCPVTQDARIKRHNYICELLLEEAKKKDWVVFKEPHIRDSNKELYKPDLIFVKDGRALVVDVTVRYEAAKSSLEEAAAEKVRKYKHLETEVRHLTNAKDVTFVGFPLGARGKWHQDNFKLLTELGLSKSRQVKMAETFSTVALFSSVDIVHMFASRARKSMVM

SEQ ID NO: 1074 - protein, 1665 aa, synthetic construct
MAPKKKRKVNISGSSCGSPNSADTSSDFKDLWTKLKECHDREVQGLQVKVTKLKQERILDAQRLEEFFTKNQQLREQQKVLHETIKVLEDRLRAGLCDRCAVTEEHMRKKQQEFENIRQQNLKLITELMNERNTLQEENKKLSEQLQQKIENDQQHQAAELECEEDVIPDSPITAFSFSGVNRLRRKENPHVRYIEQTHTKLEHSVCANEMRKVSKSSTHPQHNPNENEILVADTYDQSQSPMAKAHGTSSYTPDKSSFNLATVVAETLGLGVQEESETQGPMSPLGDELYHCLEGNHKKQPFESGSETPGTSESATPEGSPKRKVSSAEGAAKEEPKRRSARLSAKPPAKVEAKPKKAAAKDKSSDKKVQTKGKRGAKGKQAEVANQETKEDLPAENGETKTEESPASDEAGEKEAKSDSGSETPGTSESATPESYEQLAPQPCVGETLHSSLPRDSELFVPEEGSSEKESEDAPKTSPPTPGKHGLEQTGEEKVMVTVPDKNPPCPCCGTRVNSVLNLIEHLKVSHGKRGVCFRCAKCGKENSNYHSVVCHFKKCRGPETEKAPAGEWICEVCNRDFTTKIGLGQHKRLAHPAVRNQERIVASQPKETSNRGAHKRCWTKEEEELLIRLEAQFEGNKNINKLIAEHITTKTAKQISDKRRLLSRKPAEEPREEPGTCHHTRRAAASLRTEPEMSHHAQAEDRDNGPGRRPLPGRAAAGGRTMDEIRRHPDKGNGQQRPTKQKSEEQLQAYYKKTLEERLSAGALNTFPRAFKQVMEGRDIKLVINQTAQDCFGCLESISQIRTATRDKKDTVTREKHPKKPFQKWMKKRAIKKGNYLRFQRLFYLDRGKLAKIILDDIECLSCDIPLSEIYSVFKTRWETTGSFKSLGDFKTYGKADNTAFRELITAKEIEKNVQEMSKGSAPGPDGITLGDVVKMDPEFSRTMEIFNLWLTTGKIPDMVRGCRTVLIPKSSKPDRLKDINNWRPITIGSILLRLFSRIVTARLSKACPLNPRQRGFIRAAGCSENLKLLQTIIWSAKREHRPLGVVFVDIAKAFDTVSHQHIIHALQQREVDPHIVGLVSNMYENISTYITTKRNTHTDKIQIRVGVKQGDPMSPLLFNLAMDPLLCKLEESGKGYHRGQSSITAMAFADDLVLLSDSWENMNTNISILETFCNLTGLKTQGQKCHGFYIKPTKKSYTINDCAAWTINGTPLNMIDPGESEKYLGLQFDPWIGIARSGLSTKLDFWLQRIDQAPLKPLQKTDILKTYTIPRLIYIADHSEVKSALLETLDQKIRTAVKEWLHLPPCTCDAILYSSTRDGGLGITKLAGLIPSVQARRLHRIAQSSDDTMKCFMEKEKMEQLHKKLWIQAGGDRENIPSIWEAPPSSEPPNNVSTNSEWEAPTQKDKFPKPCNWRKNEFKKWTKLASQGRGIVNFERDKISNHWIQYYRRIPHRKLLTALQLRANVYPTREFLARGRQDQYIKACRHCDADNESCAHIIGNCPVTQDARIKRHNYICELLLEEAKKKDWVVFKEPHIRDSNKELYKPDLIFVKDGRALVVDVTVRYEAAKSSLEEAAAEKVRKYKHLETQVRHLTNAKDVTFVGFPLGARGKWHQDNFKLLTELGLSKSRQVKMAETFSTVALFSSVDIVHMFASRARKSMVM

SEQ ID NO: 1075 - protein, 1665 aa, synthetic construct
MAPKKKRKVNISGSSCGSPNSADTSSDFKDLWTKLKECHDREVQGLQVKVTKLKQERILDAQRLEEFFTKNQQLREQQKVLHETIKVLEDRLRAGLCDRCAVTEEHMRKKQQEFENIRQQNLKLITELMNERNTLQEENKKLSEQLQQKIENDQQHQAAELECEEDVIPDSPITAFSFSGVNRLRRKENPHVRYIEQTHTKLEHSVCANEMRKVSKSSTHPQHNPNENEILVADTYDQSQSPMAKAHGTSSYTPDKSSFNLATVVAETLGLGVQEESETQGPMSPLGDELYHCLEGNHKKQPFESGSETPGTSESATPEGSPKRKVSSAEGAAKEEPKRRSARLSAKPPAKVEAKPKKAAAKDKSSDKKVQTKGKRGAKGKQAEVANQETKEDLPAENGETKTEESPASDEAGEKEAKSDSGSETPGTSESATPESYEQLAPQPCVGETLHSSLPRDSELFVPEEGSSEKESEDAPKTSPPTPGKHGLEQTGEEKVMVTVPDKNPPCPCCGTRVNSVLNLIEHLKVSHGKRGVCFRCAKCGKENSNYHSVVCHFKKCRGPETEKAPAGEWICEVCNRDFTTKIGLGQHKRLAHPAVRNQERIVASQPKETSNRGAHKRCWTKEEEELLIRLEAQFEGNKNINKLIAEHITTKTAKQISDKRRLLSRKPAEEPREEPGTCHHTRRAAASLRTEPEMSHHAQAEDRDNGPGRRPLPGRAAAGGRTMDEIRRHPDKGNGQQRPTKQKSEEQLQAYYKKTLEERLSAGALNTFPRAFKQVMEGRDIKLVINQTAQDCFGCLESISQIRTATRDKKDTVTREKHPKKPFQKWMKKRAIKKGNYLRFQRLFYLDRGKLAKIILDDIECLSCDIPLSEIYSVFKTRWETTGSFKSLGDFKTYGKADNTAFRELITAKEIEKNVQEMSKGSAPGPDGITLGDVVKMDPEFSRTMEIFNLWLTTGKIPDMVRGCRTVLIPKSSKPDRLKDINNWRPITIGSILLRLFSRIVTARLSKACPLNPRQRGFIRAAGCSENLKLLQTIIWSAKREHRPLGVVFVDIAKAFDTVSHQHIIHALQQREVDPHIVGLVSNMYENISTYITTKRNTHTDKIQIRVGVKQGDPMSPLLFNLAMDPLLCKLEESGKGYHRGQSSITAMAFADDLVLLSDSWENMNTNISILETFCNLTGLKTQGQKCHGFYIKPTKKSYTINDCAAWTINGTPLNMIDPGESEKYLGLQFDPWIGIARSGLSTKLDFWLQRIDQAPLKPLQKTDILKTYTIPRLIYIADHSEVKSALLETLDQKIRTAVKEWLHLPPCTCDAILYSSTRDGGLGITKLAGLIPSVQARRLHRIAQSSDDTMKCFMEKEKMEQLHKKLWIQAGGDRENIPSIWEAPPSSEPPNNVSTNSEWEAPTQKDKFPKPCNWRKNEFKKWTKLASQGRGIVNFERDKISNHWIQYYRRIPHRKLLTALQLRANVYPTREFLARGRQDQYIKACRHCDADNESCAHIIGNCPVTQDARIKRHNYICELLLEEAKKKDWVVFKEPHIRDSNKELYKPDLIFVKDGRALVVDVTVRYEAAKSSLEEAAAEKVRKYKHLETEVRHLTNAKDVTFVGFPLGARGKWHQDNFKLLTELGLSKSRQVKLAETFSTVALFSSVDIVHMFASRARKSMVM

SEQ ID NO: 1076 - protein, 1665 aa, synthetic construct
MAPKKKRKVNISGSSCGSPNSADTSSDFKDLWTKLKECHDREVQGLQVKVTKLKQERILDAQRLEEFFTKNQQLREQQKVLHETIKVLEDRLRAGLCDRCAVTEEHMRKKQQEFENIRQQNLKLITELMNERNTLQEENKKLSEQLQQKIENDQQHQAAELECEEDVIPDSPITAFSFSGVNRLRRKENPHVRYIEQTHTKLEHSVCANEMRKVSKSSTHPQHNPNENEILVADTYDQSQSPMAKAHGTSSYTPDKSSFNLATVVAETLGLGVQEESETQGPMSPLGDELYHCLEGNHKKQPFESGSETPGTSESATPEGSPKRKVSSAEGAAKEEPKRRSARLSAKPPAKVEAKPKKAAAKDKSSDKKVQTKGKRGAKGKQAEVANQETKEDLPAENGETKTEESPASDEAGEKEAKSDSGSETPGTSESATPESYEQLAPQPCVGETLHSSLPRDSELFVPEEGSSEKESEDAPKTSPPTPGKHGLEQTGEEKVMVTVPDKNPPCPCCGTRVNSVLNLIEHLKVSHGKRGVCFRCAKCGKENSNYHSVVCHFKKCRGPETEKAPAGEWICEVCNRDFTTKIGLGQHKRLAHPAVRNQERIVASQPKETSNRGAHKRCWTKEEEELLIRLEAQFEGNKNINKLIAEHITTKTAKQISDKRRLLSRKPAEEPREEPGTCHHTRRAAASLRTEPEMSHHAQAEDRDNGPGRRPLPGRAAAGGRTMDEIRRHPDKGNGQQRPTKQKSEEQLQAYYKKTLEERLSAGALNTFPRAFKQVMEGRDIKLVINQTAQDCFGCLESISQIRTATRDKKDTVTREKHPKKPFQKWMKKRAIKKGNYLRFQRLFYLDRGKLAKIILDDIECLSCDIPLSEIYSVFKTRWETTGSFKSLGDFKTYGKADNTAFRELITAKEIEKNVQEMSKGSAPGPDGITLGDVVKMDPEFSRTMEIFNLWLTTGKIPDMVRGCRTVLIPKSSKPDRLKDINNWRPITIGSILLRLFSRIVTARLSKACPLNPRQRGFIRAAGCSENLKLLQTIIWSAKREHRPLGVVFVDIAKAFDTVSHQHIIHALQQREVDPHIVGLVSNMYENISTYITTKRNTHTDKIQIRVGVKQGDPMSPLLFNLAMDPLLCKLEESGKGYHRGQSSITAMAFADDLVLLSDSWENMNTNISILETFCNLTGLKTQGQKCHGFYIKPTKKSYTINDCAAWTINGTPLNMIDPGESEKYLGLQFDPWIGIARSGLSTKLDFWLQRIDQAPLKPLQKTDILKTYTIPRLIYIADHSEVKSALLETLDQKIRTAVKEWLHLPPCTCDAILYSSTRDGGLGITKLAGLIPSVQARRLHRIAQSSDDTMKCFMEKEKMEQLHKKLWIQAGGDRENIPSIWEAPPSSEPPNNVSTNSEWEAPTQKDKFPKPCNWRKNEFKKWTKLASQGRGIVNFERDKISNHWIQYYRRIPHRKLLTALQLRANVYPTREFLARGRQDQYIKACRHCDADNESCAHIIGNCPVTQDARIKRHNYICELLLEEAKKKDWVVFKEPHIRDSNKELYKPDLIFVKDGRALVVDVTVRYEAAKSSLEEAAAEKVRKYKHLETEVRHLTNAKDVTFVGFPLGARGKWHQDNFKLLTELGLSKSRQVKMAETFSTVALFSSVDIVHMFASRARRSMVM

SEQ ID NO: 1077 - protein, 1665 aa, synthetic construct
MAPKKKRKVNISGSSCGSPNSADTSSDFKDLWTKLKECHDREVQGLQVKVTKLKQERILDAQRLEEFFTKNQQLREQQKVLHETIKVLEDRLRAGLCDRCAVTEEHMRKKQQEFENIRQQNLKLITELMNERNTLQEENKKLSEQLQQKIENDQQHQAAELECEEDVIPDSPITAFSFSGVNRLRRKENPHVRYIEQTHTKLEHSVCANEMRKVSKSSTHPQHNPNENEILVADTYDQSQSPMAKAHGTSSYTPDKSSFNLATVVAETLGLGVQEESETQGPMSPLGDELYHCLEGNHKKQPFESGSETPGTSESATPEGSPKRKVSSAEGAAKEEPKRRSARLSAKPPAKVEAKPKKAAAKDKSSDKKVQTKGKRGAKGKQAEVANQETKEDLPAENGETKTEESPASDEAGEKEAKSDSGSETPGTSESATPESYEQLAPQPCVGETLHSSLPRDSELFVPEEGSSEKESEDAPKTSPPTPGKHGLEQTGEEKVMVTVPDKNPPCPCCGTRVNSVLNLIEHLKVSHGKRGVCFRCAKCGKENSNYHSVVCHFKKCRGPETEKAPAGEWICEVCNRDFTTKIGLGQHKRLAHPAVRNQERIVASQPKETSNRGAHKRCWTKEEEELLIRLEAQFEGNKNINKLIAEHITTKTAKQISDKRRLLSRKPAEEPRMEPGTCHHTRRAAASLRTEPEMSHHAQAEDRDNGPGRRPLPGRAAAGGRTMDEIRRHPDKGNGQQRPTKQKSEEQLQAYYKKTLEERLSAGALNTFPRAFKQVMEGRDIKLVINQTAQDCFGCLESISQIRTATRDKKDTVTREKHPKKPFQKWMKKRAIKKGNYLRFQRLFHLDRGKLAKIILDDIECLSCDIPLSEIYSVFKTRWETTGSFKSLGDFKTYGKADNTAFRELITAKEIEKNVQEMSKGSAPGPDGITLGDVVKMDPEFSRTMEIFNLWLTTGKIPDMVRGCRTVLIPKSSKPDRLKDINNWRPITIGSILLRLFSRIVTARLSKACPLNPRQRGFIRAAGCSENLKLLQTIIWSAKREHRPLGVVFVDIAKAFDTVSHQHIIHALQQREVDPHIVGLVSNMYENISTYITTKRNTHTDKIQIRVGVKQGDPMSPLLFNLAMDPLLCKLEESGKGYHRGQSSITAMAFADDLVLLSDSWENMNTNISILETFCNLTGLKTQGQKCHGFYIKPTKKSYTINDCAAWTINGTPLNMIDPGESEKYLGLQFDPWIGIARSGLSTKLDFWLQRIDQAPLKPLQKLDILKTYTIPRLIYIADHSEVKSALLETLDQKIRTAVKEWLHLPPCTCDAILYSSTRDGGLGITKLAGLIPSVQARRLHRIAQSSDDTMKCFMEKEKMEQLHKKLWIQAGGDRENIPSIWEAPPSSEPPNNVSTNSEWEAPTQKDKFPKPCNWRKNEFKKWTKLASQGRGIVNFERDKISNHWIQYYRRIPHRKLLTALQLRANVYPTREFLARGRQDQYIKACRHCDADNESCAHIIGNCPVTQDARIKRHNYICELLLEEAKKKDWVVFKEPHIRDSNKELYKPDLIFVKDGRALVVDVTVRYEAAKSSLEEAAAEKVRKYKHLETEVRHLTNAKDVTFVGFPLGARGKWHQDNFKLLTELGLSKSRQVKMAETFSTVALFSSVDIVHMFASRARKSMVM

SEQ ID NO: 1078 - protein, 1971 aa, synthetic construct
MAPKKKRKVDRKTRLSEPPTLALRLKPYKTAIQQLRSVIRALKENTTVTFLPTPSLILQTVRSHCVSKITFNSSCLYITDKSFQPKTINNSTPLLGNFMYLTSSKDLTKFYVQDISDLSAKISMCAPDFNMEFSSACVHGQDIVRESENSAVHVDLDFGVVADLLKWIGPHTRVKRNVKKAPCPTGTVQILVHAGPPAIKFILTNGSELEFTANNRVSFHGVKNMRINVQLKNFYQTLLNCAVTKLPCTLRIVTEHDTLLYVASRNGLFAVENFLTEEPFQRGDPFDKNYVGNSGKSRSGSETPGTSESATPEGSNISGSSCGSPNSADTSSDFKDLWTKLKECHDREVQGLQVKVTKLKQERILDAQRLEEFFTKNQQLREQQKVLHETIKVLEDRLRAGLCDRCAVTEEHMRKKQQEFENIRQQNLKLITELMNERNTLQEENKKLSEQLQQKIENDQQHQAAELECEEDVIPDSPITAFSFSGVNRLRRKENPHVRYIEQTHTKLEHSVCANEMRKVSKSSTHPQHNPNENEILVADTYDQSQSPMAKAHGTSSYTPDKSSFNLATVVAETLGLGVQEESETQGPMSPLGDELYHCLEGNHKKQPFESGSETPGTSESATPEGSPKRKVSSAEGAAKEEPKRRSARLSAKPPAKVEAKPKKAAAKDKSSDKKVQTKGKRGAKGKQAEVANQETKEDLPAENGETKTEESPASDEAGEKEAKSDSGSETPGTSESATPESYEQLAPQPCVGETLHSSLPRDSELFVPEEGSSEKESEDAPKTSPPTPGKHGLEQTGEEKVMVTVPDKNPPCPCCGTRVNSVLNLIEHLKVSHGKRGVCFRCAKCGKENSNYHSVVCHFKKCRGPETEKAPAGEWICEVCNRDFTTKIGLGQHKRLAHPAVRNQERIVASQPKETSNRGAHKRCWTKEEEELLIRLEAQFEGNKNINKLIAEHITTKTAKQISDKRRLLSRKPAEEPRMEPGTCHHTRRAAASLRTEPEMSHHAQAEDRDNGPGRRPLPGRAAAGGRTMDEIRRHPDKGNGQQRPTKQKSEEQLQAYYKKTLEERLSAGALNTFPRAFKQVMEGRDIKLVINQTAQDCFGCLESISQIRTATRDKKDTVTREKHPKKPFQKWMKKRAIKKGNYLRFQRLFYLDRGKLAKIILDDIECLSCDIPLSEIYSVFKTRWETTGSFKSLGDFKTYGKADNTAFRELITAKEIEKNVQEMSKGSAPGPDGITLGDVVKMDPEFSRTMEIFNLWLTTGKIPDMVRGCRTVLIPKSSKPDRLKDINNWRPITIGSILLRLFSRIVTARLSKACPLNPRQRGFIRAAGCSENLKLLQTIIWSAKREHRPLGVVFVDIAKAFDTVSHQHIIHALQQREVDPHIVGLVSNMYENISTYITTKRNTHTDKIQIRVGVKQGDPMSPLLFNLAMDPLLCKLEESGKGYHRGQSSITAMAFADDLVLLSDSWENMNTNISILETFCNLTGLKTQGQKCHGFYIKPTKKSYTINDCAAWTINGTPLNMIDPGESEKYLGLQFDPWIGIARSGLSTKLDFWLQRIDQAPLKPLQKLDILKTYTIPRLIYIADHSEVKSALLETLDQKIRTAVKEWLHLPPCTCDAILYSSTRDGGLGITKLAGLIPSVQARRLHRIAQSSDDTMKCFMEKEKMEQLHKKLWIQAGGDRENIPSIWEAPPSSEPPNNVSTNSEWEAPTQKDKFPKPCNWRKNEFKKWTKLASQGRGIVNFERDKISNHWIQYYRRIPHRKLLTALQLRANVYPTREFLARGRQDQYIKACRHCDADNESCAHIIGNCPVTQDARIKRHNYICELLLEEAKKKDWVVFKEPHIRDSNKELYKPDLIFVKDGRALVVDVTVRYEAAKSSLEEAAAEKVRKYKHLETEVRHLTNAKDVTFVGFPLGARGKWHQDNFKLLTELGLSKSRQVKMAETFSTVALFSSVDIVHMFASRARKSMVM

SEQ ID NO: 1079 - protein, 1665 aa, synthetic construct
MAPKKKRKVNISGSSCGSPNSADTSSDFKDLWTKLKECHDREVQGLQVKVTKLKQERILDAQRLEEFFTKNQQLREQQKVLHETIKVLEDRLRAGLCDRCAVTEEHMRKKQQEFENIRQQNLKLITELMNERNTLQEENKKLSEQLQQKIENDQQHQAAELECEEDVIPDSPITAFSFSGVNRLRRKENPHVRYIEQTHTKLEHSVCANEMRKVSKSSTHPQHNPNENEILVADTYDQSQSPMAKAHGTSSYTPDKSSFNLATVVAETLGLGVQEESETQGPMSPLGDELYHCLEGNHKKQPFESGSETPGTSESATPEGSPKRKVSSAEGAAKEEPKRRSARLSAKPPAKVEAKPKKAAAKDKSSDKKVQTKGKRGAKGKQAEVANQETKEDLPAENGETKTEESPASDEAGEKEAKSDSGSETPGTSESATPESYEQLAPQPCVGETLHSSLPRDSELFVPEEGSSEKESEDAPKTSPPTPGKHGLEQTGEEKVMVTVPDKNPPCPCCGTRVNSVLNLIEHLKVSHGKRGVCFRCAKCGKENSNYHSVVCHFKKCRGPETEKAPAGEWICEVCNRDFTTKIGLGQHKRLAHPAVRNQERIVASQPKETSNRGAHKRCWTKEEEELLIRLEAQFEGNKNINKLIAEHITTKTAKQISDKRRLLSRKPAEEPRMEPGTCHHTRRAAASLRTEPEMSHHAQAEDRDNGPGRRPLPGRAAAGGRTMDEIRRHPDKGNGQQRPTKQKSEEQLQAYYKKTLEERLSAGALNTFPRAFKQVMEGRDIKLVINQTAQDCFGCLESISQIRTATRDKKDTVTREKHPKKPFQKWMKKRAIKKGNYLRFQRLFYLDRGKLAKIILDDIECLSCDIPLSEIYSVFKTRWETTGSFKSLGDFKTYGKADNTAFRELITAKEIEKNVQEMSKGSAPGPDGITLGDVVKMDPEFSRTMEIFNLWLTTGKIPDMVRGCRTVLIPKSSDPDRLKDINNWRPITIGSILLRLFSRIVTARLSKACPLNPRQRGFIRAAGCSENLKLLQTIIWSAKREHRPLGVVFVDIAKAFDTVSHQHIIHALQQREVDPHIVGLVSNMYENISTYITTKRNTHTDKIQIRVGVKQGDPMSPLLFNLAMDPLLCKLEESGKGYHRGQSSITAMAFADDLVLLSDSWENMNTNISILETFCNLTGLKTQGQKCHGFYIKPTKKSYTINDCAAWTINGTPLNMIDPGESEKYLGLQFDPWIGIARSGLSTKLDFWLQRIDQAPLKPLQKLDILKTYTIPRLIYIADHSEVKSALLETLDQKIRTAVKEWLHLPPCTCDAILYSSTRDGGLGITKLAGLIPSVQARRLHRIAQSSDDTMKCFMEKEKMEQLHKKLWIQAGGDRENIPSIWEAPPSSEPPNNVSTNSEWEAPTQKDKFPKPCNWRKNEFKKWTKLASQGRGIVNFERDKISNHWIQYYRRIPHRKLLTALQLRANVYPTREFLARGRQDQYIKACRHCDADNESCAHIIGNCPVTQDARIKRHNYICELLLEEAKKKDWVVFKEPHIRDSNKELYKPDLIFVKDGRALVVDVTVRYEAAKSSLEEAAAEKVRKYKHLETEVRHLTNAKDVTFVGFPLGARGKWHQDNFKLLTELGLSKSRQVKMAETFSTVALFSSVDIVHMFASRARKSMVM

SEQ ID NO: 1080 - protein, 1665 aa, synthetic construct
MAPKKKRKVNISGSSCGSPNSADTSSDFKDLWTKLKECHDREVQGLQVKVTKLKQERILDAQRLEEFFTKNQQLREQQKVLHETIKVLEDRLRAGLCDRCAVTEEHMRKKQQEFENIRQQNLKLITELMNERNTLQEENKKLSEQLQQKIENDQQHQAAELECEEDVIPDSPITAFSFSGVNRLRRKENPHVRYIEQTHTKLEHSVCANEMRKVSKSSTHPQHNPNENEILVADTYDQSQSPMAKAHGTSSYTPDKSSFNLATVVAETLGLGVQEESETQGPMSPLGDELYHCLEGNHKKQPFESGSETPGTSESATPEGSPKRKVSSAEGAAKEEPKRRSARLSAKPPAKVEAKPKKAAAKDKSSDKKVQTKGKRGAKGKQAEVANQETKEDLPAENGETKTEESPASDEAGEKEAKSDSGSETPGTSESATPESYEQLAPQPCVGETLHSSLPRDSELFVPEEGSSEKESEDAPKTSPPTPGKHGLRQTGEEKVMVTVPDKNPPCPCCGTRVNSVLNLIEHLKVSHGKRGVCFRCAKCGKENSNYHSVVCHFKKCRGPETEKAPAGEWICEVCNRDFTTKIGLGQHKRLAHPAVRNQERIVASQPKETSNRGAHKRCWTKEEEELLIRLEAQFEGNKNINKLIAEHITTKTAKQISDKRRLLSRKPAEEPRMEPGTCHHTRRAAASLRTEPEMSHHAQAEDRDNGPGRRPLPGRAAAGGRTMDEIRRHPDKGNGQQRPTKQKSEEQLQAYYKKTLEERLSAGALNTFPRAFKQVMEGRDIKLVINQTAQDCFGCLESISQIRTATRDKKDTVTREKHPKKPFQKWMKKRAIKKGNYLRFQRLFYLDRGKLAKIILDDIECLSCDIPLSEIYSVFKTRWETTGSFKSLGDFKTYGKADNTAFRELITAKEIEKNVQEMSKGSAPGPDGITLGDVVKMDPEFSRTMEIFNLWLTTGKIPDMVRGCRTVLIPKSSKPDRLKDINNWRPITIGSILLRLFSRIVTARLSKACPLNPRQRGFIRAAGCSENLKLLQTIIWSAKREHRPLGVVFVDIAKAFDTVSHQHIIHALQQREVDPHIVGLVSNMYENISTYITTKRNTHTDKIQIRVGVKQGDPMSPLLFNLAMDPLLCKLEESGKGYHRGQSSITAMAFADDLVLLSDSWENMNTNISILETFCNLTGLKTQGQKCHGFYIKPTKKSYTINDCAAWTINGTPLNMIDPGESEKYLGLQFDPWIGIARSGLSTKLDFWLQRIDQAPLKPLQKLDILKTYTIPRLIYIADHSEVKSALLETLDQKIRTAVKEWLHLPPCTCDAILYSSTRDGGLGITKLAGLIPSVQARRLHRIAQSSDDTMKCFMEKEKMEQLHKKLWIQAGGDRENIPSIWEAPPSSEPPNNVSTNSEWEAPTQKDKFPKPCNWRKNEFKKWTKLASQGRGIVNFERDKISNHWIQYYRRIPHRKLLTALQLRANVYPTREFLARGRQDQYIKACRHCDADNESCAHIIGNCPVTQDARIKRHNYICELLLEEAKKKDWVVFKEPHIRDSNKELYKPDLIFVKDGRALVVDVTVRYEAAKSSLEEAAAEKVRKYKHLETEVRHLTNAKDVTFVGFPLGARGKWHQDNFKLLTELGLSKSRQVKMAETFSTVALFSSVDIVHMFASRARKSMVM

SEQ ID NO: 1081 - protein, 1665 aa, synthetic construct
MAPKKKRKVNISGSSCGSPNSADTSSDFKDLWTKLKECHDREVQGLQVKVTKLKQERILDAQRLEEFFTKNQQLREQQKVLHETIKVLEDRLRAGLCDRCAVTEEHMRKKQQEFENIRQQNLKLITELMNERNTLQEENKKLSEQLQQKIENDQQHQAAELECEEDVIPDSPITAFSFSGVNRLRRKENPHVRYIEQTHTKLEHSVCANEMRKVSKSSTHPQHNPNENEILVADTYDQSQSPMAKAHGTSSYTPDKSSFNLATVVAETLGLGVQEESETQGPMSPLGDELYHCLEGNHKKQPFESGSETPGTSESATPEGSPKRKVSSAEGAAKEEPKRRSARLSAKPPAKVEAKPKKAAAKDKSSDKKVQTKGKRGAKGKQAEVANQETKEDLPAENGETKTEESPASDEAGEKEAKSDSGSETPGTSESATPESYEQLAPQPCVGETLHSSLPRDSELFVPEEGSSEKESEDAPKTSPPTPGKHGLEQTGEEKVMVTVPDKNPPCPCCGTRVNSVLNLIEHLKVSHGKRGVCFRCAKCGKENSNYHSVVCHFKKCRGPETEKAPAGEWICEVCNRDFTTKIGLGQHKRLAHPAVRNQERIVASQPKETSNRGAHKRCWTKEEEELLIRLEAQFEGNKNINKLIAEHITTKTAKQISDKRRLLSRKPAEEPRMEPGTCHHTRRAAASLRTEPEMSHHAQAEDRDNGPGRRPLPGRAAAGGRTMDEIRRHPDKGNGQQRPTKQKSEEQLQAYYKKTLEERLSAGALNTFPRAFKQVMEGRDIKLVINQTAQDCFGCLESISQIRTATRDKKYTVTREKHPKKPFQKWMKKRAIKKGNYLRFQRLFYLDRGKLAKIILDDIECLSCDIPLSEIYSVFKTRWETTGSFKSLGDFKTYGKADNTAFRELITAKEIEKNVQEMSKGSAPGPDGITLGDVVKMDPEFSRTMEIFNLWLTTGKIPDMVRGCRTVLIPKSSKPDRLKDINNWRPITIGSILLRLFSRIVTARLSKACPLNPRQRGFIRAAGCSENLKLLQTIIWSAKREHRPLGVVFVDIAKAFDTVSHQHIIHALQQREVDPHIVGLVSNMYENISTYITTKRNTHTDKIQIRVGVKQGDPMSPLLFNLAMDPLLCKLEESGKGYHRGQSSITAMAFADDLVLLSDSWENMNTNISILETFCNLTGLKTQGQKCHGFYIKPTKKSYTINDCAAWTINGTPLNMIDPGESEKYLGLQFDPWIGIARSGLSTKLDFWLQRIDQAPLKPLQKLDILKTYTIPRLIYIADHSEVKSALLETLDQKIRTAVKEWLHLPPCTCDAILYSSTRDGGLGITKLAGLIPSVQARRLHRIAQSSDDTMKCFMEKEKMEQLHKKLWIQAGGDRENIPSIWEAPPSSEPPNNVSTNSEWEAPTQKDKFPKPCNWRKNEFKKWTKLASQGRGIVNFERDKISNHWIQYYRRIPHRKLLTALQLRANVYPTREFLARGRQDQYIKACRHCDADNESCAHIIGNCPVTQDARIKRHNYICELLLEEAKKKDWVVFKEPHIRDSNKELYKPDLIFVKDGRALVVDVTVRYEAAKSSLEEAAAEKVRKYKHLETEVRHLTNAKDVTFVGFPLGARGKWHQDNFKLLTELGLSKSRQVKMAETFSTVALFSSVDIVHMFASRARKSMVM

SEQ ID NO: 1082 - protein, 1665 aa, synthetic construct
MAPKKKRKVNISGSSCGSPNSADTSSDFKDLWTKLKECHDREVQGLQVKVTKLKQERILDAQRLEEFFTKNQQLREQQKVLHETIKVLEDRLRAGLCDRCAVTEEHMRKKQQEFENIRQQNLKLITELMNERNTLQEENKKLSEQLQQKIENDQQHQAAELECEEDVIPDSPITAFSFSGVNRLRRKENPHVRYIEQTHTKLEHSVCANEMRKVSKSSTHPQHNPNENEILVADTYDQSQSPMAKAHGTSSYTPDKSSFNLATVVAETLGLGVQEESETQGPMSPLGDELYHCLEGNHKKQPFESGSETPGTSESATPEGSPKRKVSSAEGAAKEEPKRRSARLSAKPPAKVEAKPKKAAAKDKSSDKKVQTKGKRGAKGKQAEVANQETKEDLPAENGETKTEESPASDEAGEKEAKSDSGSETPGTSESATPESYEQLAPQPCVGETLHSSLPRDSELFVPEEGSSEKESEDAPKTSPPTPGKHGLEQTGEEKVMVTVPDKNPPCPCCGTRVNSVLNLIEHLKVSHGKRGVCFRCAKCGKENSNYHSVVCHFKKCRGPETEKAPAGEWICEVCNRDFTTKIGLGQHKRLAHPAVRNQERIVASQPKETSNRGAHKRCWTKEEEELLIRLEAQFEGNKNINKLIAEHITTKTAKQISDKRRLLSRKPAEEPRMEPGTCHHTRRAAASLRTEPEMSHHAQAEDRDNGPGRRPLPGRAAAGGRTMDEIRRHPDKGNGQQRPTKQKSEEQLQAYYKKTLEERLSAGALNTFPRAFKQVMEGRDIKLVINQTAQDCFGCLESISQIRTATRDKKDTVTREKHPKKPFQKWMKKRAIKKGNYLRFQRLFYLDRGKLAKIILDDIECLSCDIPLSEIYSVFKTRWETTGSFKSLGDFKTYGKADNTAFRELITAKEIEKNVQEMSKGSAPGPDGITLGDVVKMDPEFSRTMEIFNLWLTTGKIPDMVRGCRTVLIPKSSKPDRLKDINNWRPITIGSILLRLFSRIVTARLSKACPLNPRQRGFIRAAGCSENLKLLQTIIWSAKREHRPLGVVFVDIAKAFDTVSHQHIIHALQQREVDPHIVGLVSNMYENISTYITTKRNTHTDKIQIRVGVKQGDPMSPLLFNLAMDPLLCKLEESGKGYHRGQSSITAMAFADDLVLLSDSWENMNTNIKILETFCNLTGLKTQGQKCHGFYIKPTKKSYTINDCAAWTINGTPLNMIDPGESEKYLGLQFDPWIGIARSGLSTKLDFWLQRIDQAPLKPLQKLDILKTYTIPRLIYIADHSEVKSALLETLDQKIRTAVKEWLHLPPCTCDAILYSSTRDGGLGITKLAGLIPSVQARRLHRIAQSSDDTMKCFMEKEKMEQLHKKLWIQAGGDRENIPSIWEAPPSSEPPNNVSTNSEWEAPTQKDKFPKPCNWRKNEFKKWTKLASQGRGIVNFERDKISNHWIQYYRRIPHRKLLTALQLRANVYPTREFLARGRQDQYIKACRHCDADNESCAHIIGNCPVTQDARIKRHNYICELLLEEAKKKDWVVFKEPHIRDSNKELYKPDLIFVKDGRALVVDVTVRYEAAKSSLEEAAAEKVRKYKHLETEVRHLTNAKDVTFVGFPLGARGKWHQDNFKLLTELGLSKSRQVKMAETFSTVALFSSVDIVHMFASRARKSMVM

SEQ ID NO: 1083 - protein, 1665 aa, synthetic construct
MAPKKKRKVNISGSSCGSPNSADTSSDFKDLWTKLKECHDREVQGLQVKVTKLKQERILDAQRLEEFFTKNQQLREQQKVLHETIKVLEDRLRAGLCDRCAVTEEHMRKKQQEFENIRQQNLKLITELMNERNTLQEENKKLSEQLQQKIENDQQHQAAELECEEDVIPDSPITAFSFSGVNRLRRKENPHVRYIEQTHTKLEHSVCANEMRKVSKSSTHPQHNPNENEILVADTYDQSQSPMAKAHGTSSYTPDKSSFNLATVVAETLGLGVQEESETQGPMSPLGDELYHCLEGNHKKQPFESGSETPGTSESATPEGSPKRKVSSAEGAAKEEPKRRSARLSAKPPAKVEAKPKKAAAKDKSSDKKVQTKGKRGAKGKQAEVANQETKEDLPAENGETKTEESPASDEAGEKEAKSDSGSETPGTSESATPESYEQLAPQPCVGETLHSSLPRDSELFVPEEGSSEKESEDAPKTSPPTPGKHGLEQTGEEKVMVTVPDKNPPCPCCGTRVNSVLNLIEHLKVSHGKRGVCFRCAKCGKENSNYHSVVCHFKKCRGPETEKAPAGEWICEVCNRDFTTKIGLGQHKRLAHPAVRNQERIVASQPKETSNRGAHKRCWTKEEEELLIRLEAQFEGNKNINKLIAEHITTKTAKQISDKRRLLSRKPAEEPRMEPGTCHHTRRAAASLRTEPEMSHHAQAEDRDNGPGRRPLPGRAAAGGRTMDEIRRHPDKGNGQQRPTKQKSEEQLQAYYKKTLEERLSAGALNTFPRAFKQVMEGRDIKLVINQTAQDCFGCLESISQIRTATRDKKDTVTREKHPKKPFQKWMKKRAIKKGNYLRFQRLFYLDRGKLAKIILDDIECLSCDIPLSEIYSVFKTRWETTGSFKSLGDFKTYGKADNTAFRELITAKEIEKNVQEMSKGSAPGPDGITLGDVVKMDPEFSRTMEIFNLWLTTGKIPDMVRGCRTVLIPKSSKPDRLKDINNWRPITIGSILLRLFSRIVTARLSKACPLNPRQRGFIRAAGCSENLKLLQTIIWSAKREHRPLGVVFVDIAKAFDTVSHQHIIHALQQREVDPHIVGLVSNMYENISTYITTKRNTHTDKIQIRVGVKQGDPMSPLLFNLAMDPLLCKLEESGKGYHRGQSSITAMAFADDLVLLSDSWENMNTNISILETFCNLTGLKTQGQKCHGFYIKPTKKSYTINDCAAWTINGTPLNMIDPGESEKYLGLQFDPWIGIARSGLSTKLDFWLQRIDQAPLKPLQKLDILKTYTIPRLIYIADHSEVKSARLETLDQKIRTAVKEWLHLPPCTCDAILYSSTRDGGLGITKLAGLIPSVQARRLHRIAQSSDDTMKCFMEKEKMEQLHKKLWIQAGGDRENIPSIWEAPPSSEPPNNVSTNSEWEAPTQKDKFPKPCNWRKNEFKKWTKLASQGRGIVNFERDKISNHWIQYYRRIPHRKLLTALQLRANVYPTREFLARGRQDQYIKACRHCDADNESCAHIIGNCPVTQDARIKRHNYICELLLEEAKKKDWVVFKEPHIRDSNKELYKPDLIFVKDGRALVVDVTVRYEAAKSSLEEAAAEKVRKYKHLETEVRHLTNAKDVTFVGFPLGARGKWHQDNFKLLTELGLSKSRQVKMAETFSTVALFSSVDIVHMFASRARKSMVM

SEQ ID NO: 1084 - protein, 1665 aa, synthetic construct
MAPKKKRKVNISGSSCGSPNSADTSSDFKDLWTKLKECHDREVQGLQVKVTKLKQERILDAQRLEEFFTKNQQLREQQKVLHETIKVLEDRLRAGLCDRCAVTEEHMRKKQQEFENIRQQNLKLITELMNERNTLQEENKKLSEQLQQKIENDQQHQAAELECEEDVIPDSPITAFSFSGVNRLRRKENPHVRYIEQTHTKLEHSVCANEMRKVSKSSTHPQHNPNENEILVADTYDQSQSPMAKAHGTSSYTPDKSSFNLATVVAETLGLGVQEESETQGPMSPLGDELYHCLEGNHKKQPFESGSETPGTSESATPEGSPKRKVSSAEGAAKEEPKRRSARLSAKPPAKVEAKPKKAAAKDKSSDKKVQTKGKRGAKGKQAEVANQETKEDLPAENGETKTEESPASDEAGEKEAKSDSGSETPGTSESATPESYEQLAPQPCVGETLHSSLPRDSELFVPEEGSSEKESEDAPKTSPPTPGKHGLRQTGEEKVMVTVPDKNPPCPCCGTRVNSVLNLIEHLKVSHGKRGVCFRCAKCGKENSNYHSVVCHFKKCRGPETEKAPAGEWICEVCNRDFTTKIGLGQHKRLAHPAVRNQERIVASQPKETSNRGAHKRCWTKEEEELLIRLEAQFEGNKNINKLIAEHITTKTAKQISDKRRLLSRKPAEEPRMEPGTCHHTRRAAASLRTEPEMSHHAQAEDRDNGPGRRPLPGRAAAGGRTMDEIRRHPDKGNGQQRPTKQKSEEQLQAYYKKTLEERLSAGALNTFPRAFKQVMEGRDIKLVINQTAQDCFGCLESISQIRTATRDKKDTVTREKHPKKPFQKWMKKRAIKKGNYLRFQRLFYLDRGKLAKIILDDIECLSCDIPLSEIYSVFKTRWETTGSFKSLGDFKTYGKADNTAFRELITAKEIEKNVQEMSKGSAPGPDGITLGDVVKMDPEFSRTMEIFNLWLTTGKIPDMVRGCRTVLIPKSSDPDRLKDINNWRPITIGSILLRLFSRIVTARLSKACPLNPRQRGFIRAAGCSENLKLLQTIIWSAKREHRPLGVVFVDIAKAFDTVSHQHIIHALQQREVDPHIVGLVSNMYENISTYITTKRNTHTDKIQIRVGVKQGDPMSPLLFNLAMDPLLCKLEESGKGYHRGQSSITAMAFADDLVLLSDSWENMNTNISILETFCNLTGLKTQGQKCHGFYIKPTKKSYTINDCAAWTINGTPLNMIDPGESEKYLGLQFDPWIGIARSGLSTKLDFWLQRIDQAPLKPLQKLDILKTYTIPRLIYIADHSEVKSALLETLDQKIRTAVKEWLHLPPCTCDAILYSSTRDGGLGITKLAGLIPSVQARRLHRIAQSSDDTMKCFMEKEKMEQLHKKLWIQAGGDRENIPSIWEAPPSSEPPNNVSTNSEWEAPTQKDKFPKPCNWRKNEFKKWTKLASQGRGIVNFERDKISNHWIQYYRRIPHRKLLTALQLRANVYPTREFLARGRQDQYIKACRHCDADNESCAHIIGNCPVTQDARIKRHNYICELLLEEAKKKDWVVFKEPHIRDSNKELYKPDLIFVKDGRALVVDVTVRYEAAKSSLEEAAAEKVRKYKHLETEVRHLTNAKDVTFVGFPLGARGKWHQDNFKLLTELGLSKSRQVKMAETFSTVALFSSVDIVHMFASRARKSMVM

SEQ ID NO: 1085 - protein, 1665 aa, synthetic construct
MAPKKKRKVNISGSSCGSPNSADTSSDFKDLWTKLKECHDREVQGLQVKVTKLKQERILDAQRLEEFFTKNQQLREQQKVLHETIKVLEDRLRAGLCDRCAVTEEHMRKKQQEFENIRQQNLKLITELMNERNTLQEENKKLSEQLQQKIENDQQHQAAELECEEDVIPDSPITAFSFSGVNRLRRKENPHVRYIEQTHTKLEHSVCANEMRKVSKSSTHPQHNPNENEILVADTYDQSQSPMAKAHGTSSYTPDKSSFNLATVVAETLGLGVQEESETQGPMSPLGDELYHCLEGNHKKQPFESGSETPGTSESATPEGSPKRKVSSAEGAAKEEPKRRSARLSAKPPAKVEAKPKKAAAKDKSSDKKVQTKGKRGAKGKQAEVANQETKEDLPAENGETKTEESPASDEAGEKEAKSDSGSETPGTSESATPESYEQLAPQPCVGETLHSSLPRDSELFVPEEGSSEKESEDAPKTSPPTPGKHGLRQTGEEKVMVTVPDKNPPCPCCGTRVNSVLNLIEHLKVSHGKRGVCFRCAKCGKERSNYHSVVCHFKKCRGPETEKAPAGEWICEVCNRDFTTKIGLGQHKRLAHPAVRNQERIVASQPKETSNRGAHKRCWTKEEEELLIRLEAQFEGNKNINKLIAEHITTKTAKQISDKRRLLSRKPAEEPRMEPGTCHHTRRAAASLRTEPEMSHHAQAEDRDNGPGRRPLPGRAAAGGRTMDEIRRHPDKGNGQQRPTKQKSEEQLQAYYKKTLEERLSAGALNTFPRAFKQVMEGRDIKLVINQTAQDCFGCLESISQIRTATRDKKDTVTREKHPKKPFQKWMKKRAIKKGNYLRFQRLFYLDRGKLAKIILDDIECLSCDIPLSEIYSVFKTRWETTGSFKSLGDFKTYGKADNTAFRELITAKEIEKNVQEMSKGSAPGPDGITLGDVVKMDPEFSRTMEIFNLWLTTGKIPDMVRGCRTVLIPKSSDPDRLKDINNWRPITIGSILLRLFSRIVTARLSKACPLNPRQRGFIRAAGCSENLKLLQTIIWSAKREHRPLGVVFVDIAKAFDTVSHQHIIHALQQREVDPHIVGLVSNMYENISTYITTKRNTHTDKIQIRVGVKQGDPMSPLLFNLAMDPLLCKLEESGKGYHRGQSSITAMAFADDLVLLSDSWENMNTNISILETFCNLTGLKTQGQKCHGFYIKPTKKSYTINDCAAWTINGTPLNMIDPGESEKYLGLQFDPWIGIARSGLSTKLDFWLQRIDQAPLKPLQKLDILKTYTIPRLIYIADHSEVKSALLETLDQKIRTAVKEWLHLPPCTCDAILYSSTRDGGLGITKLAGLIPSVQARRLHRIAQSSDDTMKCFMEKEKMEQLHKKLWIQAGGDRENIPSIWEAPPSSEPPNNVSTNSEWEAPTQKDKFPKPCNWRKNEFKKWTKLASQGRGIVNFERDKISNHWIQYYRRIPHRKLLTALQLRANVYPTREFLARGRQDQYIKACRHCDADNESCAHIIGNCPVTQDARIKRHNYICELLLEEAKKKDWVVFKEPHIRDSNKELYKPDLIFVKDGRALVVDVTVRYEAAKSSLEEAAAEKVRKYKHLETEVRHLTNAKDVTFVGFPLGARGKWHQDNFKLLTELGLSKSRQVKMAETFSTVALFSSVDIVHMFASRARKSMVM

SEQ ID NO: 1086 - protein, 1665 aa, synthetic construct
MAPKKKRKVNISGSSCGSPNSADTSSDFKDLWTKLKECHDREVQGLQVKVTKLKQERILDAQRLEEFFTKNQQLREQQKVLHETIKVLEDRLRAGLCDRCAVTEEHMRKKQQEFENIRQQNLKLITELMNERNTLQEENKKLSEQLQQKIENDQQHQAAELECEEDVIPDSPITAFSFSGVNRLRRKENPHVRYIEQTHTKLEHSVCANEMRKVSKSSTHPQHNPNENEILVADTYDQSQSPMAKAHGTSSYTPDKSSFNLATVVAETLGLGVQEESETQGPMSPLGDELYHCLEGNHKKQPFESGSETPGTSESATPEGSPKRKVSSAEGAAKEEPKRRSARLSAKPPAKVEAKPKKAAAKDKSSDKKVQTKGKRGAKGKQAEVANQETKEDLPAENGETKTEESPASDEAGEKEAKSDSGSETPGTSESATPESYEQLAPQPCVGETLHSSLPRDSELFVPEEGSSEKESEDAPKTSPPTPGKHGLEQTGEEKVMVTVPDKNPPCPCCGTRVNSVLNLIEHLKVSHGKRGVCFRCAKCGKENSNYHSVVCHFKKCRGPETEKAPAGEWICEVCNRDFTTKIGLGQHKRLAHPAVRNQERIVASQPKETSNRGAHKRCWTKEEEELLIRLEAQFEGNKNINKLIAEHITTKTAKQISDKRRLLSRKPAEEPRMEPGTCHHTRRAAASLRTEPEMSHHAQAEDRDNGPGRRPLPGRAAAGGRTMDEIRRHPDKGNGQQRPTKQKSEEQLQAYYKKTLEERLSAGALNTFPRAFKQVMEGRDIKLVINQTAQDCFGCLESISQIRTATRDKKDTVTREKHPKKPFQKWMKKRAIKKGNYLRFQRLFYLDRGKLAKIILDDIECLSCDIPLSEIYSVFKTRWETTGSFKSLGDFKTYGKADNTAFRELITAKEIEKNVQEMSKGSAPGPDGITLGDVVKMDPEFSLTMEIFNLWLTTGKIPDMVRGCRTVLIPKSSKPDRLKDINNWRPITIGSILLRLFSRIVTARLSKACPLNPRQRGFIRAAGCSENLKLLQTIIWSAKREHRPLGVVFVDIAKAFDTVSHQHIIHALQQREVDPHIVGLVSNMYENISTYITTKRNTHTDKIQIRVGVKQGDPMSPLLFNLAMDPLLCKLEESGKGYHRGQSSITAMAFADDLVLLSDSWENMNTNISILETFCNLTGLKTQGQKCHGFYIKPTKKSYTINDCAAWTINGTPLNMIDPGESEKYLGLQFDPWIGIARSGLSTKLDFWLQRIDQAPLKPLQKLDILKTYTIPRLIYIADHSEVKSALLETLDQKIRTAVKEWLHLPPCTCDAILYSSTRDGGLGITKLAGLIPSVQARRLHRIAQSSDDTMKCFMEKEKMEQLHKKLWIQAGGDRENIPSIWEAPPSSEPPNNVSTNSEWEAPTQKDKFPKPCNWRKNEFKKWTKLASQGRGIVNFERDKISNHWIQYYRRIPHRKLLTALQLRANVYPTREFLARGRQDQYIKACRHCDADNESCAHIIGNCPVTQDARIKRHNYICELLLEEAKKKDWVVFKEPHIRDSNKELYKPDLIFVKDGRALVVDVTVRYEAAKSSLEEAAAEKVRKYKHLETEVRHLTNAKDVTFVGFPLGARGKWHQDNFKLLTELGLSKSRQVKMAETFSTVALFSSVDIVHMFASRARKSMVM

SEQ ID NO: 1087 - protein, 1665 aa, synthetic construct
MAPKKKRKVNISGSSCGSPNSADTSSDFKDLWTKLKECHDREVQGLQVKVTKLKQERILDAQRLEEFFTKNQQLREQQKVLHETIKVLEDRLRAGLCDRCAVTEEHMRKKQQEFENIRQQNLKLITELMNERNTLQEENKKLSEQLQQKIENDQQHQAAELECEEDVIPDSPITAFSFSGVNRLRRKENPHVRYIEQTHTKLEHSVCANEMRKVSKSSTHPQHNPNENEILVADTYDQSQSPMAKAHGTSSYTPDKSSFNLATVVAETLGLGVQEESETQGPMSPLGDELYHCLEGNHKKQPFESGSETPGTSESATPEGSPKRKVSSAEGAAKEEPKRRSARLSAKPPAKVEAKPKKAAAKDKSSDKKVQTKGKRGAKGKQAEVANQETKEDLPAENGETKTEESPASDEAGEKEAKSDSGSETPGTSESATPESYEQLAPQPCVGETLHSSLPRDSELFVPEEGSSEKESEDAPKTSPPTPGKHGLEQTGEEKVMVTVPDKNPPCPCCGTRVNSVLNLIEHLKVSHGKRGVCFRCAKCGKENSNYHSVVCHFKKCRGPETEKAPAGEWICEVCNRDFTTKIGLGQHKRLAHPAVRNQERIVASQPKETSNRGAHKRCWTKEEEELLIRLEAQFEGNKNINKLIAEHITTKTAKQISDKRRLLSRKPAEEPRMEPGTCHHTRRAAASLRTEPEMSHHAQAEDRDNGPGRRPLPGRAAAGGRTMDEIRRHPDKGNGQQRPTKQKSEEQLQAYYKKTLEERLSAGALNTFPRAFKQVMEGRDIKLVINQTAQDCFGCLESISQIRTATRDKKDTVTREKHPKKPFQKWMKKRAIKKGNYLRFQRLFYLDRGKLAKIILDDIECLSCDIPLSEIYSVFKTRWETTGSFKSLGDFKTYGKADNTAFRELITAKEIEKNVQEMSKGSAPGPDGITLGDVVKMDPEFSRTMEIFNLWLTTGKIPDMVRGCRTVLIPKSSKPDRLKDINNWRPITIGSILLRLFSRIVTARLSKACPLNPRQRGFIRAAGCSENLKLLQTIIWSAKREHRPLGVVFVDIAKAFDTVSHQHIIHALQQREVDPHIVGLVSNMYENISTYITTKRNTHTDKIQIRVGVKQGDPMSPLLFNLAMDPLLCKLEESGKGYHRGQSSITAMAFADDLVLLSDSWENMNTNISILETFCNLTGLKTQGQKCHGFYIKPTKKSYTINDCAAWTINGTPLNMIDPGESEKYLGLQFDPWIGIARSGLSTKLDEWLQRIDQAPLKPLQKLDILKTYTIPRLIYIADHSEVKSALLETLDQKIRTAVKEWLHLPPCTCDAILYSSTRDGGLGITKLAGLIPSVQARRLHRIAQSSDDTMKCFMEKEKMEQLHKKLWIQAGGDRENIPSIWEAPPSSEPPNNVSTNSEWEAPTQKDKFPKPCNWRKNEFKKWTKLASQGRGIVNFERDKISNHWIQYYRRIPHRKLLTALQLRANVYPTREFLARGRQDQYIKACRHCDADNESCAHIIGNCPVTQDARIKRHNYICELLLEEAKKKDWVVFKEPHIRDSNKELYKPDLIFVKDGRALVVDVTVRYEAAKSSLEEAAAEKVRKYKHLETEVRHLTNAKDVTFVGFPLGARGKWHQDNFKLLTELGLSKSRQVKMAETFSTVALFSSVDIVHMFASRARKSMVM

SEQ ID NO: 1088 - protein, 1665 aa, synthetic construct
MAPKKKRKVNISGSSCGSPNSADTSSDFKDLWTKLKECHDREVQGLQVKVTKLKQERILDAQRLEEFFTKNQQLREQQKVLHETIKVLEDRLRAGLCDRCAVTEEHMRKKQQEFENIRQQNLKLITELMNERNTLQEENKKLSEQLQQKIENDQQHQAAELECEEDVIPDSPITAFSFSGVNRLRRKENPHVRYIEQTHTKLEHSVCANEMRKVSKSSTHPQHNPNENEILVADTYDQSQSPMAKAHGTSSYTPDKSSFNLATVVAETLGLGVQEESETQGPMSPLGDELYHCLEGNHKKQPFESGSETPGTSESATPEGSPKRKVSSAEGAAKEEPKRRSARLSAKPPAKVEAKPKKAAAKDKSSDKKVQTKGKRGAKGKQAEVANQETKEDLPAENGETKTEESPASDEAGEKEAKSDSGSETPGTSESATPESYEQLAPQPCVGETLHSSLPRDSELFVPEEGSSEKESEDAPKTSPPTPGKHGLEQTGEEKVMVTVPDKNPPCPCCGTRVNSVLNLIEHLKVSHGKRGVCFRCAKCGKENSNYHSVVCHFKKCRGPETEKAPAGEWICEVCNRDFTTKIGLGQHKRLAHPAVRNQERIVASQPKETSNRGAHKRCWTKEEEELLIRLEAQFEGNKNINKLIAEHITTKTAKQISDKRRLLSRKPAEEPRMEPGTCHHTRRAAASLRTEPEMSHHAQAEDRDNGPGRRPLPGRAAAGGRTMDEIRRHPDKGNGQQRPTKQKSEEQLQAYYKKTLEERLSAGALNTFPRAFKQVMEGRDIKLVINQTAQDCFGCLESISQIRTATRDKKDTVTREKHPKKPFQKWMKKRAIKKGNYLRFQRLFYLDRGKLAKIILDDIECLSCDIPLSEIYSVFKTRWETTGSFKSLGDFKTYGKADNTAFRELITAKEIEKNVQEMSKGSAPGPDGITLGDVVKMDPEFSLTMEIFNLWLTTGKIPDMVRGCRTVLIPKSSKPDRLKDINNWRPITIGSILLRLFSRIVTARLSKACPLNPRQRGFIRAAGCSENLKLLQTIIWSAKREHRPLGVVFVDIAKAFDTVSHQHIIHALQQREVDPHIVGLVSNMYENISTYITTKRNTHTDKIQIRVGVKQGDPMSPLLFNLAMDPLLCKLEESGKGYHRGQSSITAMAFADDLVLLSDSWENMNTNISILETFCNLTGLKTQGQKCHGFYIKPTKKSYTINDCAAWTINGTPLNMIDPGESEKYLGLQFDPWIGIARSGLSTKLDFWLQRIDQAPLKPLQKLDILKTYTIPRLIYIADHSEVKSALLETLDQKIRTAVKEWLHLPPCTCDAILYSSTRDGGLGITKLAGLIPSVQARRLHRIAQSSDDTMKCFMEKEKMEQLHKKLWIQAGGDRENIPSIWEAPPSSEPPNNVSTNSEWEAPTQKPKFPKPCNWRKNEFKKWTKLASQGRGIVNFERDKISNHWIQYYRRIPHRKLLTALQLRANVYPTREFLARGRQDQYIKACRHCDADNESCAHIIGNCPVTQDARIKRHNYICELLLEEAKKKDWVVFKEPHIRDSNKELYKPDLIFVKDGRALVVDVTVRYEAAKSSLEEAAAEKVRKYKHLETEVRHLTNAKDVTFVGFPLGARGKWHQDNFKLLTELGLSKSRQVKMAETFSTVALFSSVDIVHMFASRARKSMVM

SEQ ID NO: 1089 - protein, 1665 aa, synthetic construct
MAPKKKRKVNISGSSCGSPNSADTSSDFKDLWTKLKECHDREVQGLQVKVTKLKQERILDAQRLEEFFTKNQQLREQQKVLHETIKVLEDRLRAGLCDRCAVTEEHMRKKQQEFENIRQQNLKLITELMNERNTLQEENKKLSEQLQQKIENDQQHQAAELECEEDVIPDSPITAFSFSGVNRLRRKENPHVRYIEQTHTKLEHSVCANEMRKVSKSSTHPQHNPNENEILVADTYDQSQSPMAKAHGTSSYTPDKSSFNLATVVAETLGLGVQEESETQGPMSPLGDELYHCLEGNHKKQPFESGSETPGTSESATPEGSPKRKVSSAEGAAKEEPKRRSARLSAKPPAKVEAKPKKAAAKDKSSDKKVQTKGKRGAKGKQAEVANQETKEDLPAENGETKTEESPASDEAGEKEAKSDSGSETPGTSESATPESYEQLAPQPCVGETLHSSLPRDSELFVPEEGSSEKESEDAPKTSPPTPGKHGLEQTGEEKVMVTVPDKNPPCPCCGTRVNSVLNLIEHLKVSHGKRGVCFRCAKCGKENSNYHSVVCHFKKCRGPETEKAPAGEWICEVCNRDFTTKIGLGQHKRLAHPAVRNQERIVASQPKETSNRGAHKRCWTKEEEELLIRLEAQFEGNKNINKLIAEHITTKTAKQISDKRRLLSRKPAEEPRMEPGTCHHTRRAAASLRTEPEMSHHAQAEDRDNGPGRRPLPGRAAAGGRTMDEIRRHPDKGNGQQRPTKQKSEEQLQAYYKKTLEERLSAGALNTFPRAFKQVMEGRDIKLVINQTAQDCFGCLESISQIRTATRDKKYTVTREKHPKKPFQKWMKKRAIKKGNYLRFQRLFYLDRGKLAKIILDDIECLSCDIPLSEIYSVFKTRWETTGSFKSLGDFKTYGKADNTAFRELITAKEIEKNVQEMSKGSAPGPDGITLGDVVKMDPEFSLTMEIFNLWLTTGKIPDMVRGCRTVLIPKSSKPDRLKDINNWRPITIGSILLRLFSRIVTARLSKACPLNPRQRGFIRAAGCSENLKLLQTIIWSAKREHRPLGVVFVDIAKAFDTVSHQHIIHALQQREVDPHIVGLVSNMYENISTYITTKRNTHTDKIQIRVGVKQGDPMSPLLFNLAMDPLLCKLEESGKGYHRGQSSITAMAFADDLVLLSDSWENMNTNISILETFCNLTGLKTQGQKCHGFYIKPTKKSYTINDCAAWTINGTPLNMIDPGESEKYLGLQFDPWIGIARSGLSTKLDFWLQRIDQAPLKPLQKLDILKTYTIPRLIYIADHSEVKSALLETLDQKIRTAVKEWLHLPPCTCDAILYSSTRDGGLGITKLAGLIPSVQARRLHRIAQSSDDTMKCFMEKEKMEQLHKKLWIQAGGDRENIPSIWEAPPSSEPPNNVSTNSEWEAPTQKPKFPKPCNWRKNEFKKWTKLASQGRGIVNFERDKISNHWIQYYRRIPHRKLLTALQLRANVYPTREFLARGRQDQYIKACRHCDADNESCAHIIGNCPVTQDARIKRHNYICELLLEEAKKKDWVVFKEPHIRDSNKELYKPDLIFVKDGRALVVDVTVRYEAAKSSLEEAAAEKVRKYKHLETEVRHLTNAKDVTFVGFPLGARGKWHQDNFKLLTELGLSKSRQVKMAETFSTVALFSSVDIVHMFASRARKSMVM

SEQ ID NO: 1090 - protein, 1665 aa, synthetic construct
MAPKKKRKVNISGSSCGSPNSADTSSDFKDLWTKLKECHDREVQGLQVKVTKLKQERILDAQRLEEFFTKNQQLREQQKVLHETIKVLEDRLRAGLCDRCAVTEEHMRKKQQEFENIRQQNLKLITELMNERNTLQEENKKLSEQLQQKIENDQQHQAAELECEEDVIPDSPITAFSFSGVNRLRRKENPHVRYIEQTHTKLEHSVCANEMRKVSKSSTHPQHNPNENEILVADTYDQSQSPMAKAHGTSSYTPDKSSFNLATVVAETLGLGVQEESETQGPMSPLGDELYHCLEGNHKKQPFESGSETPGTSESATPEGSPKRKVSSAEGAAKEEPKRRSARLSAKPPAKVEAKPKKAAAKDKSSDKKVQTKGKRGAKGKQAEVANQETKEDLPAENGETKTEESPASDEAGEKEAKSDSGSETPGTSESATPESYEQLAPQPCVGETLHSSLPRDSELFVPEEGSSEKESEDAPKTSPPTPGKHGLEQTGEEKVMVTVPDKNPPCPCCGTRVNSVLNLIEHLKVSHGKRGVCFRCAKCGKENSNYHSVVCHFKKCRGPETEKAPAGEWICEVCNRDFTTKIGLGQHKRLAHPAVRNQERIVASQPKETSNRGAHKRCWTKEEEELLIRLEAQFEGNKNINKLIAEHITTKTAKQISDKRRLLSRKPAEEPRMEPGTCHHTRRAAASLRTEPEMSHHAQAEDRDNGPGRRPLPGRAAAGGRTMDEIRRHPDKGNGQQRPTKQKSEEQLQAYYKKTLEERLSAGALNTFPRAFKQVMEGRDIKLVINQTAQDCFGCLESISQIRTATRDKKDTVTREKHPKRPFQKWMKKRAIKKGNYLRFQRLFYLDRGKLAKIILDDIECLSCDIPLSEIYSVFKTRWETTGSFKSLGDFKTYGKADNTAFRELITAKEIEKNVQEMSKGSAPGPDGITLGDVVKMDPEFSRTMEIFNLWLTTGKIPDMVRGCRTVLIPKSSKPDRLKDINNWRPITIGSILLRLFSRIVTARLSKACPLNPRQRGFIRAAGCSENLKLLQTIIWSAKREHRPLGVVFVDIAKAFDTVSHQHIIHALQQREVDPHIVGLVSNMYENISTYITTKRNTHTDKIQIRVGVKQGDPMSPLLFNLAMDPLLCKLEESGKGYHRGQSSITAMAFADDLVLLSDSWENMNTNISILETFCNLTGLKTQGQKCHGFYIKPTKKSYTINDCAAWTINGTPLNMIDPGESEKYLGLQFDPWIGIARSGLSTKLDFWLQRIDQAPLKPLQKLDILKTYTIPRLIYIADHSEVKSALLETLDQKIRTAVKEWLHLPPCTCDAILYSSTRDGGLGITKLAGLIPSVQARRLHRIAQSSDDTMKCFMEKEKMEQLHKKLWIQAGGDRENIPSIWEAPPSSEPPNNVSTNSEWEAPTQKDKFPKPCNWRKNEFKKWTKLASQGRGIVNFERDKISNHWIQYYRRIPHRKLLTALQLRANVYPTREFLARGRQDQYIKACRHCDADNESCAHIIGNCPVTQDARIKRHNYICELLLEEAKKKDWVVFKEPHIRDSNKELYKPDLIFVKDGRALVVDVTVRYEAAKSSLEEAAAEKVRKYKHLETEVRHLTNAKDVTFVGFPLGARGKWHQDNFKLLTELGLSKSRQVKMAETFSTVALFSSVDIVHMFASRARKSMVM

SEQ ID NO: 1091 - protein, 1665 aa, synthetic construct
MAPKKKRKVNISGSSCGSPNSADTSSDFKDLWTKLKECHDREVQGLQVKVTKLKQERILDAQRLEEFFTKNQQLREQQKVLHETIKVLEDRLRAGLCDRCAVTEEHMRKKQQEFENIRQQNLKLITELMNERNTLQEENKKLSEQLQQKIENDQQHQAAELECEEDVIPDSPITAFSFSGVNRLRRKENPHVRYIEQTHTKLEHSVCANEMRKVSKSSTHPQHNPNENEILVADTYDQSQSPMAKAHGTSSYTPDKSSFNLATVVAETLGLGVQEESETQGPMSPLGDELYHCLEGNHKKQPFESGSETPGTSESATPEGSPKRKVSSAEGAAKEEPKRRSARLSAKPPAKVEAKPKKAAAKDKSSDKKVQTKGKRGAKGKQAEVANQETKEDLPAENGETKTEESPASDEAGEKEAKSDSGSETPGTSESATPESYEQLAPQPCVGETLHSSLPRDSELFVPEEGSSEKESEDAPKTSPPTPGKHGLEQTGEEKVMVTVPDKNPPCPCCGTRVNSVLNLIEHLKVSHGKRRVCFRCAKCGKENSNYHSVVCHFKKCRGPETEKAPAGEWICEVCNRDFTTKIGLGQHKRLAHPAVRNQERIVASQPKETSNRGAHKRCWTKEEEELLIRLEAQFEGNKNINKLIAEHITTKTAKQISDKRRLLSRKPAEEPRMEPGTCHHTRRAAASLRTEPEMSHHAQAEDRDNGPGRRPLPGRAAAGGRTMDEIRRHPDKGNGQQRPTKQKSEEQLQAYYKKTLEERLSAGALNTFPRAFKQVMEGRDIKLVINQTAQDCFGCLESISQIRTATRDKKDTVTREKHPKKPFQKWMKKRAIKKGNYLRFQRLFYLDRGKLAKIILDDIECLSCDIPLSEIYSVFKTRWETTGSFKSLGDFKTYGKADNTAFRELITAKEIEKNVQEMSKGSAPGPDGITLGDVVKMDPEFSRTMEIFNLWLTTGKIPDMVRGCRTVLIPKSSKPDRLKDINNWRPITIGSILLRLFSRIVTARLSKACPLNPRQRGFIRAAGCSENLKLLQTIIWSAKREHRPLGVVFVDIAKAFDTVSHQHIIHALQQREVDPHIVGLVSNMYENISTYITTKRNTHTDKIQIRVGVKQGDPMSPLLFNLAMDPLLCKLEESGKGYHRGQSSITAMAFADDLVLLSDSWENMNTNISILETFCNLTGLKTQGQKCHGFYIKPTKKSYTINDCAAWTINGTPLNMIDPGESEKYLGLQFDPWIGIARSGLSTKLDFWLQRIDQAPLKPLQKLDILKTYTIPRLIYIADHSEVKSALLETLDQKIRTAVKEWLHLPPCTCDAILYSSTRDGGLGITKLAGLIPSVQARRLHRIAQSSDDTMKCFMEKEKMEQLHKKLWIQAGGDRENIPSIWEAPPSSEPPNNVSTNSEWEAPTQKDKFPKPCNWRKNEFKKWTKLASQGRGIVNFERDKISNHWIQYYRRIPHRKLLTALQLRANVYPTREFLARGRQDQYIKACRHCDADNESCAHIIGNCPVTQDARIKRHNYICELLLEEAKKKDWVVFKEPHIRDSNKELYKPDLIFVKDGRALVVDVTVRYEAAKSSLEEAAAEKVRKYKHLETEVRHLTNAKDVTFVGFPLGARGKWHQDNFKLLTELGLSKSRQVKMAETFSTVALFSSVDIVHMFASRARKSMVM

SEQ ID NO: 1092 - protein, 1665 aa, synthetic construct
MAPKKKRKVNISGSSCGSPNSADTSSDFKDLWTKLKECHDREVQGLQVKVTKLKQERILDAQRLEEFFTKNQQLREQQKVLHETIKVLEDRLRAGLCDRCAVTEEHMRKKQQEFENIRQQNLKLITELMNERNTLQEENKKLSEQLQQKIENDQQHQAAELECEEDVIPDSPITAFSFSGVNRLRRKENPHVRYIEQTHTKLEHSVCANEMRKVSKSSTHPQHNPNENEILVADTYDQSQSPMAKAHGTSSYTPDKSSFNLATVVAETLGLGVQEESETQGPMSPLGDELYHCLEGNHKKQPFESGSETPGTSESATPEGSPKRKVSSAEGAAKEEPKRRSARLSAKPPAKVEAKPKKAAAKDKSSDKKVQTKGKRGAKGKQAEVANQETKEDLPAENGETKTEESPASDEAGEKEAKSDSGSETPGTSESATPESYEQLAPQPCVGETLHSSLPRDSELFVPEEGSSEKESEDAPKTSPPTPGKHGLEQTGEEKVMVTVPDKNPPCPCCGTRVNSVLNLIEHLKVSHGKRGVCFRCAKCGKENSNYHSVVCHFKKCRGPETEKAPAGEWICEVCNRDFTTKIGLGQHKRLAHPAVRNQERIVASQPKETSNRGAHKRCWTKEEEELLIRLEAQFEGNKNINKLIAEHITTKTAKQISDKRRLLSRKPAEEPRMEPGTCHHTRRAAASLRTEPEMSHHAQAEDRDNGPGRRPLPGRAAAGGRTMDEIRRHPDKGNGQQRPTKQKSEEQLQAYYKKTLEERLSAGALNTFPRAFKQVMEGRDIKLVINQTAQDCFGCLESISQIRTATRDKKDTGTREKHPKKPFQKWMKKRAIKKGNYLRFQRLFYLDRGKLAKIILDDIECLSCDIPLSEIYSVFKTRWETTGSFKSLGDFKTYGKADNTAFRELITAKEIEKNVQEMSKGSAPGPDGITLGDVVKMDPEFSRTMEIFNLWLTTGKIPDMVRGCRTVLIPKSSKPDRLKDINNWRPITIGSILLRLFSRIVTARLSKACPLNPRQRGFIRAAGCSENLKLLQTIIWSAKREHRPLGVVFVDIAKAFDTVSHQHIIHALQQREVDPHIVGLVSNMYENISTYITTKRNTHTDKIQIRVGVKQGDPMSPLLFNLAMDPLLCKLEESGKGYHRGQSSITAMAFADDLVLLSDSWENMNTNISILETFCNLTGLKTQGQKCHGFYIKPTKKSYTINDCAAWTINGTPLNMIDPGESEKYLGLQFDPWIGIARSGLSTKLDFWLQRIDQAPLKPLQKLDILKTYTIPRLIYIADHSEVKSALLETLDQKIRTAVKEWLHLPPCTCDAILYSSTRDGGLGITKLAGLIPSVQARRLHRIAQSSDDTMKCFMEKEKMEQLHKKLWIQAGGDRENIPSIWEAPPSSEPPNNVSTNSEWEAPTQKDKFPKPCNWRKNEFKKWTKLASQGRGIVNFERDKISNHWIQYYRRIPHRKLLTALQLRANVYPTREFLARGRQDQYIKACRHCDADNESCAHIIGNCPVTQDARIKRHNYICELLLEEAKKKDWVVFKEPHIRDSNKELYKPDLIFVKDGRALVVDVTVRYEAAKSSLEEAAAEKVRKYKHLETEVRHLTNAKDVTFVGFPLGARGKWHQDNFKLLTELGLSKSRQVKMAETFSTVALFSSVDIVHMFASRARKSMVM

SEQ ID NO: 1093 - protein, 1665 aa, synthetic construct
MAPKKKRKVNISGSSCGSPNSADTSSDFKDLWTKLKECHDREVQGLQVKVTKLKQERILDAQRLEEFFTKNQQLREQQKVLHETIKVLEDRLRAGLCDRCAVTEEHMRKKQQEFENIRQQNLKLITELMNERNTLQEENKKLSEQLQQKIENDQQHQAAELECEEDVIPDSPITAFSFSGVNRLRRKENPHVRYIEQTHTKLEHSVCANEMRKVSKSSTHPQHNPNENEILVADTYDQSQSPMAKAHGTSSYTPDKSSFNLATVVAETLGLGVQEESETQGPMSPLGDELYHCLEGNHKKQPFESGSETPGTSESATPEGSPKRKVSSAEGAAKEEPKRRSARLSAKPPAKVEAKPKKAAAKDKSSDKKVQTKGKRGAKGKQAEVANQETKEDLPAENGETKTEESPASDEAGEKEAKSDSGSETPGTSESATPESYEQLAPQPCVGETLHSSLPRDSELFVPEEGSSEKESEDAPKTSPPTPGKHGLEQTGEEKVMVTVPDKNPPCPCCGTRVNSVLNLIEHLKVSHGKRGVCFRCAKCGKENSNYHSVVCHFKKCRGPETEKAPAGEWICEVCNRDFTTKIGLGQHKRLAHPAVRNQERIVASQPKETSNRGAHKRCWTKEEEELLIRLEAQFEGHKNINKLIAEHITTKTAKQISDKRRLLSRKPAEEPRMEPGTCHHTRRAAASLRTEPEMSHHAQAEDRDNGPGRRPLPGRAAAGGRTMDEIRRHPDKGNGQQRPTKQKSEEQLQAYYKKTLEERLSAGALNTFPRAFKQVMEGRDIKLVINQTAQDCFGCLESISQIRTATRDKKDTVTREKHPKKPFQKWMKKRAIKKGNYLRFQRLFYLDRGKLAKIILDDIECLSCDIPLSEIYSVFKTRWETTGSFKSLGDFKTYGKADNTAFRELITAKEIEKNVQEMSKGSAPGPDGITLGDVVKMDPEFSRTMEIFNLWLTTGKIPDMVRGCRTVLIPKSSKPDRLKDINNWRPITIGSILLRLFSRIVTARLSKACPLNPRQRGFIRAAGCSENLKLLQTIIWSAKREHRPLGVVFVDIAKAFDTVSHQHIIHALQQREVDPHIVGLVSNMYENISTYITTKRNTHTDKIQIRVGVKQGDPMSPLLFNLAMDPLLCKLEESGKGYHRGQSSITAMAFADDLVLLSDSWENMNTNISILETFCNLTGLKTQGQKCHGFYIKPTKKSYTINDCAAWTINGTPLNMIDPGESEKYLGLQFDPWIGIARSGLSTKLDFWLQRIDQAPLKPLQKLDILKTYTIPRLIYIADHSEVKSALLETLDQKIRTAVKEWLHLPPCTCDAILYSSTRDGGLGITKLAGLIPSVQARRLHRIAQSSDDTMKCFMEKEKMEQLHKKLWIQAGGDRENIPSIWEAPPSSEPPNNVSTNSEWEAPTQKDKFPKPCNWRKNEFKKWTKLASQGRGIVNFERDKISNHWIQYYRRIPHRKLLTALQLRANVYPTREFLARGRQDQYIKACRHCDADNESCAHIIGNCPVTQDARIKRHNYICELLLEEAKKKDWVVFKEPHIRDSNKELYKPDLIFVKDGRALVVDVTVRYEAAKSSLEEAAAEKVRKYKHLETEVRHLTNAKDVTFVGFPLGARGKWHQDNFKLLTELGLSKSRQVKMAETFSTVALFSSVDIVHMFASRARKSMVM

SEQ ID NO: 1094 - protein, 1665 aa, synthetic construct
MAPKKKRKVNISGSSCGSPNSADTSSDFKDLWTKLKECHDREVQGLQVKVTKLKQERILDAQRLEEFFTKNQQLREQQKVLHETIKVLEDRLRAGLCDRCAVTEEHMRKKQQEFENIRQQNLKLITELMNERNTLQEENKKLSEQLQQKIENDQQHQAAELECEEDVIPDSPITAFSFSGVNRLRRKENPHVRYIEQTHTKLEHSVCANEMRKVSKSSTHPQHNPNENEILVADTYDQSQSPMAKAHGTSSYTPDKSSFNLATVVAETLGLGVQEESETQGPMSPLGDELYHCLEGNHKKQPFESGSETPGTSESATPEGSPKRKVSSAEGAAKEEPKRRSARLSAKPPAKVEAKPKKAAAKDKSSDKKVQTKGKRGAKGKQAEVANQETKEDLPAENGETKTEESPASDEAGEKEAKSDSGSETPGTSESATPESYEQLAPQPCVGETLHSSLPRDSELFVPEEGSSEKESEDAPKTSPPTPGKHGLEQTGEEKVMVTVPDKNPPCPCCGTRVNSVLNLIEHLKVSHGKRGVCFRCAKCGKENSNYHSVVCHFKKCRGPETEKAPAGEWICEVCNRDFTTKIGLGQHKRLAHPAVRNQERIVASQPKETSNRGAHKRCWTKEEEELLIRLEAQFEGNKNINKLIAEHITTKTAKQISDKRRLLSRKPAEEPRMEPGTCHHTRRAAASLRTEPEMSHHAQAEDRDNGPGRRPLPGRPAAGGRTMDEIRRHPDKGNGQQRPTKQKSEEQLQAYYKKTLEERLSAGALNTFPRAFKQVMEGRDIKLVINQTAQDCFGCLESISQIRTATRDKKDTVTREKHPKKPFQKWMKKRAIKKGNYLRFQRLFYLDRGKLAKIILDDIECLSCDIPLSEIYSVFKTRWETTGSFKSLGDFKTYGKADNTAFRELITAKEIEKNVQEMSKGSAPGPDGITLGDVVKMDPEFSRTMEIFNLWLTTGKIPDMVRGCRTVLIPKSSKPDRLKDINNWRPITIGSILLRLFSRIVTARLSKACPLNPRQRGFIRAAGCSENLKLLQTIIWSAKREHRPLGVVFVDIAKAFDTVSHQHIIHALQQREVDPHIVGLVSNMYENISTYITTKRNTHTDKIQIRVGVKQGDPMSPLLFNLAMDPLLCKLEESGKGYHRGQSSITAMAFADDLVLLSDSWENMNTNISILETFCNLTGLKTQGQKCHGFYIKPTKKSYTINDCAAWTINGTPLNMIDPGESEKYLGLQFDPWIGIARSGLSTKLDFWLQRIDQAPLKPLQKLDILKTYTIPRLIYIADHSEVKSALLETLDQKIRTAVKEWLHLPPCTCDAILYSSTRDGGLGITKLAGLIPSVQARRLHRIAQSSDDTMKCFMEKEKMEQLHKKLWIQAGGDRENIPSIWEAPPSSEPPNNVSTNSEWEAPTQKDKFPKPCNWRKNEFKKWTKLASQGRGIVNFERDKISNHWIQYYRRIPHRKLLTALQLRANVYPTREFLARGRQDQYIKACRHCDADNESCAHIIGNCPVTQDARIKRHNYICELLLEEAKKKDWVVFKEPHIRDSNKELYKPDLIFVKDGRALVVDVTVRYEAAKSSLEEAAAEKVRKYKHLETEVRHLTNAKDVTFVGFPLGARGKWHQDNFKLLTELGLSKSRQVKMAETFSTVALFSSVDIVHMFASRARKSMVM

SEQ ID NO: 1095 - protein, 1665 aa, synthetic construct
MAPKKKRKVNISGSSCGSPNSADTSSDFKDLWTKLKECHDREVQGLQVKVTKLKQERILDAQRLEEFFTKNQQLREQQKVLHETIKVLEDRLRAGLCDRCAVTEEHMRKKQQEFENIRQQNLKLITELMNERNTLQEENKKLSEQLQQKIENDQQHQAAELECEEDVIPDSPITAFSFSGVNRLRRKENPHVRYIEQTHTKLEHSVCANEMRKVSKSSTHPQHNPNENEILVADTYDQSQSPMAKAHGTSSYTPDKSSFNLATVVAETLGLGVQEESETQGPMSPLGDELYHCLEGNHKKQPFESGSETPGTSESATPEGSPKRKVSSAEGAAKEEPKRRSARLSAKPPAKVEAKPKKAAAKDKSSDKKVQTKGKRGAKGKQAEVANQETKEDLPAENGETKTEESPASDEAGEKEAKSDSGSETPGTSESATPESYEQLAPQPCVGETLHSSLPRDSELFVPEEGSSEKESEDAPKTSPPTPGKHGLEQTGEEKVMVTVPDKNPPCPCCGTRVNSVLNLIEHLKVSHGKRGVCFRCAKCGKENSNYHSVVCHFKKCRGPETEKAPAGEWICEVCNRDFTTKIGLGQHKRLAHPAVRNQERIVASQPKETSNRGAHKRCWTKEEEELLIRLEAQFEGNKNINKLIAEHITTKTAKQISDKRRLLSRKPAEEPRMEPGTCHHTRRAAASLRTEPEMSHHAQAEDRDNGPGRRPLPGRAAAGGRTMDEIRRHPDKGNGQQRPTKQKSEEQLQAYYKKTLEERLSAGALNTFPRAFKQVMEGRDIKLVINQTAQDCFGCLESISQIRTATRDKKDTVTREKHPKRPFQKWMKKRAIKKGNYLRFQRLFYLDRGKLAKIILDDIECLSCDIPLSEIYSVFKTRWETTGSFKSLGDFKTYGKADNTAFRELITAKEIEKNVQEMSKGSAPGPDGITLGDVVKMDPEFSRTMEIFNLWLTTGKIPDMVRGCRTVLIPKSSKPDRLKDINNWRPITIGSILLRLFSRIVTARLSKACPLNPRQRGFIRAAGCSENLKLLQTIIWSAKREHRPLGVVFVDIAKAFDTVSHQHIIHALQQREVDPHIVGLVSNMYENISTYITTKRNTHTDKIQIRVGVKQGDPMSPLLFNLAMDPLLCKLEESGKGYHRGQSSITAMAFADDLVLLSDSWENMNTNISILETFCNLTGLKTQGQKCHGFYIKPTKKSYTINDCAAWTINGTPLNMIDPGESEKYLGLQFDPWIGIARSGLSTKLDFWLQRIDQAPLKPLQKLDILKTYTIPRLIYIADHSEVKSALLETLDQKIRTAVKEWLHLPPCTCDAILYSSTRDGGLGITKLAGLIPSVQARRLHRIAQSSDDTMKCFMEKERMEQLHKKLWIQAGGDRENIPSIWEAPPSSEPPNNVSTNSEWEAPTQKDKFPKPCNWRKNEFKKWTKLASQGRGIVNFERDKISNHWIQYYRRIPHRKLLTALQLRANVYPTREFLARGRQDQYIKACRHCDADNESCAHIIGNCPVTQDARIKRHNYICELLLEEAKKKDWVVFKEPHIRDSNKELYKPDLIFVKDGRALVVDVTVRYEAAKSSLEEAAAEKVRKYKHLETEVRHLTNAKDVTFVGFPLGARGKWHQDNFKLLTELGLSKSRQVKMAETFSTVALFSSVDIVHMFASRARKSMVM

SEQ ID NO: 1096 - protein, 1665 aa, synthetic construct
MAPKKKRKVNISGSSCGSPNSADTSSDFKDLWTKLKECHDREVQGLQVKVTKLKQERILDAQRLEEFFTKNQQLREQQKVLHETIKVLEDRLRAGLCDRCAVTEEHMRKKQQEFENIRQQNLKLITELMNERNTLQEENKKLSEQLQQKIENDQQHQAAELECEEDVIPDSPITAFSFSGVNRLRRKENPHVRYIEQTHTKLEHSVCANEMRKVSKSSTHPQHNPNENEILVADTYDQSQSPMAKAHGTSSYTPDKSSFNLATVVAETLGLGVQEESETQGPMSPLGDELYHCLEGNHKKQPFESGSETPGTSESATPEGSPKRKVSSAEGAAKEEPKRRSARLSAKPPAKVEAKPKKAAAKDKSSDKKVQTKGKRGAKGKQAEVANQETKEDLPAENGETKTEESPASDEAGEKEAKSDSGSETPGTSESATPESYEQLAPQPCVGETLHSSLPRDSELFVPEEGSSEKESEDAPKTSPPTPGKHGLEQTGEEKVMVTVPDKNPPCPCCGTRVNSVLNLIEHLKVSHGKRGVCFRCAKCGKENSNYHSVVCHFKKCRGPETEKAPAGEWICEVCNRDFTTKIGLGQHKRLAHPAVRNQERIVASQPKETSNRGAHKRCWTKEEEELLIRLEAQFEGNKNINKLIAEHITTKTAKQISDKRRLLSRKPAEEPRMEPGTCHHTRRAAASLRTEPEMSHHAQAEDRDNGPGRRPLPGRAAAGGRTMDEIRRHPDKGNGQQRPTKQKSEEQLQAYYKKTLEERLSAGALNTFPRAFKQVMEGRDIKLVINQTAQDCFGCLESISQIRTATRDKKDTVTREKHPKKPFQKWMKKRAIKKGNYLRFQRLFYLDRGKLAKIILDDIECLSCDIPLSEIYSVFKTRWETTGSFKSLGDFKTYGKADNTAFRELITAKEIEKNVQEMSKGSAPGPDGITLGDVVKMDPEFSRTMEIFNLWLTTGKIPDMVRGCRTVLIPKSSKPDRLKDINNWRPITIGSILLRLFSRIVTARLSKACPLNPRQRGFIRAAGCSENLKLLQTIIWSAKREHRPLGVVFVDIAKAFDTVSHQHIIHALQQREVDPHIVGLVSNMYENISTYITTKRNTHTDKIQIRVGVKQGDPMSPLLFNLAMDPLLCKLEESGKGYHRGQSSITAMAFADDLVLLSDSWENMNTNISILETFCNLTGLKTQGQKCHGFYIKPTKKSYTINDCAAWTINGTPLNMIDPGESEKYLGLQFDPWIGIARSGLSTKLDFWLQRIDQAPLKPLQKLDILKTYTIPRLIYIADHSEVKSALLETLDQKIRTAVKEWLHLPPCTCDAILYSSTRDGGLGITKLAGLIPSVQARRLHRIAQSSDDTMKCFMEKEKMEQLHKKLWIQAGGDRENIPSIWEAPPSSEPPNNVSTNSEWEAPTQKDKFPKPCNWRKNEFKKWTKLASQGRGIVNFERDKISNHWIQYYRRIPHRKLLTALQLRANVYPTREFLARGRQDQYIKACRHCDADNESCAHIIGNCPVTQDARIKRHNYICELLLEEAKKKDWVVFKEPHIRDSNKELYKPDLIFVKDGRALVVDVTVRYEAAKSSLEEAAAEKVRKAKHLETEVRHLTNAKDVTFVGFPLGARGKWHQDNFKLLTELGLSKSRQVKMAETFSTVALFSSVDIVHMFASRARKSMVM

SEQ ID NO: 1097 - protein, 1665 aa, synthetic construct
MAPKKKRKVNISGSSCGSPNSADTSSDFKDLWTKLKECHDREVQGLQVKVTKLKQERILDAQRLEEFFTKNQQLREQQKVLHETIKVLEDRLRAGLCDRCAVTEEHMRKKQQEFENIRQQNLKLITELMNERNTLQEENKKLSEQLQQKIENDQQHQAAELECEEDVIPDSPITAFSFSGVNRLRRKENPHVRYIEQTHTKLEHSVCANEMRKVSKSSTHPQHNPNENEILVADTYDQSQSPMAKAHGTSSYTPDKSSFNLATVVAETLGLGVQEESETQGPMSPLGDELYHCLEGNHKKQPFESGSETPGTSESATPEGSPKRKVSSAEGAAKEEPKRRSARLSAKPPAKVEAKPKKAAAKDKSSDKKVQTKGKRGAKGKQAEVANQETKEDLPAENGETKTEESPASDEAGEKEAKSDSGSETPGTSESATPESYEQLAPQPCVGETLHSSLPRDSELFVPEEGSSEKESEDAPKTSPPTPGKHGLEQTGEEKVMVTVPDKNPPCPCCGTRVNSVLNLIEHLKVSHGKRGVCFRCAKCGKENSNYHSVVCHFKKCRGPETEKAPAGEWICEVCNRDFTTKIGLGQHKRLAHPAVRNQERIVASQPKETSNRGAHKRCWTKEEEELLIRLEAQFEGNKNINKLIAEHITTKTAKQISDKRRLLSRKPAEEPRMEPGTCHHTRRAAASLRTEPEMSHHAQAEDRDNGPGRRPLPGRAAAGGRTMDEIRRHPDKGNGQQRPTKQKSEEQLQAYYKKTLEERLSAGALNTFPRAFKQVMEGRDIKLVINQTAQDCFGCLESISQIRTATRDKKDTVTREKHPKKPFQKWMKKRAIKKGNYLRFQRLFYLDRGKLAKIILDDIECLSCDIPLSEIYSVFKTRWETTGSFKSLGDFKTYGKADNTAFRELITAKEIEKNVQEMSKGSAPGPDGITLGDVVKMDPEFSRTMEIFNLWLTTGKIPDMVRGCRTVLIPKSSKPDRLKDINNWRPITIGSILLRLFSRIVTARLSKACPLNPRQRGFIRAAGCSENLKLLQTIIWSAKREHRPLGVVFVDIAKAFDTVSHQHIIHALQQREVDPHIVGLVSNMYENISTYITTKRNTHTDKIQIRVGVKQGDPMSPLLFNLAMDPLLCKLEESGKGYHRGQSSITAMAFADDLVLLSDSWENMNTNISILETFCNLTGLKTQGQKCHGFYIKPTKKSYTINDCAAWTINGTPLNMIDPGESEKYLGLQFDPWIGIARSGLSTKLDFWLQRIDQAPLKPLQKLDILKTYTIPRLIYIADHSEVKSALLETLDQKIRTAVKEWLHLPPCTCDAILYSSTRDGGLGITKLAGLIPSVQARRLHRIAQSSDDTMKCFMEKEKMEQLHKKLWIQAGGDRENIPSIWEAPPSSEPPNNVSTNSEWEAPTQKDKFPKPCNWRKNEFKKWTKLASQGRGIVNFERDKISNHWIQYYRRIPHRKLLTALQLRANVYPTREFLARGRQDQYIKACRHCDADNESCAHIIGNCPVTQDARIKRHNYICELLLEEAKKKDWVVFKEPHIRDSNKELYKPDLIFVKDGRALVVDVTVRYEAAKSSLEEAAAEKVRKAKHLETEVRHLTNAKDVTFVGFPLGAAGKWHQDNFKLLTELGLSKSRQVKMAETFSTVALFSSVDIVHMFASRARKSMVM

SEQ ID NO: 1098 - protein, 1665 aa, synthetic construct
MAPKKKRKVNISGSSCGSPNSADTSSDFKDLWTKLKECHDREVQGLQVKVTKLKQERILDAQRLEEFFTKNQQLREQQKVLHETIKVLEDRLRAGLCDRCAVTEEHMRKKQQEFENIRQQNLKLITELMNERNTLQEENKKLSEQLQQKIENDQQHQAAELECEEDVIPDSPITAFSFSGVNRLRRKENPHVRYIEQTHTKLEHSVCANEMRKVSKSSTHPQHNPNENEILVADTYDQSQSPMAKAHGTSSYTPDKSSFNLATVVAETLGLGVQEESETQGPMSPLGDELYHCLEGNHKKQPFESGSETPGTSESATPEGSPKRKVSSAEGAAKEEPKRRSARLSAKPPAKVEAKPKKAAAKDKSSDKKVQTKGKRGAKGKQAEVANQETKEDLPAENGETKTEESPASDEAGEKEAKSDSGSETPGTSESATPESYEQLAPQPCVGETLHSSLPRDSELFVPEEGSSEKESEDAPKTSPPTPGKHGLEQTGEEKVMVTVPDKNPPCPCCGTRVNSVLNLIEHLKVSHGKRGVCFRCAKCGKENSNYHSVVCHFKKCRGPETEKAPAGEWICEVCNRDFTTKIGLGQHKRLAHPAVRNQERIVASQPKETSNRGAHKRCWTKEEEELLIRLEAQFEGNKNINKLIAEHITTKTAKQISDKRRLLSRKPAEEPRMEPGTCHHTRRAAASLRTEPEMSHHAQAEDRDNGPGRRPLPGRAAAGGRTMDEIRRHPDKGNGQQRPTKQKSEEQLQAYYKKTLEERLSAGALNTFPRAFKQVMEGRDIKLVINQTAQDCFGCLESISQIRTATRDKKDTVTREKHPKKPFQKWMKKRAIKKGNYLRFQRLFYLDRGKLAKIILDDIECLSCDIPLSEIYSVFKTRWETTGSFKSLGDFKTYGKADNTAFRELITAKEIEKNVQEMSKGSAPGPDGITLGDVVKMDPEFSRTMEIFNLWLTTGKIPDMVRGCRTVLIPKSSKPDRLKDINNWRPITIGSILLRLFSRIVTARLSKACPLNPRQRGFIRAAGCSENLKLLQTIIWSAKREHRPLGVVFVDIAKAFDTVSHQHIIHALQQREVDPHIVGLVSNMYENISTYITTKRNTHTDKIQIRVGVKQGDPMSPLLFNLAMDPLLCKLEESGKGYHRGQSSITAMAFADDLVLLSDSWENMNTNISILETFCNLTGLKTQGQKCHGFYIKPTKKSYTINDCAAWTINGTPLNMIDPGESEKYLGLQFDPWIGIARSGLSTKLDFWLQRIDQAPLKPLQKLDILKTYTIPRLIYIADHSEVKSALLETLDQKIRTAVKEWLHLPPCTCDAILYSSTRDGGLGITKLAGLIPSVQARRLHRIAQSSDDTMKCFMEKEKMEQLHKKLWIQAGGDRENIPSIWEAPPSSEPPNNVSTNSEWEAPTQKDKFPKPCNWRKNEFKKWTKLASQGRGIVNFERDKISNHWIQYYRRIPHRKLLTALQLRANVYPTREFLARGRQDQYIKACRHCDADNESCAHIIGNCPVTQDARIKRANYICELLLEEAKKKDWVVFKEPHIRDSNKELYKPDLIFVKDGRALVVDVTVRYEAAKSSLEEAAAEKVRKAKHLETEVRHLTNAKDVTFVGFPLGAAGKWHQDNFKLLTELGLSKSRQVKMAETFSTVALFSSVDIVHMFASRARKSMVM

SEQ ID NO: 1099 - protein, 1665 aa, synthetic construct
MAPKKKRKVNISGSSCGSPNSADTSSDFKDLWTKLKECHDREVQGLQVKVTKLKQERILDAQRLEEFFTKNQQLREQQKVLHETIKVLEDRLRAGLCDRCAVTEEHMRKKQQEFENIRQQNLKLITELMNERNTLQEENKKLSEQLQQKIENDQQHQAAELECEEDVIPDSPITAFSFSGVNRLRRKENPHVRYIEQTHTKLEHSVCANEMRKVSKSSTHPQHNPNENEILVADTYDQSQSPMAKAHGTSSYTPDKSSFNLATVVAETLGLGVQEESETQGPMSPLGDELYHCLEGNHKKQPFESGSETPGTSESATPEGSPKRKVSSAEGAAKEEPKRRSARLSAKPPAKVEAKPKKAAAKDKSSDKKVQTKGKRGAKGKQAEVANQETKEDLPAENGETKTEESPASDEAGEKEAKSDSGSETPGTSESATPESYEQLAPQPCVGETLHSSLPRDSELFVPEEGSSEKESEDAPKTSPPTPGKHGLEQTGEEKVMVTVPDKNPPCPCCGTRVNSVLNLIEHLKVSHGKRGVCFRCAKCGKENSNYHSVVCHFKKCRGPETEKAPAGEWICEVCNRDFTTKIGLGQHKRLAHPAVRNQERIVASQPKETSNRGAHKRCWTKEEEELLIRLEAQFEGNKNINKLIAEHITTKTAKQISDKRRLLSRKPAEEPRMEPGTCHHTRRAAASLRTEPEMSHHAQAEDRDNGPGRRPLPGRAAAGGRTMDEIRRHPDKGNGQQRPTKQKSEEQLQAYYKKTLEERLSAGALNTFPRAFKQVMEGRDIKLVINQTAQDCFGCLESISQIRTATRDKKDTVTREKHPKKPFQKWMKKRAIKKGNYLRFQRLFYLDRGKLAKIILDDIECLSCDIPLSEIYSVFKTRWETTGSFKSLGDFKTYGKADNTAFRELITAKEIEKNVQEMSKGSAPGPDGITLGDVVKMDPEFSRTMEIFNLWLTTGKIPDMVRGCRTVLIPKSSKPDRLKDINNWRPITIGSILLRLFSRIVTARLSKACPLNPRQRGFIRAAGCSENLKLLQTIIWSAKREHRPLGVVFVDIAKAFDTVSHQHIIHALQQREVDPHIVGLVSNMYENISTYITTKRNTHTDKIQIRVGVKQGDPMSPLLFNLAMDPLLCKLEESGKGYHRGQSSITAMAFADDLVLLSDSWENMNTNISILETFCNLTGLKTQGQKCHGFYIKPTKKSYTINDCAAWTINGTPLNMIDPGESEKYLGLQFDPWIGIARSGLSTKLDFWLQRIDQAPLKPLQKLDILKTYTIPRLIYIADHSEVKSALLETLDQKIRTAVKEWLHLPPCTCDAILYSSTRDGGLGITKLAGLIPSVQARRLHRIAQSSDDTMKCFMEKEKMEQLHKKLWIQAGGDRENIPSIWEAPPSSEPPNNVSTNSEWEAPTQKDKFPKPCNWRKNEFKKWTKLASQGRGIVNFERDKISNHWIQYYRRIPHRKLLTALQLRANVYPTREFLARGRQDQYIKACRHCDADNESCAHIIGNCPVTQDARIKRANYICELLLEEAKKKDWVVFKEPHIRDSNKELYKPDLIFVKDGRALVVDVTVRYEAAKSSLEEAAAEKVRKAKHLETEVRHLTNAKDVTFVGFPLGARGKWHQDNFKLLTELGLSKSRQVKMAETFSTVALFSSVDIVHMFASRARKSMVM

SEQ ID NO: 1100 - protein, 1665 aa, synthetic construct
MAPKKKRKVNISGSSCGSPNSADTSSDFKDLWTKLKECHDREVQGLQVKVTKLKQERILDAQRLEEFFTKNQQLREQQKVLHETIKVLEDRLRAGLCDRCAVTEEHMRKKQQEFENIRQQNLKLITELMNERNTLQEENKKLSEQLQQKIENDQQHQAAELECEEDVIPDSPITAFSFSGVNRLRRKENPHVRYIEQTHTKLEHSVCANEMRKVSKSSTHPQHNPNENEILVADTYDQSQSPMAKAHGTSSYTPDKSSFNLATVVAETLGLGVQEESETQGPMSPLGDELYHCLEGNHKKQPFESGSETPGTSESATPEGSPKRKVSSAEGAAKEEPKRRSARLSAKPPAKVEAKPKKAAAKDKSSDKKVQTKGKRGAKGKQAEVANQETKEDLPAENGETKTEESPASDEAGEKEAKSDSGSETPGTSESATPESYEQLAPQPCVGETLHSSLPRDSELFVPEEGSSEKESEDAPKTSPPTPGKHGLEQTGEEKVMVTVPDKNPPCPCCGTRVNSVLNLIEHLKVSHGKRGVCFRCAKCGKENSNYHSVVCHFKKCRGPETEKAPAGEWICEVCNRDFTTKIGLGQHKRLAHPAVRNQERIVASQPKETSNRGAHKRCWTKEEEELLIRLEAQFEGNKNINKLIAEHITTKTAKQISDKRRLLSRKPAEEPREEPGTCHHTRRAAASLRTEPEMSHHAQAEDRDNGPGRRPLPGRAAAGGRTMDEIRRHPDKGNGQQRPTKQKSEEQLQAYYKKTLEERLSAGALNTFPRAFKQVMEGRDIKLVINQTAQDCFGCLESISQIRTATRDKKDTVTREKHPKKPFQKWMKKRAIKKGNYLRFQRLFYLDRGKLAKIILDDIECLSCDIPLSEIYSVFKTRWETTGSFKSLGDFKTYGKADNTAFRELITAKEIEKNVQEMSKGSAPGPDGITLGDVVKMDPEFSRTMEIFNLWLTTGKIPDMVRGCRTVLIPKSSKPDRLKDINNWRPITIGSILLRLFSRIVTARLSKACPLNPRQRGFIRAAGCSENLKLLQTIIWSAKREHRPLGVVFVDIAKAFDTVSHQHIIHALQQREVDPHIVGLVSNMYENISTYITTKRNTHTDKIQIRVGVKQGDPMSPLLFNLAMDPLLCKLEESGKGYHRGQSSITAMAFADDLVLLSDSWENMKTNISILETFCNLTGLKTQGQKCHGFYIKPTKKSYTINDCAAWTINGTPLNMIDPGESEKYLGLQFDPWIGIARSGLSTKLDFWLQRIDQAPLKPLQKTDILKTYTIPRLIYIADHSEVKSALLETLDQKIRTAVKEWLHLPPCTCDAILYSSTRDGGLGITKLAGLIPSVQARRLHRIAQSSDDTMKCFMEKEKMEQLHKKLWIQAGGDRENIPSIWEAPPSSEPPNNVSTNSEWEAPTQKDKFPKPCNWRKNEFKKWTKLASQGRGIVNFERDKISNHWIQYYRRIPHRKLLTALQLRANVYPTREFLARGRQDQYIKACRHCDADNESCAHIIGNCPVTQDARIKRHNYICELLLEEAKKKDWVVFKEPHIRDSNKELYKPDLIFVKDGRALVVDVTVRYEAAKSSLEEAAAEKVRKYKHLETEVRHLTNAKDVTFVGFPLGARGKWHQDNFKLLTELGLSKSRQVKMAETFSTVALFSSVDIVHMFASRARKSMVM

SEQ ID NO: 1101 - protein, 1665 aa, synthetic construct
MAPKKKRKVNISGSSCGSPNSADTSSDFKDLWTKLKECHDREVQGLQVKVTKLKQERILDAQRLEEFFTKNQQLREQQKVLHETIKVLEDRLRAGLCDRCAVTEEHMRKKQQEFENIRQQNLKLITELMNERNTLQEENKKLSEQLQQKIENDQQHQAAELECEEDVIPDSPITAFSFSGVNRLRRKENPHVRYIEQTHTKLEHSVCANEMRKVSKSSTHPQHNPNENEILVADTYDQSQSPMAKAHGTSSYTPDKSSFNLATVVAETLGLGVQEESETQGPMSPLGDELYHCLEGNHKKQPFESGSETPGTSESATPEGSPKRKVSSAEGAAKEEPKRRSARLSAKPPAKVEAKPKKAAAKDKSSDKKVQTKGKRGAKGKQAEVANQETKEDLPAENGETKTEESPASDEAGEKEAKSDSGSETPGTSESATPESYEQLAPQPCVGETLHSSLPRDSELFVPEEGSSEKESEDAPKTSPPTPGKHGLEQTGEEKVMVTVPDKNPPCPCCGTRVNSVLNLIEHLKVSHGKRGVCFRCAKCGKENSNYHSVVCHFKKCRGPETEKAPAGEWICEVCNRDFTTKIGLGQHKRLAHPAVRNQERIVASQPKETSNRGAHKRCWTKEEEELLIRLEAQFEGNKNINKLIAEHITTKTAKQISDKRRLLSRKPAEEPREEPGTCHHTRRAAASLRTEPEMSHHAQAEDRDNGPGRRPLPGRAAAGGRTMDEIRRHPDKGNGQQRPTKQKSEEQLQAYYKKTLEERLSAGALNTFPRAFKQVMEGRDIKLVINQTAQDCFGCLESISQIRTATRDKKDTVTREKHPKKPFQKWMKKRAIKKGNYLRFQRLFYLDRGKLAKIILDDIECLSCDIPLSEIYSVFKTRWETTGSFKSLGDFKTYGKADNTAFRELITAKEIEKNVQEMSKGSAPGPDGITLGDVVKMDPEFSRTMEIFNLWLTTGKIPDMVRGCRTVLIPKSSKPDRLKDINNWRPITIGSILLRLFSRIVTARLSKACPLNPRQRGFIRAAGCSENLKLLQTIIWSAKREHRPLGVVFVDIAKAFDTVSHQHIIHALQQREVDPHIVGLVSNMYENISTYITTKRNTHTDKIQIRVGVKQGDPMSPLLFNLAMDPLLCKLEESGKGYHRGQSSITAMAFADDLVLLSDSWENMNTNISILETFCNLTGLKTQGQKCHGFYIKPTKKSYTINDCAAWTINGTPLNMIDPGESEKYLGLQFDPWIGIARSGLSTKLDFWLQRIDQAPLKPLQKTDILKTYTIPRLIYIADHSEVKSALLETLDQKIRTAVKEWLHLPPCTCDAILYSSTRDGGLGITKLAGLIPSVQARRLHRIAQSSDDTMKCFMEKEKMEQLHKKLWIQAGGDRENIPSIWEAPPSSEPPNNVSTNSEWEAPTQKDKFPKPCNWRKNEFKKWTKLASQGRGIVNFERDKISNHWIQYYRRIPHRKLLTALQLRANVYPTREFLARGRQDQYIKACRHCDADNESCAHIIGNCPVTQDARIKRHNYICELLLEEAKKKDWVVFKEPHIRDSNGELYKPDLIFVKDGRALVVDVTVRYEAAKSSLEEAAAEKVRKYKHLETEVRHLTNAKDVTFVGFPLGARGKWHQDNFKLLTELGLSKSRQVKMAETFSTVALFSSVDIVHMFASRARKSMVM

SEQ ID NO: 1102 - protein, 1665 aa, synthetic construct
MAPKKKRKVNISGSSCGSPNSADTSSDFKDLWTKLKECHDREVQGLQVKVTKLKQERILDAQRLEEFFTKNQQLREQQKVLHETIKVLEDRLRAGLCDRCAVTEEHMRKKQQEFENIRQQNLKLITELMNERNTLQEENKKLSEQLQQKIENDQQHQAAELECEEDVIPDSPITAFSFSGVNRLRRKENPHVRYIEQTHTKLEHSVCANEMRKVSKSSTHPQHNPNENEILVADTYDQSQSPMAKAHGTSSYTPDKSSFNLATVVAETLGLGVQEESETQGPMSPLGDELYHCLEGNHKKQPFESGSETPGTSESATPEGSPKRKVSSAEGAAKEEPKRRSARLSAKPPAKVEAKPKKAAAKDKSSDKKVQTKGKRGAKGKQAEVANQETKEDLPAENGETKTEESPASDEAGEKEAKSDSGSETPGTSESATPESYEQLAPQPCVGETLHSSLPRDSELFVPEEGSSEKESEDAPKTSPPTPGKHGLEQTGEEKVMVTVPDKNPPCPCCGTRVNSVLNLIEHLKVSHGKRGVCFRCAKCGKENSNYHSVVCHFKKCRGPETEKAPAGEWICEVCNRDFTTKIGLGQHKRLAHPAVRNQERIVASQPKETSNRGAHKRCWTKEEEELLIRLEAQFEGNKNINKLIAEHITTKTAKQISDKRRLLSRKPAEEPREEPGTCHHTRRAAASLRTEPEMSHHAQAEDRDNGPGRRPLPGRAAAGGRTMDEIRRHPDKGNGQQRPTKQKSEEQLQAYYKKTLEERLSAGALNTFPRAFKQVMEGRDIKLVINQTAQDCFGCLESISQIRTATRDKKDTVTREKHPKKPFQKWMKKRAIKKGNYLRFQRLFYLDGGKLAKIILDDIECLSCDIPLSEIYSVFKTRWETTGSFKSLGDFKTYGKADNTAFRELITAKEIEKNVQEMSKGSAPGPDGITLGDVVKMDPEFSRTMEIFNLWLTTGKIPDMVRGCRTVLIPKSSKPDRLKDINNWRPITIGSILLRLFSRIVTARLSKACPLNPRQRGFIRAAGCSENLKLLQTIIWSAKREHRPLGVVFVDIAKAFDTVSHQHIIHALQQREVDPHIVGLVSNMYENISTYITTKRNTHTDKIQIRVGVKQGDPMSPLLFNLAMDPLLCKLEESGKGYHRGQSSITAMAFADDLVLLSDSWENMNTNISILETFCNLTGLKTQGQKCHGFYIKPTKKSYTINDCAAWTINGTPLNMIDPGESEKYLGLQFDPWIGIARSGLSTKLDFWLQRIDQAPLKPLQKTDILKTYTIPRLIYIADHSEVKSALLETLDQKIRTAVKEWLHLPPCTCDAILYSSTRDGGLGITKLAGLIPSVQARRLHRIAQSSDDTMKCFMEKEKMEQLHKKLWIQAGGDRENIPSIWEAPPSSEPPNNVSTNSEWEAPTQKDKFPKPCNWRKNEFKKWTKLASQGRGIVNFERDKISNHWIQYYRRIPHRKLLTALQLRANVYPTREFLARGRQDQYIKACRHCDADNESCAHIIGNCPVTQDARIKRHNYICELLLEEAKKKDWVVFKEPHIRDSNKELYKPDLIFVKDGRALVVDVTVRYEAAKSSLEEAAAEKVRKYKHLETEVRHLTNAKDVTFVGFPLGARGKWHQDNFKLLTELGLSKSRQVKMAETFSTVALFSSVDIVHMFASRARKSMVM

SEQ ID NO: 1103 - protein, 1665 aa, synthetic construct
MAPKKKRKVNISGSSCGSPNSADTSSDFKDLWTKLKECHDREVQGLQVKVTKLKQERILDAQRLEEFFTKNQQLREQQKVLHETIKVLEDRLRAGLCDRCAVTEEHMRKKQQEFENIRQQNLKLITELMNERNTLQEENKKLSEQLQQKIENDQQHQAAELECEEDVIPDSPITAFSFSGVNRLRRKENPHVRYIEQTHTKLEHSVCANEMRKVSKSSTHPQHNPNENEILVADTYDQSQSPMAKAHGTSSYTPDKSSFNLATVVAETLGLGVQEESETQGPMSPLGDELYHCLEGNHKKQPFESGSETPGTSESATPEGSPKRKVSSAEGAAKEEPKRRSARLSAKPPAKVEAKPKKAAAKDKSSDKKVQTKGKRGAKGKQAEVANQETKEDLPAENGETKTEESPASDEAGEKEAKSDSGSETPGTSESATPESYEQLAPQPCVGETLHSSLPRDSELFVPEEGSSEKESEDAPKTSPPTPGKHGLEQTGEEKVMVTVPDKNPPCPCCGTRVNSVLNLIEHLKVSHGKRGVCFRCAKCGKENSNYHSVVCHFKKCRGPETEKAPAGEWICEVCNRDFTTKIGLGQHKRLAHPAVRNQERIVASQPKETSNRGAHKRCWTKEEEELLIRLEAQFEGNKNINKLIAEHITTKTAKQISDKRRLLSRKPAEEPREEPGTCHHTRRAAASLRTEPEMSHHAQAEDRDNGPGRRPLPGRAAAGGRTMDEIRRHPDKGNGQQRPTKQKSEEQLQAYYKKTLEERLSAGALNTFPRAFKQVMEGRDIKLVINQTAQDCFGCLESISQIRTATRDKKDTVTREKHPKKPFQKWMKKRAIKKGNYLRFQRLFYLDRGKLAKIILDDIECLSCDIPLSEIYSVFKTRWETTGSFKSLGDFKTYGKADNTAFRELITAKEIEKNVQEMSKGSAPGPDGITLGDVVKMDPEFSRTMEIFNLWLTTGKIPDMVRGCRTVLIPKSSKPDRLKDINNWRPITIGSILLRLFSRIVTARLSKACPLNPRQRGFIRAAGCSENLKLLQTIIWSAKREHRPLGVVFVDIAKAFDTVSHQHIIHALQQREVDPHIVGLVSNMYENISTYITTKRNTHTDKIQIRVGVKQGDPMSPLLFNLAMDPLLCKLEESGKGYHRGQSSITAMAFADDLVLLSDSWENMNTNISILETFCNLTGLKTQGQKCHGFYIKPTKKSYTINDCAAWTINGTPLNMIDPGESEKYLGLQFDPWIGIARSGLSTKLDFWLQRIDQAPLKPLQKTDILKTYTIPRLIYIADHSEVKSALLETLDQKIRTAVKEWLHLPPCTCDAILYSSTRDGGLGITKLAGLIPSVQARRLHRIAQSSDDTMKCFMEKEKMEQLHKKLWIQAGGDRENIPSIWEAPPSSEPPNNVSTNSEWEAPTQKDKFPKPCNWRKNEFKKWTKLASQGRGIVNFERDKISNHWIQYYRRIPHRKLLTALQLRANVYPTREFLARGRQDQYIKACRHCDADNESCAHIIGNCPVTQDARIKRHNYICELLLEEAKKKDWVVFKEPHIRDSNKELYKPDLIFVKDGRALVVAVTVRYEAAKSSLEEAAAEKVRKYKHLETEVRHLTNAKDVTFVGFPLGARGKWHQDNFKLLTELGLSKSRQVKMAETFSTVALFSSVDIVHMFASRARKSMVM

SEQ ID NO: 1104 - protein, 1665 aa, synthetic construct
MAPKKKRKVNISGSSCGSPNSADTSSDFKDLWTKLKECHDREVQGLQVKVTKLKQERILDAQRLEEFFTKNQQLREQQKVLHETIKVLEDRLRAGLCDRCAVTEEHMRKKQQEFENIRQQNLKLITELMNERNTLQEENKKLSEQLQQKIENDQQHQAAELECEEDVIPDSPITAFSFSGVNRLRRKENPHVRYIEQTHTKLEHSVCANEMRKVSKSSTHPQHNPNENEILVADTYDQSQSPMAKAHGTSSYTPDKSSFNLATVVAETLGLGVQEESETQGPMSPLGDELYHCLEGNHKKQPFESGSETPGTSESATPEGSPKRKVSSAEGAAKEEPKRRSARLSAKPPAKVEAKPKKAAAKDKSSDKKVQTKGKRGAKGKQAEVANQETKEDLPAENGETKTEESPASDEAGEKEAKSDSGSETPGTSESATPESYEQLAPQPCVGETLHSSLPRDSELFVPEEGSSEKESEDAPKTSPPTPGKHGLEQTGEEKVMVTVPDKNPPCPCCGTRVNSVLNLIEHLKVSHGKRGVCFRCAKCGKENSNYHSVVCHFKKCRGPETEKAPAGEWICEVCNRDFTTKIGLGQHKRLAHPAVRNQERIVASQPKETSNRGAHKRCWTKEEEELLIRLEAQFEGNKNINKLIAEHITTKTAKQISDKRRLLSRKPAEEPREEPGTCHHTRRAAASLRTEPEMSHHAQAEDRDNGPGRRPLPGRAAAGGRTMDEIRRHPDKGNGQQRPTKQKSEEQLQAYYKKTLEERLSAGALNTFPRAFKQVMEGRDIKLVINQTAQDCFGCLESISQIRTATRDKKDTVTREKHPKKPFQKWMKKRAIKKGNYLRFQRLFYLRRGKLAKIILDDIECLSCDIPLSEIYSVFKTRWETTGSFKSLGDFKTYGKADNTAFRELITAKEIEKNVQEMSKGSAPGPDGITLGDVVKMDPEFSRTMEIFNLWLTTGKIPDMVRGCRTVLIPKSSKPDRLKDINNWRPITIGSILLRLFSRIVTARLSKACPLNPRQRGFIRAAGCSENLKLLQTIIWSAKREHRPLGVVFVDIAKAFDTVSHQHIIHALQQREVDPHIVGLVSNMYENISTYITTKRNTHTDKIQIRVGVKQGDPMSPLLFNLAMDPLLCKLEESGKGYHRGQSSITAMAFADDLVLLSDSWENMNTNISILETFCNLTGLKTQGQKCHGFYIKPTKKSYTINDCAAWTINGTPLNMIDPGESEKYLGLQFDPWIGIARSGLSTKLDFWLQRIDQAPLKPLQKTDILKTYTIPRLIYIADHSEVKSALLETLDQKIRTAVKEWLHLPPCTCDAILYSSTRDGGLGITKLAGLIPSVQARRLHRIAQSSDDTMKCFMEKEKMEQLHKKLWIQAGGDRENIPSIWEAPPSSEPPNNVSTNSEWEAPTQKDKFPKPCNWRKNEFKKWTKLASQGRGIVNFERDKISNHWIQYYRRIPHRKLLTALQLRANVYPTREFLARGRQDQYIKACRHCDADNESCAHIIGNCPVTQDARIKRHNYICELLLEEAKKKDWVVFKEPHIRDSNKELYKPDLIFVKDGRALVVDVTVRYEAAKSSLEEAAAEKVRKYKHLETEVRHLTNAKDVTFVGFPLGARGKWHQDNFKLLTELGLSKSRQVKMAETFSTVALFSSVDIVHMFASRARKSMVM

SEQ ID NO: 1105 - protein, 1665 aa, synthetic construct
MAPKKKRKVNISGSSCGSPNSADTSSDFKDLWTKLKECHDREVQGLQVKVTKLKQERILDAQRLEEFFTKNQQLREQQKVLHETIKVLEDRLRAGLCDRCAVTEEHMRKKQQEFENIRQQNLKLITELMNERNTLQEENKKLSEQLQQKIENDQQHQAAELECEEDVIPDSPITAFSFSGVNRLRRKENPHVRYIEQTHTKLEHSVCANEMRKVSKSSTHPQHNPNENEILVADTYDQSQSPMAKAHGTSSYTPDKSSFNLATVVAETLGLGVQEESETQGPMSPLGDELYHCLEGNHKKQPFESGSETPGTSESATPEGSPKRKVSSAEGAAKEEPKRRSARLSAKPPAKVEAKPKKAAAKDKSSDKKVQTKGKRGAKGKQAEVANQETKEDLPAENGETKTEESPASDEAGEKEAKSDSGSETPGTSESATPESYEQLAPQPCVGETLHSSLPRDSELFVPEEGSSEKESEDAPKTSPPTPGKHGLEQTGEEKVMVTVPDKNPPCPCCGTRVNSVLNLIEHLKVSHGKRGVCFRCAKCGKENSNYHSVVCHFKKCRGPETEKAPAGEWICEVCNRDFTTKIGLGQHKRLAHPAVRNQERIVASQPKETSNRGAHKRCWTKEEEELLIRLEAQFEGNKNINKLIAEHITTKTAKQISDKRRLLSRKPAEEPREEPGTCHHTRRAAASLRTEPEMSHHAQAEDRDNGPGRRPLPGRAAAGGRTMDEIRRHPDKGNGQQRPTKQKSEEQLQAYYKKTLEERLSAGALNTFPRAFKQVMEGRDIKLVINQTAQDCFGCLESISQIRTATRDKKDTVTREKHPKKPFQKWMKKRAIKKGNYLRFQRLFYLDRGKLAKIILDDIECLSCDIPLSEIYSVFKTRWETTGSFKSLGDFKTYGKADNTAFRELITAKEIEKNVQEMSKGSAPGPDGITLGDVVKMDPEFSRTMEIFNLWLTTGKIPDMVRGCRTVLIPKSSKPDRLKDINNWRPITIGSILLRLFSRIVTARLSKACPLNPRQRGFIRAAGCSENLKLLQTIIWSAKREHRPLGVVFVDIAKAFDTVSHQHIIHALQQREVDPHIVGLVSNMYENISTYITTKRNTHTDKIQIRVGVKQGDPMSPLLFNLAMDPLLCKLEESGKGYHRGQSSITAMAFADDLVLLSDSWENMNTNISILETFCNLTGLKTQGQKCHGFYIKPTKKSYTINDCAAWTINGTPLNMIDPGESEKYLGLQFDPWIGIARSGLSTKLDFWLQRIDQAPLKPLQKTDILKRYTIPRLIYIADHSEVKSALLETLDQKIRTAVKEWLHLPPCTCDAILYSSTRDGGLGITKLAGLIPSVQARRLHRIAQSSDDTMKCFMEKEKMEQLHKKLWIQAGGDRENIPSIWEAPPSSEPPNNVSTNSEWEAPTQKDKFPKPCNWRKNEFKKWTKLASQGRGIVNFERDKISNHWIQYYRRIPHRKLLTALQLRANVYPTREFLARGRQDQYIKACRHCDADNESCAHIIGNCPVTQDARIKRHNYICELLLEEAKKKDWVVFKEPHIRDSNKELYKPDLIFVKDGRALVVDVTVRYEAAKSSLEEAAAEKVRKYKHLETEVRHLTNAKDVTFVGFPLGARGKWHQDNFKLLTELGLSKSRQVKMAETFSTVALFSSVDIVHMFASRARKSMVM

SEQ ID NO: 1106 - protein, 1665 aa, synthetic construct
MAPKKKRKVNISGSSCGSPNSADTSSDFKDLWTKLKECHDREVQGLQVKVTKLKQERILDAQRLEEFFTKNQQLREQQKVLHETIKVLEDRLRAGLCDRCAVTEEHMRKKQQEFENIRQQNLKLITELMNERNTLQEENKKLSEQLQQKIENDQQHQAAELECEEDVIPDSPITAFSFSGVNRLRRKENPHVRYIEQTHTKLEHSVCANEMRKVSKSSTHPQHNPNENEILVADTYDQSQSPMAKAHGTSSYTPDKSSFNLATVVAETLGLGVQEESETQGPMSPLGDELYHCLEGNHKKQPFESGSETPGTSESATPEGSPKRKVSSAEGAAKEEPKRRSARLSAKPPAKVEAKPKKAAAKDKSSDKKVQTKGKRGAKGKQAEVANQETKEDLPAENGETKTEESPASDEAGEKEAKSDSGSETPGTSESATPESYEQLAPQPCVGETLHSSLPRDSELFVPEEGSSEKESEDAPKTSPPTPGKHGLEQTGEEKVMVTVPDKNPPCPCCGTRVNSVLNLIEHLKVSHGKRGVCFRCAKCGKENSNYHSVVCHFKKCRGPETEKAPAGEWICEVCNRDFTTKIGLGQHKRLAHPAVRNQERIVASQPKETSNRGAHKRCWTKEEEELLIRLEAQFEGNKNINKLIAEHITTKTAKQISDKRRLLSRKPAEEPREEPGTCHHTRRAAASLRTEPEMSHHAQAEDRDNGPGRRPLPGRAAAGGRTMDEIRRHPDKGNGQQRPTKQKSEEQLQAYYKKTLEERLSAGALNTFPRAFKQVMEGRDIKLVINQTAQDCFGCLESIKQIRTATRDKKDTVTREKHPKKPFQKWMKKRAIKKGNYLRFQRLFYLDRGKLAKIILDDIECLSCDIPLSEIYSVFKTRWETTGSFKSLGDFKTYGKADNTAFRELITAKEIEKNVQEMSKGSAPGPDGITLGDVVKMDPEFSRTMEIFNLWLTTGKIPDMVRGCRTVLIPKSSKPDRLKDINNWRPITIGSILLRLFSRIVTARLSKACPLNPRQRGFIRAAGCSENLKLLQTIIWSAKREHRPLGVVFVDIAKAFDTVSHQHIIHALQQREVDPHIVGLVSNMYENISTYITTKRNTHTDKIQIRVGVKQGDPMSPLLFNLAMDPLLCKLEESGKGYHRGQSSITAMAFADDLVLLSDSWENMNTNISILETFCNLTGLKTQGQKCHGFYIKPTKKSYTINDCAAWTINGTPLNMIDPGESEKYLGLQFDPWIGIARSGLSTKLDFWLQRIDQAPLKPLQKTDILKTYTIPRLIYIADHSEVKSALLETLDQKIRTAVKEWLHLPPCTCDAILYSSTRDGGLGITKLAGLIPSVQARRLHRIAQSSDDTMKCFMEKEKMEQLHKKLWIQAGGDRENIPSIWEAPPSSEPPNNVSTNSEWEAPTQKDKFPKPCNWRKNEFKKWTKLASQGRGIVNFERDKISNHWIQYYRRIPHRKLLTALQLRANVYPTREFLARGRQDQYIKACRHCDADNESCAHIIGNCPVTQDARIKRHNYICELLLEEAKKKDWVVFKEPHIRDSNKELYKPDLIFVKDGRALVVDVTVRYEAAKSSLEEAAAEKVRKYKHLETEVRHLTNAKDVTFVGFPLGARGKWHQDNFKLLTELGLSKSRQVKMAETFSTVALFSSVDIVHMFASRARKSMVM

SEQ ID NO: 1107 - protein, 1665 aa, synthetic construct
MAPKKKRKVNISGSSCGSPNSADTSSDFKDLWTKLKECHDREVQGLQVKVTKLKQERILDAQRLEEFFTKNQQLREQQKVLHETIKVLEDRLRAGLCDRCAVTEEHMRKKQQEFENIRQQNLKLITELMNERNTLQEENKKLSEQLQQKIENDQQHQAAELECEEDVIPDSPITAFSFSGVNRLRRKENPHVRYIEQTHTKLEHSVCANEMRKVSKSSTHPQHNPNENEILVADTYDQSQSPMAKAHGTSSYTPDKSSFNLATVVAETLGLGVQEESETQGPMSPLGDELYHCLEGNHKKQPFESGSETPGTSESATPEGSPKRKVSSAEGAAKEEPKRRSARLSAKPPAKVEAKPKKAAAKDKSSDKKVQTKGKRGAKGKQAEVANQETKEDLPAENGETKTEESPASDEAGEKEAKSDSGSETPGTSESATPESYEQLAPQPCVGETLHSSLPRDSELFVPEEGSSEKESEDAPKTSPPTPGKHGLEQTGEEKVMVTVPDKNPPCPCCGTRVNSVLNLIEHLKVSHGKRGVCFRCAKCGKENSNYHSVVCHFKKCRGPETEKAPAGEWICEVCNRDFTTKIGLGQHKRLAHPAVRNQERIVASQPKETSNRGAHKRCWTKEEEELLIRLEAQFEGNKNINKLIAEHITTKTAKQISDKRRLLSRKPAEEPREEPGTCHHTRRAAASLRTEPEMSHHAQAEDRDNGPGRRPLPGRAAAGGRTMDEIRRHPDKGNGQQRPTKQKSEEQLQAYYKKTLEERLSAGALNTFPRAFKQVMEGRDIKLVINQTAQDCFGCLESISQIRTATRDKKDTVTREKHPKKPFQKWMKKRAIKKGNYLRFQRLFYLDRGKLAKIILDDIECLSCDIPLSEIYSVFKTRWETTGSFKSLGDFKTYGKADNTAFRELITAKEIEKNVQEMSKGSAPGPDGITLGDVVKMDPEFSRTMEIFNLWLTTGKIPDMVRGCRTVLIPKSSKPDRLKDINNWRPITIGSILLRLFSRIVTARLSKACPLNPRQRGFIRAAGCSENLKLLQTIIWSAKREHRPLGVVFVDIAKAFDTISHQHIIHALQQREVDPHIVGLVSNMYENISTYITTKRNTHTDKIQIRVGVKQGDPMSPLLFNLAMDPLLCKLEESGKGYHRGQSSITAMAFADDLVLLSDSWENMNTNISILETFCNLTGLKTQGQKCHGFYIKPTKKSYTINDCAAWTINGTPLNMIDPGESEKYLGLQFDPWIGIARSGLSTKLDFWLQRIDQAPLKPLQKTDILKTYTIPRLIYIADHSEVKSALLETLDQKIRTAVKEWLHLPPCTCDAILYSSTRDGGLGITKLAGLIPSVQARRLHRIAQSSDDTMKCFMEKEKMEQLHKKLWIQAGGDRENIPSIWEAPPSSEPPNNVSTNSEWEAPTQKDKFPKPCNWRKNEFKKWTKLASQGRGIVNFERDKISNHWIQYYRRIPHRKLLTALQLRANVYPTREFLARGRQDQYIKACRHCDADNESCAHIIGNCPVTQDARIKRHNYICELLLEEAKKKDWVVFKEPHIRDSNKELYKPDLIFVKDGRALVVDVTVRYEAAKSSLEEAAAEKVRKYKHLETEVRHLTNAKDVTFVGFPLGARGKWHQDNFKLLTELGLSKSRQVKMAETFSTVALFSSVDIVHMFASRARKSMVM

SEQ ID NO: 1108 - protein, 1665 aa, synthetic construct
MAPKKKRKVNISGSSCGSPNSADTSSDFKDLWTKLKECHDREVQGLQVKVTKLKQERILDAQRLEEFFTKNQQLREQQKVLHETIKVLEDRLRAGLCDRCAVTEEHMRKKQQEFENIRQQNLKLITELMNERNTLQEENKKLSEQLQQKIENDQQHQAAELECEEDVIPDSPITAFSFSGVNRLRRKENPHVRYIEQTHTKLEHSVCANEMRKVSKSSTHPQHNPNENEILVADTYDQSQSPMAKAHGTSSYTPDKSSFNLATVVAETLGLGVQEESETQGPMSPLGDELYHCLEGNHKKQPFESGSETPGTSESATPEGSPKRKVSSAEGAAKEEPKRRSARLSAKPPAKVEAKPKKAAAKDKSSDKKVQTKGKRGAKGKQAEVANQETKEDLPAENGETKTEESPASDEAGEKEAKSDSGSETPGTSESATPESYEQLAPQPCVGETLHSSLPRDSELFVPEEGSSEKESEDAPKTSPPTPGKHGLEQTGEEKVMVTVPDKNPPCPCCGTRVNSVLNLIEHLKVSHGKRGVCFRCAKCGKENSNYHSVVCHFKKCRGPETEKAPAGEWICEVCNRDFTTKIGLGQHKRLAHPAVRNQERIVASQPKETSNRGAHKRCWTKEEEELLIRLEAQFEGNKNINKLIAEHITTKTAKQISDKRRLLSRKPAEEPREEPGTCHHTRRAAASLRTEPEMSHHAQAEDRDNGPGRRPLPGRAAAGGRTMDEIRRHPDKGNGQQRPTKQKSEEQLQAYYKKTLEERLSAGALNTFPRAFKQVMEGRDIKLVINQTAQDCFGCLESISQIRTATRDKKDTVTREKHPKKPFQKWMKKRAIKKGNYLRFQRLFYLDRGKLAKIILDDIECLSCDIPLSEIYSVFKTRWETTGSFKSLGDFKTYGKADNTAFRELITAKEIEKNVQEMSKGSAPGPDGITLGDVVKMDPEFSRTMEIFNLWLTTGKIPDMVRGCRTVLIPKSSKPDRLKDINNWRPITIGSILLRLFSRIVTARLSKACPLNPRQRGFIRAAGCSENLKLLQTIIWSAKREHRPLGVVFVDIAKAFDTVSHQHIIHALQQREVDPHIVGLVSNMYENISTYITTKRNTHTDKIQIRVGVKQGDPMSPLLFNLAMDPLLCKLEESGKGYHRGQSSITAMAFADDLVLLSDSWENMNTNISILETFCNLTGLKTQGQKCHGFYIKPTKKSYTINDCAAWTINGTPLNMIDPGESEKYLGLQFDPWIGIARSGLSTKLDFWLQRIDQAPLKPLQKTDILKTYTIPRLIYIADHSEVKSALLETLDQKIRTAVKEWLHLPPCTCDAILYSSTRDGGLGITKLAGLIPSVQARRLHRIAQSSDDTMKCFMEKEKMEQLHKKLWIQAGGDRENIPSIWEAPPSSEPPNNVSTNSEWEAPTQKDKFPKPCNWRKNEFKKWTKLASQGRGIVNFERDKISNHWIQYYRRIPHRKLLTALQLRANVYPTREFLARGRQDQYIKACRHCDADNESCAHIIGNCPVTQDARIKRHNYICELLLEEAKKKDWVVFKEPHIRDSNKELYKPDLILVKDGRALVVDVTVRYEAAKSSLEEAAAEKVRKYKHLETEVRHLTNAKDVTFVGFPLGARGKWHQDNFKLLTELGLSKSRQVKMAETFSTVALFSSVDIVHMFASRARKSMVM

SEQ ID NO: 1109 - protein, 1665 aa, synthetic construct
MAPKKKRKVNISGSSCGSPNSADTSSDFKDLWTKLKECHDREVQGLQVKVTKLKQERILDAQRLEEFFTKNQQLREQQKVLHETIKVLEDRLRAGLCDRCAVTEEHMRKKQQEFENIRQQNLKLITELMNERNTLQEENKKLSEQLQQKIENDQQHQAAELECEEDVIPDSPITAFSFSGVNRLRRKENPHVRYIEQTHTKLEHSVCANEMRKVSKSSTHPQHNPNENEILVADTYDQSQSPMAKAHGTSSYTPDKSSFNLATVVAETLGLGVQEESETQGPMSPLGDELYHCLEGNHKKQPFESGSETPGTSESATPEGSPKRKVSSAEGAAKEEPKRRSARLSAKPPAKVEAKPKKAAAKDKSSDKKVQTKGKRGAKGKQAEVANQETKEDLPAENGETKTEESPASDEAGEKEAKSDSGSETPGTSESATPESYEQLAPQPCVGETSHSSLPRDSELFVPEEGSSEKESEDAPKTSPPTPGKHGLEQTGEEKVMVTVPDKNPPCPCCGTRVNSVLNLIEHLKVSHGKRGVCFRCAKCGKENSNYHSVVCHFKKCRGPETEKAPAGEWICEVCNRDFTTKIGLGQHKRLAHPAVRNQERIVASQPKETSNRGAHKRCWTKEEEELLIRLEAQFEGNKNINKLIAEHITTKTAKQISDKRRLLSRKPAEEPREEPGTCHHTRRAAASLRTEPEMSHHAQAEDRDNGPGRRPLPGRAAAGGRTMDEIRRHPDKGNGQQRPTKQKSEEQLQAYYKKTLEERLSAGALNTFPRAFKQVMEGRDIKLVINQTAQDCFGCLESISQIRTATRDKKDTVTREKHPKKPFQKWMKKRAIKKGNYLRFQRLFYLDRGKLAKIILDDIECLSCDIPLSEIYSVFKTRWETTGSFKSLGDFKTYGKADNTAFRELITAKEIEKNVQEMSKGSAPGPDGITLGDVVKMDPEFSRTMEIFNLWLTTGKIPDMVRGCRTVLIPKSSKPDRLKDINNWRPITIGSILLRLFSRIVTARLSKACPLNPRQRGFIRAAGCSENLKLLQTIIWSAKREHRPLGVVFVDIAKAFDTVSHQHIIHALQQREVDPHIVGLVSNMYENISTYITTKRNTHTDKIQIRVGVKQGDPMSPLLFNLAMDPLLCKLEESGKGYHRGQSSITAMAFADDLVLLSDSWENMNTNISILETFCNLTGLKTQGQKCHGFYIKPTKDSYTINDCAAWTINGTPLNMIDPGESEKYLGLQFDPWIGIARSGLSTKLDFWLQRIDQAPLKPLQKTDILKTYTIPRLIYIADHSEVKSALLETLDQKIRTAVKEWLHLPPCTCDAILYSSTRDGGLGITKLAGLIPSVQARRLHRIAQSSDDTMKCFMEKEKMEQLHKKLWIQAGGDRENIPSIWEAPPSSEPPNNVSTNSEWEAPTQKDKFPKPCNWRKNEFKKWTKLASQGRGIVNFERDKISNHWIQYYRRIPHRKLLTALQLRANVYPTREFLARGRQDQYIKACRHCDADNESCAHIIGNCPVTQDARIKRHNYICELLLEEAKKKDWVVFKEPHIRDSNKELYKPDLIFVKDGRALVVDVTVRYEAAKSSLEEAAAEKVRKYKHLETEVRHLTNAKDVTFVGFPLGARGKWHQDNFKLLTELGLSKSRQVKMAETFSTVALFSSVDIVHMFASRARKSMVM

SEQ ID NO: 1110 - protein, 1665 aa, synthetic construct
MAPKKKRKVNISGSSCGSPNSADTSSDFKDLWTKLKECHDREVQGLQVKVTKLKQERILDAQRLEEFFTKNQQLREQQKVLHETIKVLEDRLRAGLCDRCAVTEEHMRKKQQEFENIRQQNLKLITELMNERNTLQEENKKLSEQLQQKIENDQQHQAAELECEEDVIPDSPITAFSFSGVNRLRRKENPHVRYIEQTHTKLEHSVCANEMRKVSKSSTHPQHNPNENEILVADTYDQSQSPMAKAHGTSSYTPDKSSFNLATVVAETLGLGVQEESETQGPMSPLGDELYHCLEGNHKKQPFESGSETPGTSESATPEGSPKRKVSSAEGAAKEEPKRRSARLSAKPPAKVEAKPKKAAAKDKSSDKKVQTKGKRGAKGKQAEVANQETKEDLPAENGETKTEESPASDEAGEKEAKSDSGSETPGTSESATPESYEQLAPQPCVGETLHSSLPRDSELFVPEEGSSEKESESAPKTSPPTPGKHGLEQTGEEKVMVTVPDKNPPCPCCGTRVNSVLNLIEHLKVSHGKRGVCFRCAKCGKENSNYHSVVCHFKKCRGPETEKAPAGEWICEVCNRDFTTKIGLGQHKRLAHPAVRNQERIVASQPKETSNRGAHKRCWTKEEEELLIRLEAQFEGNKNINKLIAEHITTKTAKQISDKRRLLSRKPAEEPREEPGTCHHTRRAAASLRTEPEMSHHAQAEDRDNGPGRRPLPGRAAAGGRTMDEIRRHPDKGNGQQRPTKQKSEEQLQAYYKKTLEERLSAGALNTFPRAFKQVMEGRDIKLVINQTAQDCFGCLESISQIRTATRDKKDTVTREKHPKKPFQKWMKKRAIKKGNYLRFQRLFYLDRGKLAKIILDDIECLSCDIPLSEIYSVFKTRWETTGSFKSLGDFKTYGKADNTAFRELITAKEIEKNVQEMSKGSAPGPDGITLGDVVKMDPEFSRTMEIFNLWLTTGKIPDMVRGCRTVLIPKSSKPDRLKDINNWRPITIGSILLRLFSRIVTARLSKACPLNPRQRGFIRAAGCSENLKLLQTIIWSAKREHRPLGVVFVDIAKAFDTVSHQHIIHALQQREVDPHIVGLVSNMYENISTYITTKRNTHTDKIQIRVGVKQGDPMSPLLFNLAMDPLLCKLEESGKGYHRGQSSITAMAFADDLVLLSDSWENMNTNISILETFCNLTGLKTQGQKCHGFYIKPTKDSYTINDCAAWTINGTPLNMIDPGESEKYLGLQFDPWIGIARSGLSTKLDFWLQRIDQAPLKPLQKTDILKTYTIPRLIYIADHSEVKSALLETLDQKIRTAVKEWLHLPPCTCDAILYSSTRDGGLGITKLAGLIPSVQARRLHRIAQSSDDTMKCFMEKEKMEQLHKKLWIQAGGDRENIPSIWEAPPSSEPPNNVSTNSEWEAPTQKDKFPKPCNWRKNEFKKWTKLASQGRGIVNFERDKISNHWIQYYRRIPHRKLLTALQLRANVYPTREFLARGRQDQYIKACRHCDADNESCAHIIGNCPVTQDARIKRHNYICELLLEEAKKKDWVVFKEPHIRDSNKELYKPDLIFVKDGRALVVDVTVRYEAAKSSLEEAAAEKVRKYKHLETEVRHLTNAKDVTFVGFPLGARGKWHQDNFKLLTELGLSKSRQVKMAETFSTVALFSSVDIVHMFASRARKSMVM

SEQ ID NO: 1111 - protein, 1665 aa, synthetic construct
MAPKKKRKVNISGSSCGSPNSADTSSDFKDLWTKLKECHDREVQGLQVKVTKLKQERILDAQRLEEFFTKNQQLREQQKVLHETIKVLEDRLRAGLCDRCAVTEEHMRKKQQEFENIRQQNLKLITELMNERNTLQEENKKLSEQLQQKIENDQQHQAAELECEEDVIPDSPITAFSFSGVNRLRRKENPHVRYIEQTHTKLEHSVCANEMRKVSKSSTHPQHNPNENEILVADTYDQSQSPMAKAHGTSSYTPDKSSFNLATVVAETLGLGVQEESETQGPMSPLGDELYHCLEGNHKKQPFESGSETPGTSESATPEGSPKRKVSSAEGAAKEEPKRRSARLSAKPPAKVEAKPKKAAAKDKSSDKKVQTKGKRGAKGKQAEVANQETKEDLPAENGETKTEESPASDEAGEKEAKSDSGSETPGTSESATPESYEQLAPQPCVGETLHSSLPRDSELFVPEEGSSEKESEDAPKTSPPTPGKHGLEQTGEEKVMVTVPDKNPPCPCCGTRMNSVLNLIEHLKVSHGKRGVCFRCAKCGKENSNYHSVVCHFKKCRGPETEKAPAGEWICEVCNRDFTTKIGLGQHKRLAHPAVRNQERIVASQPKETSNRGAHKRCWTKEEEELLIRLEAQFEGNKNINKLIAEHITTKTAKQISDKRRLLSRKPAEEPREEPGTCHHTRRAAASLRTEPEMSHHAQAEDRDNGPGRRPLPGRAAAGGRTMDEIRRHPDKGNGQQRPTKQKSEEQLQAYYKKTLEERLSAGALNTFPRAFKQVMEGRDIKLVINQTAQDCFGCLESISQIRTATRDKKDTVTREKHPKKPFQKWMKKRAIKKGNYLRFQRLFYLDRGKLAKIILDDIECLSCDIPLSEIYSVFKTRWETTGSFKSLGDFKTYGKADNTAFRELITAKEIEKNVQEMSKGSAPGPDGITLGDVVKMDPEFSRTMEIFNLWLTTGKIPDMVRGCRTVLIPKSSKPDRLKDINNWRPITIGSILLRLFSRIVTARLSKACPLNPRQRGFIRAAGCSENLKLLQTIIWSAKREHRPLGVVFVDIAKAFDTVSHQHIIHALQQREVDPHIVGLVSNMYENISTYITTKRNTHTDKIQIRVGVKQGDPMSPLLFNLAMDPLLCKLEESGKGYHRGQSSITAMAFADDLVLLSDSWENMNTNISILETFCNLTGLKTQGQKCHGFYIKPTKDSYTINDCAAWTINGTPLNMIDPGESEKYLGLQFDPWIGIARSGLSTKLDFWLQRIDQAPLKPLQKTDILKTYTIPRLIYIADHSEVKSALLETLDQKIRTAVKEWLHLPPCTCDAILYSSTRDGGLGITKLAGLIPSVQARRLHRIAQSSDDTMKCFMEKEKMEQLHKKLWIQAGGDRENIPSIWEAPPSSEPPNNVSTNSEWEAPTQKDKFPKPCNWRKNEFKKWTKLASQGRGIVNFERDKISNHWIQYYRRIPHRKLLTALQLRANVYPTREFLARGRQDQYIKACRHCDADNESCAHIIGNCPVTQDARIKRHNYICELLLEEAKKKDWVVFKEPHIRDSNKELYKPDLIFVKDGRALVVDVTVRYEAAKSSLEEAAAEKVRKYKHLETEVRHLTNAKDVTFVGFPLGARGKWHQDNFKLLTELGLSKSRQVKMAETFSTVALFSSVDIVHMFASRARKSMVM

SEQ ID NO: 1112 - protein, 1665 aa, synthetic construct
MAPKKKRKVNISGSSCGSPNSADTSSDFKDLWTKLKECHDREVQGLQVKVTKLKQERILDAQRLEEFFTKNQQLREQQKVLHETIKVLEDRLRAGLCDRCAVTEEHMRKKQQEFENIRQQNLKLITELMNERNTLQEENKKLSEQLQQKIENDQQHQAAELECEEDVIPDSPITAFSFSGVNRLRRKENPHVRYIEQTHTKLEHSVCANEMRKVSKSSTHPQHNPNENEILVADTYDQSQSPMAKAHGTSSYTPDKSSFNLATVVAETLGLGVQEESETQGPMSPLGDELYHCLEGNHKKQPFESGSETPGTSESATPEGSPKRKVSSAEGAAKEEPKRRSARLSAKPPAKVEAKPKKAAAKDKSSDKKVQTKGKRGAKGKQAEVANQETKEDLPAENGETKTEESPASDEAGEKEAKSDSGSETPGTSESATPESYEQLAPQPCVGETLHSSLPRDSELFVPEEGSSEKESEDAPKTSPPTPGKHGLEQTGEEKVMVTVPDKNPPCPCCGTRVNSVLNLIEHLKVSHGKRGVCFRCAKCGKENSNYHSVVCHFKKCRGPETEKAPAGEWICEECNRDFTTKIGLGQHKRLAHPAVRNQERIVASQPKETSNRGAHKRCWTKEEEELLIRLEAQFEGNKNINKLIAEHITTKTAKQISDKRRLLSRKPAEEPREEPGTCHHTRRAAASLRTEPEMSHHAQAEDRDNGPGRRPLPGRAAAGGRTMDEIRRHPDKGNGQQRPTKQKSEEQLQAYYKKTLEERLSAGALNTFPRAFKQVMEGRDIKLVINQTAQDCFGCLESISQIRTATRDKKDTVTREKHPKKPFQKWMKKRAIKKGNYLRFQRLFYLDRGKLAKIILDDIECLSCDIPLSEIYSVFKTRWETTGSFKSLGDFKTYGKADNTAFRELITAKEIEKNVQEMSKGSAPGPDGITLGDVVKMDPEFSRTMEIFNLWLTTGKIPDMVRGCRTVLIPKSSKPDRLKDINNWRPITIGSILLRLFSRIVTARLSKACPLNPRQRGFIRAAGCSENLKLLQTIIWSAKREHRPLGVVFVDIAKAFDTVSHQHIIHALQQREVDPHIVGLVSNMYENISTYITTKRNTHTDKIQIRVGVKQGDPMSPLLFNLAMDPLLCKLEESGKGYHRGQSSITAMAFADDLVLLSDSWENMNTNISILETFCNLTGLKTQGQKCHGFYIKPTKDSYTINDCAAWTINGTPLNMIDPGESEKYLGLQFDPWIGIARSGLSTKLDFWLQRIDQAPLKPLQKTDILKTYTIPRLIYIADHSEVKSALLETLDQKIRTAVKEWLHLPPCTCDAILYSSTRDGGLGITKLAGLIPSVQARRLHRIAQSSDDTMKCFMEKEKMEQLHKKLWIQAGGDRENIPSIWEAPPSSEPPNNVSTNSEWEAPTQKDKFPKPCNWRKNEFKKWTKLASQGRGIVNFERDKISNHWIQYYRRIPHRKLLTALQLRANVYPTREFLARGRQDQYIKACRHCDADNESCAHIIGNCPVTQDARIKRHNYICELLLEEAKKKDWVVFKEPHIRDSNKELYKPDLIFVKDGRALVVDVTVRYEAAKSSLEEAAAEKVRKYKHLETEVRHLTNAKDVTFVGFPLGARGKWHQDNFKLLTELGLSKSRQVKMAETFSTVALFSSVDIVHMFASRARKSMVM

SEQ ID NO: 1113 - protein, 1665 aa, synthetic construct
MAPKKKRKVNISGSSCGSPNSADTSSDFKDLWTKLKECHDREVQGLQVKVTKLKQERILDAQRLEEFFTKNQQLREQQKVLHETIKVLEDRLRAGLCDRCAVTEEHMRKKQQEFENIRQQNLKLITELMNERNTLQEENKKLSEQLQQKIENDQQHQAAELECEEDVIPDSPITAFSFSGVNRLRRKENPHVRYIEQTHTKLEHSVCANEMRKVSKSSTHPQHNPNENEILVADTYDQSQSPMAKAHGTSSYTPDKSSFNLATVVAETLGLGVQEESETQGPMSPLGDELYHCLEGNHKKQPFESGSETPGTSESATPEGSPKRKVSSAEGAAKEEPKRRSARLSAKPPAKVEAKPKKAAAKDKSSDKKVQTKGKRGAKGKQAEVANQETKEDLPAENGETKTEESPASDEAGEKEAKSDSGSETPGTSESATPESYEQLAPQPCVGETLHSSLPRDSELFVPEEGSSEKESEDAPKTSPPTPGKHGLEQTGEEKVMVTVPDKNPPCPCCGTRVNSVLNLIEHLKVSHGKRGVCFRCAKCGKENSNYHSVVCHFKKCRGPETEKAPAGEWICEVCNRDFTTKIGLGQHKRLAHPAVRNQERIVASQPKATSNRGAHKRCWTKEEEELLIRLEAQFEGNKNINKLIAEHITTKTAKQISDKRRLLSRKPAEEPREEPGTCHHTRRAAASLRTEPEMSHHAQAEDRDNGPGRRPLPGRAAAGGRTMDEIRRHPDKGNGQQRPTKQKSEEQLQAYYKKTLEERLSAGALNTFPRAFKQVMEGRDIKLVINQTAQDCFGCLESISQIRTATRDKKDTVTREKHPKKPFQKWMKKRAIKKGNYLRFQRLFYLDRGKLAKIILDDIECLSCDIPLSEIYSVFKTRWETTGSFKSLGDFKTYGKADNTAFRELITAKEIEKNVQEMSKGSAPGPDGITLGDVVKMDPEFSRTMEIFNLWLTTGKIPDMVRGCRTVLIPKSSKPDRLKDINNWRPITIGSILLRLFSRIVTARLSKACPLNPRQRGFIRAAGCSENLKLLQTIIWSAKREHRPLGVVFVDIAKAFDTVSHQHIIHALQQREVDPHIVGLVSNMYENISTYITTKRNTHTDKIQIRVGVKQGDPMSPLLFNLAMDPLLCKLEESGKGYHRGQSSITAMAFADDLVLLSDSWENMNTNISILETFCNLTGLKTQGQKCHGFYIKPTKDSYTINDCAAWTINGTPLNMIDPGESEKYLGLQFDPWIGIARSGLSTKLDFWLQRIDQAPLKPLQKTDILKTYTIPRLIYIADHSEVKSALLETLDQKIRTAVKEWLHLPPCTCDAILYSSTRDGGLGITKLAGLIPSVQARRLHRIAQSSDDTMKCFMEKEKMEQLHKKLWIQAGGDRENIPSIWEAPPSSEPPNNVSTNSEWEAPTQKDKFPKPCNWRKNEFKKWTKLASQGRGIVNFERDKISNHWIQYYRRIPHRKLLTALQLRANVYPTREFLARGRQDQYIKACRHCDADNESCAHIIGNCPVTQDARIKRHNYICELLLEEAKKKDWVVFKEPHIRDSNKELYKPDLIFVKDGRALVVDVTVRYEAAKSSLEEAAAEKVRKYKHLETEVRHLTNAKDVTFVGFPLGARGKWHQDNFKLLTELGLSKSRQVKMAETFSTVALFSSVDIVHMFASRARKSMVM

SEQ ID NO: 1114 - protein, 1665 aa, synthetic construct
MAPKKKRKVNISGSSCGSPNSADTSSDFKDLWTKLKECHDREVQGLQVKVTKLKQERILDAQRLEEFFTKNQQLREQQKVLHETIKVLEDRLRAGLCDRCAVTEEHMRKKQQEFENIRQQNLKLITELMNERNTLQEENKKLSEQLQQKIENDQQHQAAELECEEDVIPDSPITAFSFSGVNRLRRKENPHVRYIEQTHTKLEHSVCANEMRKVSKSSTHPQHNPNENEILVADTYDQSQSPMAKAHGTSSYTPDKSSFNLATVVAETLGLGVQEESETQGPMSPLGDELYHCLEGNHKKQPFESGSETPGTSESATPEGSPKRKVSSAEGAAKEEPKRRSARLSAKPPAKVEAKPKKAAAKDKSSDKKVQTKGKRGAKGKQAEVANQETKEDLPAENGETKTEESPASDEAGEKEAKSDSGSETPGTSESATPESYEQLAPQPCVGETLHSSLPRDSELFVPEEGSSEKESEDAPKTSPPTPGKHGLEQTGEEKVMVTVPDKNPPCPCCGTRVNSVLNLIEHLKVSHGKRGVCFRCAKCGKENSNYHSVVCHFKKCRGPETEKAPAGEWICEVCNRDFTTKIGLGQHKRLAHPAVRNQERIVASQPKETSNRGAHKRCWTKEEEELLIRLEAQFEGNKNINKLIAEHITTKTAKQISDKRRLLSRKPAEEPREEPGTCHHTRRAAASLRTEPEMSHHAQAEDRDNGPGRRPLPGRAAAGGRTMDEIRRHPDKGNGQQRPTKQKSEEQLQAYYKKTLEERLSAGALNTFPRAFKQVMEGRDIKLVINQTAQDCFACLESISQIRTATRDKKDTVTREKHPKKPFQKWMKKRAIKKGNYLRFQRLFYLDRGKLAKIILDDIECLSCDIPLSEIYSVFKTRWETTGSFKSLGDFKTYGKADNTAFRELITAKEIEKNVQEMSKGSAPGPDGITLGDVVKMDPEFSRTMEIFNLWLTTGKIPDMVRGCRTVLIPKSSKPDRLKDINNWRPITIGSILLRLFSRIVTARLSKACPLNPRQRGFIRAAGCSENLKLLQTIIWSAKREHRPLGVVFVDIAKAFDTVSHQHIIHALQQREVDPHIVGLVSNMYENISTYITTKRNTHTDKIQIRVGVKQGDPMSPLLFNLAMDPLLCKLEESGKGYHRGQSSITAMAFADDLVLLSDSWENMNTNISILETFCNLTGLKTQGQKCHGFYIKPTKDSYTINDCAAWTINGTPLNMIDPGESEKYLGLQFDPWIGIARSGLSTKLDFWLQRIDQAPLKPLQKTDILKTYTIPRLIYIADHSEVKSALLETLDQKIRTAVKEWLHLPPCTCDAILYSSTRDGGLGITKLAGLIPSVQARRLHRIAQSSDDTMKCFMEKEKMEQLHKKLWIQAGGDRENIPSIWEAPPSSEPPNNVSTNSEWEAPTQKDKFPKPCNWRKNEFKKWTKLASQGRGIVNFERDKISNHWIQYYRRIPHRKLLTALQLRANVYPTREFLARGRQDQYIKACRHCDADNESCAHIIGNCPVTQDARIKRHNYICELLLEEAKKKDWVVFKEPHIRDSNKELYKPDLIFVKDGRALVVDVTVRYEAAKSSLEEAAAEKVRKYKHLETEVRHLTNAKDVTFVGFPLGARGKWHQDNFKLLTELGLSKSRQVKMAETFSTVALFSSVDIVHMFASRARKSMVM

SEQ ID NO: 1115 - protein, 1665 aa, synthetic construct
MAPKKKRKVNISGSSCGSPNSADTSSDFKDLWTKLKECHDREVQGLQVKVTKLKQERILDAQRLEEFFTKNQQLREQQKVLHETIKVLEDRLRAGLCDRCAVTEEHMRKKQQEFENIRQQNLKLITELMNERNTLQEENKKLSEQLQQKIENDQQHQAAELECEEDVIPDSPITAFSFSGVNRLRRKENPHVRYIEQTHTKLEHSVCANEMRKVSKSSTHPQHNPNENEILVADTYDQSQSPMAKAHGTSSYTPDKSSFNLATVVAETLGLGVQEESETQGPMSPLGDELYHCLEGNHKKQPFESGSETPGTSESATPEGSPKRKVSSAEGAAKEEPKRRSARLSAKPPAKVEAKPKKAAAKDKSSDKKVQTKGKRGAKGKQAEVANQETKEDLPAENGETKTEESPASDEAGEKEAKSDSGSETPGTSESATPESYEQLAPQPCVGETLHSSLPRDSELFVPEEGSSEKESEDAPKTSPPTPGKHGLEQTGEEKVMVTVPDKNPPCPCCGTRVNSVLNLIEHLKVSHGKRGVCFRCAKCGKENSNYHSVVCHFKKCRGPETEKAPAGEWICEVCNRDFTTKIGLGQHKRLAHPAVRNQERIVASQPKETSNRGAHKRCWTKEEEELLIRLEAQFEGNKNINKLIAEHITTKTAKQISDKRRLLSRKPAEEPREEPGTCHHTRRAAASLRTEPEMSHHAQAEDRDNGPGRRPLPGRAAAGGRTMDEIRRHPDKGNGQQRPTKQKSEEQLQAYYKKTLEERLSAGALNTFPRAFKQVMEGRDIKLVINQTAQDCFGCLESISQIRTAGRDKKDTVTREKHPKKPFQKWMKKRAIKKGNYLRFQRLFYLDRGKLAKIILDDIECLSCDIPLSEIYSVFKTRWETTGSFKSLGDFKTYGKADNTAFRELITAKEIEKNVQEMSKGSAPGPDGITLGDVVKMDPEFSRTMEIFNLWLTTGKIPDMVRGCRTVLIPKSSKPDRLKDINNWRPITIGSILLRLFSRIVTARLSKACPLNPRQRGFIRAAGCSENLKLLQTIIWSAKREHRPLGVVFVDIAKAFDTVSHQHIIHALQQREVDPHIVGLVSNMYENISTYITTKRNTHTDKIQIRVGVKQGDPMSPLLFNLAMDPLLCKLEESGKGYHRGQSSITAMAFADDLVLLSDSWENMNTNISILETFCNLTGLKTQGQKCHGFYIKPTKDSYTINDCAAWTINGTPLNMIDPGESEKYLGLQFDPWIGIARSGLSTKLDFWLQRIDQAPLKPLQKTDILKTYTIPRLIYIADHSEVKSALLETLDQKIRTAVKEWLHLPPCTCDAILYSSTRDGGLGITKLAGLIPSVQARRLHRIAQSSDDTMKCFMEKEKMEQLHKKLWIQAGGDRENIPSIWEAPPSSEPPNNVSTNSEWEAPTQKDKFPKPCNWRKNEFKKWTKLASQGRGIVNFERDKISNHWIQYYRRIPHRKLLTALQLRANVYPTREFLARGRQDQYIKACRHCDADNESCAHIIGNCPVTQDARIKRHNYICELLLEEAKKKDWVVFKEPHIRDSNKELYKPDLIFVKDGRALVVDVTVRYEAAKSSLEEAAAEKVRKYKHLETEVRHLTNAKDVTFVGFPLGARGKWHQDNFKLLTELGLSKSRQVKMAETFSTVALFSSVDIVHMFASRARKSMVM

SEQ ID NO: 1116 - protein, 1665 aa, synthetic construct
MAPKKKRKVNISGSSCGSPNSADTSSDFKDLWTKLKECHDREVQGLQVKVTKLKQERILDAQRLEEFFTKNQQLREQQKVLHETIKVLEDRLRAGLCDRCAVTEEHMRKKQQEFENIRQQNLKLITELMNERNTLQEENKKLSEQLQQKIENDQQHQAAELECEEDVIPDSPITAFSFSGVNRLRRKENPHVRYIEQTHTKLEHSVCANEMRKVSKSSTHPQHNPNENEILVADTYDQSQSPMAKAHGTSSYTPDKSSFNLATVVAETLGLGVQEESETQGPMSPLGDELYHCLEGNHKKQPFESGSETPGTSESATPEGSPKRKVSSAEGAAKEEPKRRSARLSAKPPAKVEAKPKKAAAKDKSSDKKVQTKGKRGAKGKQAEVANQETKEDLPAENGETKTEESPASDEAGEKEAKSDSGSETPGTSESATPESYEQLAPQPCVGETLHSSLPRDSELFVPEEGSSEKESEDAPKTSPPTPGKHGLEQTGEEKVMVTVPDKNPPCPCCGTRVNSVLNLIEHLKVSHGKRGVCFRCAKCGKENSNYHSVVCHFKKCRGPETEKAPAGEWICEVCNRDFTTKIGLGQHKRLAHPAVRNQERIVASQPKETSNRGAHKRCWTKEEEELLIRLEAQFEGNKNINKLIAEHITTKTAKQISDKRRLLSRKPAEEPREEPGTCHHTRRAAASLRTEPEMSHHAQAEDRDNGPGRRPLPGRAAAGGRTMDEIRRHPDKGNGQQRPTKQKSEEQLQAYYKKTLEERLSAGALNTFPRAFKQVMEGRDIKLVINQTAQDCFGCLESISQIRTATRDKKDTVTREKHPKKPFQKWMKKRAIKKGNYLRFQRLFYLDRGKLAKIILDDIECLSCGIPLSEIYSVFKTRWETTGSFKSLGDFKTYGKADNTAFRELITAKEIEKNVQEMSKGSAPGPDGITLGDVVKMDPEFSRTMEIFNLWLTTGKIPDMVRGCRTVLIPKSSKPDRLKDINNWRPITIGSILLRLFSRIVTARLSKACPLNPRQRGFIRAAGCSENLKLLQTIIWSAKREHRPLGVVFVDIAKAFDTVSHQHIIHALQQREVDPHIVGLVSNMYENISTYITTKRNTHTDKIQIRVGVKQGDPMSPLLFNLAMDPLLCKLEESGKGYHRGQSSITAMAFADDLVLLSDSWENMNTNISILETFCNLTGLKTQGQKCHGFYIKPTKDSYTINDCAAWTINGTPLNMIDPGESEKYLGLQFDPWIGIARSGLSTKLDFWLQRIDQAPLKPLQKTDILKTYTIPRLIYIADHSEVKSALLETLDQKIRTAVKEWLHLPPCTCDAILYSSTRDGGLGITKLAGLIPSVQARRLHRIAQSSDDTMKCFMEKEKMEQLHKKLWIQAGGDRENIPSIWEAPPSSEPPNNVSTNSEWEAPTQKDKFPKPCNWRKNEFKKWTKLASQGRGIVNFERDKISNHWIQYYRRIPHRKLLTALQLRANVYPTREFLARGRQDQYIKACRHCDADNESCAHIIGNCPVTQDARIKRHNYICELLLEEAKKKDWVVFKEPHIRDSNKELYKPDLIFVKDGRALVVDVTVRYEAAKSSLEEAAAEKVRKYKHLETEVRHLTNAKDVTFVGFPLGARGKWHQDNFKLLTELGLSKSRQVKMAETFSTVALFSSVDIVHMFASRARKSMVM

SEQ ID NO: 1117 - protein, 1665 aa, synthetic construct
MAPKKKRKVNISGSSCGSPNSADTSSDFKDLWTKLKECHDREVQGLQVKVTKLKQERILDAQRLEEFFTKNQQLREQQKVLHETIKVLEDRLRAGLCDRCAVTEEHMRKKQQEFENIRQQNLKLITELMNERNTLQEENKKLSEQLQQKIENDQQHQAAELECEEDVIPDSPITAFSFSGVNRLRRKENPHVRYIEQTHTKLEHSVCANEMRKVSKSSTHPQHNPNENEILVADTYDQSQSPMAKAHGTSSYTPDKSSFNLATVVAETLGLGVQEESETQGPMSPLGDELYHCLEGNHKKQPFESGSETPGTSESATPEGSPKRKVSSAEGAAKEEPKRRSARLSAKPPAKVEAKPKKAAAKDKSSDKKVQTKGKRGAKGKQAEVANQETKEDLPAENGETKTEESPASDEAGEKEAKSDSGSETPGTSESATPESYEQLAPQPCVGETLHSSLPRDSELFVPEEGSSEKESEDAPKTSPPTPGKHGLEQTGEEKVMVTVPDKNPPCPCCGTRVNSVLNLIEHLKVSHGKRGVCFRCAKCGKENSNYHSVVCHFKKCRGPETEKAPAGEWICEVCNRDFTTKIGLGQHKRLAHPAVRNQERIVASQPKETSNRGAHKRCWTKEEEELLIRLEAQFEGNKNINKLIAEHITTKTAKQISDKRRLLSRKPAEEPREEPGTCHHTRRAAASLRTEPEMSHHAQAEDRDNGPGRRPLPGRAAAGGRTMDEIRRHPDKGNGQQRPTKQKSEEQLQAYYKKTLEERLSAGALNTFPRAFKQVMEGRDIKLVINQTAQDCFGCLESISQIRTATRDKKDTVTREKHPKKPFQKWMKKRAIKKGNYLRFQRLFYLDRGKLAKIILDDIECLSCDIPLSEIYDVFKTRWETTGSFKSLGDFKTYGKADNTAFRELITAKEIEKNVQEMSKGSAPGPDGITLGDVVKMDPEFSRTMEIFNLWLTTGKIPDMVRGCRTVLIPKSSKPDRLKDINNWRPITIGSILLRLFSRIVTARLSKACPLNPRQRGFIRAAGCSENLKLLQTIIWSAKREHRPLGVVFVDIAKAFDTVSHQHIIHALQQREVDPHIVGLVSNMYENISTYITTKRNTHTDKIQIRVGVKQGDPMSPLLFNLAMDPLLCKLEESGKGYHRGQSSITAMAFADDLVLLSDSWENMNTNISILETFCNLTGLKTQGQKCHGFYIKPTKDSYTINDCAAWTINGTPLNMIDPGESEKYLGLQFDPWIGIARSGLSTKLDFWLQRIDQAPLKPLQKTDILKTYTIPRLIYIADHSEVKSALLETLDQKIRTAVKEWLHLPPCTCDAILYSSTRDGGLGITKLAGLIPSVQARRLHRIAQSSDDTMKCFMEKEKMEQLHKKLWIQAGGDRENIPSIWEAPPSSEPPNNVSTNSEWEAPTQKDKFPKPCNWRKNEFKKWTKLASQGRGIVNFERDKISNHWIQYYRRIPHRKLLTALQLRANVYPTREFLARGRQDQYIKACRHCDADNESCAHIIGNCPVTQDARIKRHNYICELLLEEAKKKDWVVFKEPHIRDSNKELYKPDLIFVKDGRALVVDVTVRYEAAKSSLEEAAAEKVRKYKHLETEVRHLTNAKDVTFVGFPLGARGKWHQDNFKLLTELGLSKSRQVKMAETFSTVALFSSVDIVHMFASRARKSMVM

SEQ ID NO: 1118 - protein, 1665 aa, synthetic construct
MAPKKKRKVNISGSSCGSPNSADTSSDFKDLWTKLKECHDREVQGLQVKVTKLKQERILDAQRLEEFFTKNQQLREQQKVLHETIKVLEDRLRAGLCDRCAVTEEHMRKKQQEFENIRQQNLKLITELMNERNTLQEENKKLSEQLQQKIENDQQHQAAELECEEDVIPDSPITAFSFSGVNRLRRKENPHVRYIEQTHTKLEHSVCANEMRKVSKSSTHPQHNPNENEILVADTYDQSQSPMAKAHGTSSYTPDKSSFNLATVVAETLGLGVQEESETQGPMSPLGDELYHCLEGNHKKQPFESGSETPGTSESATPEGSPKRKVSSAEGAAKEEPKRRSARLSAKPPAKVEAKPKKAAAKDKSSDKKVQTKGKRGAKGKQAEVANQETKEDLPAENGETKTEESPASDEAGEKEAKSDSGSETPGTSESATPESYEQLAPQPCVGETLHSSLPRDSELFVPEEGSSEKESEDAPKTSPPTPGKHGLEQTGEEKVMVTVPDKNPPCPCCGTRVNSVLNLIEHLKVSHGKRGVCFRCAKCGKENSNYHSVVCHFKKCRGPETEKAPAGEWICEVCNRDFTTKIGLGQHKRLAHPAVRNQERIVASQPKETSNRGAHKRCWTKEEEELLIRLEAQFEGNKNINKLIAEHITTKTAKQISDKRRLLSRKPAEEPREEPGTCHHTRRAAASLRTEPEMSHHAQAEDRDNGPGRRPLPGRAAAGGRTMDEIRRHPDKGNGQQRPTKQKSEEQLQAYYKKTLEERLSAGALNTFPRAFKQVMEGRDIKLVINQTAQDCFGCLESISQIRTATRDKKDTVTREKHPKKPFQKWMKKRAIKKGNYLRFQRLFYLDRGKLAKIILDDIECLSCDIPLSEIYSVFKTRWETTGSFKSLGDFKTYGQADNTAFRELITAKEIEKNVQEMSKGSAPGPDGITLGDVVKMDPEFSRTMEIFNLWLTTGKIPDMVRGCRTVLIPKSSKPDRLKDINNWRPITIGSILLRLFSRIVTARLSKACPLNPRQRGFIRAAGCSENLKLLQTIIWSAKREHRPLGVVFVDIAKAFDTVSHQHIIHALQQREVDPHIVGLVSNMYENISTYITTKRNTHTDKIQIRVGVKQGDPMSPLLFNLAMDPLLCKLEESGKGYHRGQSSITAMAFADDLVLLSDSWENMNTNISILETFCNLTGLKTQGQKCHGFYIKPTKDSYTINDCAAWTINGTPLNMIDPGESEKYLGLQFDPWIGIARSGLSTKLDFWLQRIDQAPLKPLQKTDILKTYTIPRLIYIADHSEVKSALLETLDQKIRTAVKEWLHLPPCTCDAILYSSTRDGGLGITKLAGLIPSVQARRLHRIAQSSDDTMKCFMEKEKMEQLHKKLWIQAGGDRENIPSIWEAPPSSEPPNNVSTNSEWEAPTQKDKFPKPCNWRKNEFKKWTKLASQGRGIVNFERDKISNHWIQYYRRIPHRKLLTALQLRANVYPTREFLARGRQDQYIKACRHCDADNESCAHIIGNCPVTQDARIKRHNYICELLLEEAKKKDWVVFKEPHIRDSNKELYKPDLIFVKDGRALVVDVTVRYEAAKSSLEEAAAEKVRKYKHLETEVRHLTNAKDVTFVGFPLGARGKWHQDNFKLLTELGLSKSRQVKMAETFSTVALFSSVDIVHMFASRARKSMVM

SEQ ID NO: 1119 - protein, 1665 aa, synthetic construct
MAPKKKRKVNISGSSCGSPNSADTSSDFKDLWTKLKECHDREVQGLQVKVTKLKQERILDAQRLEEFFTKNQQLREQQKVLHETIKVLEDRLRAGLCDRCAVTEEHMRKKQQEFENIRQQNLKLITELMNERNTLQEENKKLSEQLQQKIENDQQHQAAELECEEDVIPDSPITAFSFSGVNRLRRKENPHVRYIEQTHTKLEHSVCANEMRKVSKSSTHPQHNPNENEILVADTYDQSQSPMAKAHGTSSYTPDKSSFNLATVVAETLGLGVQEESETQGPMSPLGDELYHCLEGNHKKQPFESGSETPGTSESATPEGSPKRKVSSAEGAAKEEPKRRSARLSAKPPAKVEAKPKKAAAKDKSSDKKVQTKGKRGAKGKQAEVANQETKEDLPAENGETKTEESPASDEAGEKEAKSDSGSETPGTSESATPESYEQLAPQPCVGETLHSSLPRDSELFVPEEGSSEKESEDAPKTSPPTPGKHGLEQTGEEKVMVTVPDKNPPCPCCGTRVNSVLNLIEHLKVSHGKRGVCFRCAKCGKENSNYHSVVCHFKKCRGPETEKAPAGEWICEVCNRDFTTKIGLGQHKRLAHPAVRNQERIVASQPKETSNRGAHKRCWTKEEEELLIRLEAQFEGNKNINKLIAEHITTKTAKQISDKRRLLSRKPAEEPREEPGTCHHTRRAAASLRTEPEMSHHAQAEDRDNGPGRRPLPGRAAAGGRTMDEIRRHPDKGNGQQRPTKQKSEEQLQAYYKKTLEERLSAGALNTFPRAFKQVMEGRDIKLVINQTAQDCFGCLESISQIRTATRDKKDTVTREKHPKKPFQKWMKKRAIKKGNYLRFQRLFYLDRGKLAKIILDDIECLSCDIPLSEIYSVFKTRWETTGSFKSLGDFKTYGKADNTAFRELITAKEIEKNVQEMSKGSAPGPDGITLGDVVKMDPEFSRTMEIFNLWLTTGKIPDMVRGCRTVLIPKSSKPDRLKDINNWRPITIGSILLRLFSRIVTARLSKACPLNPRQRGFIRAAGCSENLKLLQTIIWSAKREHRPLGVVFVDIAKAFDTVSHQHIIHALQQREVDPHIVGLVSNMYENISTYITTKRNTHTDKIQIRVGVKQGDPMSPLLFNLAMDPLLCKLEESGKGYHRGQSSITAMAFADDLVLLSDSWENMNTNISILETFCNLTGLKTQGQKCHGFYIKPTKDSYTINDCAAWTINGTPLNMIDPGESEKYLGLQFDPWIGIARSGLSTKLDFWLQRIDQAPLKPLQKTDILKTYTIPRLIYIADHSEVKSALLETLDQKIRTAVKEWLHLPPCTCDAILYSSTRDGGLGITKLAGLIPSVQARRLHRIAQSSDDTMKCFMEKEKMEQLHKKLWIQAGGDRENIPSIWEAPPSSEPPNNVSLNSEWEAPTQKDKFPKPCNWRKNEFKKWTKLASQGRGIVNFERDKISNHWIQYYRRIPHRKLLTALQLRANVYPTREFLARGRQDQYIKACRHCDADNESCAHIIGNCPVTQDARIKRHNYICELLLEEAKKKDWVVFKEPHIRDSNKELYKPDLIFVKDGRALVVDVTVRYEAAKSSLEEAAAEKVRKYKHLETEVRHLTNAKDVTFVGFPLGARGKWHQDNFKLLTELGLSKSRQVKMAETFSTVALFSSVDIVHMFASRARKSMVM

SEQ ID NO: 1120 - protein, 1665 aa, synthetic construct
MAPKKKRKVNISGSSCGSPNSADTSSDFKDLWTKLKECHDREVQGLQVKVTKLKQERILDAQRLEEFFTKNQQLREQQKVLHETIKVLEDRLRAGLCDRCAVTEEHMRKKQQEFENIRQQNLKLITELMNERNTLQEENKKLSEQLQQKIENDQQHQAAELECEEDVIPDSPITAFSFSGVNRLRRKENPHVRYIEQTHTKLEHSVCANEMRKVSKSSTHPQHNPNENEILVADTYDQSQSPMAKAHGTSSYTPDKSSFNLATVVAETLGLGVQEESETQGPMSPLGDELYHCLEGNHKKQPFESGSETPGTSESATPEGSPKRKVSSAEGAAKEEPKRRSARLSAKPPAKVEAKPKKAAAKDKSSDKKVQTKGKRGAKGKQAEVANQETKEDLPAENGETKTEESPASDEAGEKEAKSDSGSETPGTSESATPESYEQLAPQPCVGETLHSSLPRDSELFVPEEGSSEKESEDAPKTSPPTPGKHGLEQTGEEKVMVTVPDKNPPCPCCGTRVNSVLNLIEHLKVSHGKRGVCFRCAKCGKENSNYHSVVCHFKKCRGPETEKAPAGEWICEVCNRDFTTKIGLGQHKRLAHPAVRNQERIVASQPKETSNRGAHKRCWTKEEEELLIRLEAQFEGNKNINKLIAEHITTKTAKQISDKRRLLSRKPAEEPREEPGTCHHTRRAAASLRTEPEMSHHAQAEDRDNGPGRRPLPGRAAAGGRTMDEIRRHPDKGNGQQRPTKQKSEEQLQAYYKKTLEERLSAGALNTFPRAFKQVMEGRDIKLVINQTAQDCFGCLESISQIRTATRDKKDTVTREKHPKKPFQKWMKKRAIKKGNYLRFQRLFYLDRGKLAKIILDDIECLSCDIPLSEIYSVFKTRWETTGSFKSLGDFKTYGKADNTAFRELITAKEIEKNVQEMSKGSAPGPDGITLGDVVKMDPEFSRTMEIFNLWLTTGKIPDMVRGCRTVLIPKSSKPDRLKDINNWRPITIGSILLRLFSRIVTARLSKACPLNPRQRGFIRAAGCSENLKLLQTIIWSAKREHRPLGVVFVDIAKAFDTVSHQHIIHALQQREVDPHIVGLVSNMYENISTYITTKRNTHTDKIQIRVGVKQGDPMSPLLFNLAMDPLLCKLEESGKGYHRGQSSITAMAFADDLVLLSDSWENMNTNISILETFCNLTGLKTQGQKCHGFYIKPTKDSYTINDCAAWTINGTPLNMIDPGESEKYLGLQFDPWIGIARSGLSTKLDFWLQRIDQAPLKPLQKTDILKTYTIPRLIYIADHSEVKSALLETLDQKIRTAVKEWLHLPPCTCDAILYSSTRDGGLGITKLAGLIPSVQARRLHRIAQSSDDTMKCFMEKEKMEQLHKKLWIQAGGDRENIPSIWEAPPSSEPPNNVSTNSEWEAPTQKDKFPKPCNWRKNEFKKWTKLASQGRGIVNFERDKISNHWIQYYRRIPHRKLLTALQLRANVYPTREFLARGRQDQYIKACRHCDADNESCAHIIGNCPVTQDARIKRHNYICELLLEEAKKKDWVVFKEPHIRDSNKELYKPDLIFVKDGRAIVVDVTVRYEAAKSSLEEAAAEKVRKYKHLETEVRHLTNAKDVTFVGFPLGARGKWHQDNFKLLTELGLSKSRQVKMAETFSTVALFSSVDIVHMFASRARKSMVM

SEQ ID NO: 1121 - protein, 1665 aa, synthetic construct
MAPKKKRKVNISGSSCGSPNSADTSSDFKDLWTKLKECHDREVQGLQVKVTKLKQERILDAQRLEEFFTKNQQLREQQKVLHETIKVLEDRLRAGLCDRCAVTEEHMRKKQQEFENIRQQNLKLITELMNERNTLQEENKKLSEQLQQKIENDQQHQAAELECEEDVIPDSPITAFSFSGVNRLRRKENPHVRYIEQTHTKLEHSVCANEMRKVSKSSTHPQHNPNENEILVADTYDQSQSPMAKAHGTSSYTPDKSSFNLATVVAETLGLGVQEESETQGPMSPLGDELYHCLEGNHKKQPFESGSETPGTSESATPEGSPKRKVSSAEGAAKEEPKRRSARLSAKPPAKVEAKPKKAAAKDKSSDKKVQTKGKRGAKGKQAEVANQETKEDLPAENGETKTEESPASDEAGEKEAKSDSGSETPGTSESATPESYEQLAPQPCVGETLHSSLPRDSELFVPEEGSSEKESEDAPKTSPPTPGKHGLEQTGEEKVMVTVPDKNPPCPCCGTRVNSVLNLIEHLKVSHGKRGVCFRCAKCGKENSNYHSVVCHFKKCRGPETEKAPAGEWICEVCNRDFTTKIGLGQHKRLAHPAVRNQERIVASQPKETSNRGAHKRCWTKEEEELLIRLEAQFEGNKNINKLIAEHITTKTAKQISDKRRLLSRKPAEEPREEPGTCHHTRRAAASLRTEPEMSHHAQAEDRDNGPGRRPLPGRAAAGGRTMDEIRRHPDKGNGQQRPTKQKSEEQLQAYYKKTLEERLSAGALNTFPRAFKQVMEGRDIKLVINQTAQDCFGCLESISQIRTATRDKKDTVTREKHPKKPFQKWMKKRAIKKGNYLRFQRLFYLDRGKLAKIILDDIECLSCDIPLSEIYSVFKTRWETTGSFKSLGDFKTYGKADNTAFRELITAKEIEKNVQEMSKGSAPGPDGITLGDVVKMDPEFSRTMEIFNLWLTTGKIPDMVRGCRTVLIPKSSKPDRLKDINNWRPITIGSILLRLFSRIVTARLSKACPLNPRQRGFIRAAGCSENLKLLQTIIWSAKREHRPLGVVFVDIAKAFDTVSHQHIIHALQQREVDPHIVGLVSNMYENISTYITTKRNTHTDKIQIRVGVKQGDPMSPLLFNLAMDPLLCKLEESGKGYHRGQSSITAMAFADDLVLLSDSWENMNTNISILETFCNLTGLKTQGQKCHGFYIKPTKDSYTINDCAAWTINGTPLNMIDPGESEKYLGLQFDPWIGIARSGLSTKLDFWLQRIDQAPLKPLQKTDILKTYTIPRLIYLADHSEVKSALLETLDQKIRTAVKEWLHLPPCTCDAILYSSTRDGGLGITKLAGLIPSVQARRLHRIAQSSDDTMKCFMEKEKMEQLHKKLWIQAGGDRENIPSIWEAPPSSEPPNNVSTNSEWEAPTQKDKFPKPCNWRKNEFKKWTKLASQGRGIVNFERDKISNHWIQYYRRIPHRKLLTALQLRANVYPTREFLARGRQDQYIKACRHCDADNESCAHIIGNCPVTQDARIKRHNYICELLLEEAKKKDWVVFKEPHIRDSNKELYKPDLIFVKDGRALVVDVTVRYEAAKSSLEEAAAEKVRKYKHLETEVRHLTNAKDVTFVGFPLGARGKWHQDNFKLLTELGLSKSRQVKMAETFSTVALFSSVDIVHMFASRARKSMVM

SEQ ID NO: 1122 - protein, 1665 aa, synthetic construct
MAPKKKRKVNISGSSCGSPNSADTSSDFKDLWTKLKECHDREVQGLQVKVTKLKQERILDAQRLEEFFTKNQQLREQQKVLHETIKVLEDRLRAGLCDRCAVTEEHMRKKQQEFENIRQQNLKLITELMNERNTLQEENKKLSEQLQQKIENDQQHQAAELECEEDVIPDSPITAFSFSGVNRLRRKENPHVRYIEQTHTKLEHSVCANEMRKVSKSSTHPQHNPNENEILVADTYDQSQSPMAKAHGTSSYTPDKSSFNLATVVAETLGLGVQEESETQGPMSPLGDELYHCLEGNHKKQPFESGSETPGTSESATPEGSPKRKVSSAEGAAKEEPKRRSARLSAKPPAKVEAKPKKAAAKDKSSDKKVQTKGKRGAKGKQAEVANQETKEDLPAENGETKTEESPASDEAGEKEAKSDSGSETPGTSESATPESYEQLAPQPCVGETLHSSLPRDSELFVPEEGSSEKESEDAPKTSPPTPGKHGLEQTGEEKVMVTVPDKNPPCPCCGTRVNSVLNLIEHLKVSHGKRGVCFRCAKCGKENSNYHSVVCHFKKCRGPETEKAPAGEWICEVCNRDFTTKIGLGQHKRLAHPAVRNQERIVASQPKETSNRGAHKRCWTKEEEELLIRLEAQFEGNKNINKLIAEHITTKTAKQISDKRRLLSRKPAEEPREEPGTCHHTRRAAASLRTEPEMSHHAQAEDRDNGPGRRPLPGRAAAGGRTMDEIRRHPDKGNGQQRPTKQKSEEQLQAYYKKTLEERLSAGALNTFPRAFKQVMEGRDIKLVINQTAQDCFGCLESISQIRTATRDKKDTVTREKHPKKPFQKWMKKRAIKKGNYLRFQRLFYLDRGKLAKIILDDIECLSCDIPLSEIYSVFKTRWETTGSFKSLGDFKTYGKADNTAFRELITAKEIEKNVQEMSKGSAPGPDGITLGDVVKMDPEFSRTMEIFNLWLTTGKIPDMVRGCRTVLIPKSSKPDRLKDINNWRPITIGSILYRLFSRIVTARLSKACPLNPRQRGFIRAAGCSENLKLLQTIIWSAKREHRPLGVVFVDIAKAFDTVSHQHIIHALQQREVDPHIVGLVSNMYENISTYITTKRNTHTDKIQIRVGVKQGDPMSPLLFNLAMDPLLCKLEESGKGYHRGQSSITAMAFADDLVLLSDSWENMNTNISILETFCNLTGLKTQGQKCHGFYIKPTKDSYTINDCAAWTINGTPLNMIDPGESEKYLGLQFDPWIGIARSGLSTKLDFWLQRIDQAPLKPLQKTDILKTYTIPRLIYIADHSEVKSALLETLDQKIRTAVKEWLHLPPCTCDAILYSSTRDGGLGITKLAGLIPSVQARRLHRIAQSSDDTMKCFMEKEKMEQLHKKLWIQAGGDRENIPSIWEAPPSSEPPNNVSTNSEWEAPTQKDKFPKPCNWRKNEFKKWTKLASQGRGIVNFERDKISNHWIQYYRRIPHRKLLTALQLRANVYPTREFLARGRQDQYIKACRHCDADNESCAHIIGNCPVTQDARIKRHNYICELLLEEAKKKDWVVFKEPHIRDSNKELYKPDLIFVKDGRALVVDVTVRYEAAKSSLEEAAAEKVRKYKHLETEVRHLTNAKDVTFVGFPLGARGKWHQDNFKLLTELGLSKSRQVKMAETFSTVALFSSVDIVHMFASRARKSMVM

SEQ ID NO: 1123 - protein, 1665 aa, synthetic construct
MAPKKKRKVNISGSSCGSPNSADTSSDFKDLWTKLKECHDREVQGLQVKVTKLKQERILDAQRLEEFFTKNQQLREQQKVLHETIKVLEDRLRAGLCDRCAVTEEHMRKKQQEFENIRQQNLKLITELMNERNTLQEENKKLSEQLQQKIENDQQHQAAELECEEDVIPDSPITAFSFSGVNRLRRKENPHVRYIEQTHTKLEHSVCANEMRKVSKSSTHPQHNPNENEILVADTYDQSQSPMAKAHGTSSYTPDKSSFNLATVVAETLGLGVQEESETQGPMSPLGDELYHCLEGNHKKQPFESGSETPGTSESATPEGSPKRKVSSAEGAAKEEPKRRSARLSAKPPAKVEAKPKKAAAKDKSSDKKVQTKGKRGAKGKQAEVANQETKEDLPAENGETKTEESPASDEAGEKEAKSDSGSETPGTSESATPESYEQLAPQPCVGETLHSSLPRDSELFVPEEGSSEKESEDAPKTSPPTPGKHGLEQTGEEKVMVTVPDKNPPCPCCGTRVNSVLNLIEHLKVSHGKRGVCFRCAKCGKENSNYHSVVCHFKKCRGPETEKAPAGEWICEVCNRDFTTKIGLGQHKRLAHPAVRNQERIVASQPKETSNRGAHKRCWTKEEEELLIRLEAQFEGNKNINKLIAEHITTKTAKQISDKRRLLSRKPAEEPREEPGTCHHTRRAAASLRTEPEMSHHAQAEDRDNGPGRRPLPGRAAAGGRTMDEIRRHPDKGNGQQRPTKQKSEEQLQAYYKKTLEERLSAGALNTFPRAFKQVMEGRDIKLVINQTAQDCFGCLESISQIRTATRDKKDTVTREKHPKKPFQKWMKKRAIKKGNYLRFQRLFYLDRGKLAKIILDDIECLSCDIPLSEIYSVFKTRWETTGSFKSLGDFKTYGKADNTAFRELITAKEIEKNVQEMSKGSAPGPDGITLGDVVKMDPEFSRTMEIFNLWLTTGKIPDMVRGCRTVLIPKSSKPDRLKDINNWRPITIGSILLRLFSRIVTARLSKACPLNPRQRGFIRAAGCSENLKLLQTIIWSAKREHRPLGVVFVDIANAFDTVSHQHIIHALQQREVDPHIVGLVSNMYENISTYITTKRNTHTDKIQIRVGVKQGDPMSPLLFNLAMDPLLCKLEESGKGYHRGQSSITAMAFADDLVLLSDSWENMNTNISILETFCNLTGLKTQGQKCHGFYIKPTKDSYTINDCAAWTINGTPLNMIDPGESEKYLGLQFDPWIGIARSGLSTKLDFWLQRIDQAPLKPLQKTDILKTYTIPRLIYIADHSEVKSALLETLDQKIRTAVKEWLHLPPCTCDAILYSSTRDGGLGITKLAGLIPSVQARRLHRIAQSSDDTMKCFMEKEKMEQLHKKLWIQAGGDRENIPSIWEAPPSSEPPNNVSTNSEWEAPTQKDKFPKPCNWRKNEFKKWTKLASQGRGIVNFERDKISNHWIQYYRRIPHRKLLTALQLRANVYPTREFLARGRQDQYIKACRHCDADNESCAHIIGNCPVTQDARIKRHNYICELLLEEAKKKDWVVFKEPHIRDSNKELYKPDLIFVKDGRALVVDVTVRYEAAKSSLEEAAAEKVRKYKHLETEVRHLTNAKDVTFVGFPLGARGKWHQDNFKLLTELGLSKSRQVKMAETFSTVALFSSVDIVHMFASRARKSMVM

SEQ ID NO: 1124 - protein, 1665 aa, synthetic construct
MAPKKKRKVNISGSSCGSPNSADTSSDFKDLWTKLKECHDKEVQGLQVKVTKLKQERILDAQRLEEFFTKNQQLREQQKVLHETIKVLEDRLRAGLCDRCAVTEEHMRKKQQEFENIRQQNLKLITELMNERNTLQEENKKLSEQLQQKIENDQQHQAAELECEEDVIPDSPITAFSFSGVNRLRRKENPHVRYIEQTHTKLEHSVCANEMRKVSKSSTHPQHNPNENEILVADTYDQSQSPMAKAHGTSSYTPDKSSFNLATVVAETLGLGVQEESETQGPMSPLGDELYHCLEGNHKKQPFESGSETPGTSESATPEGSPKRKVSSAEGAAKEEPKRRSARLSAKPPAKVEAKPKKAAAKDKSSDKKVQTKGKRGAKGKQAEVANQETKEDLPAENGETKTEESPASDEAGEKEAKSDSGSETPGTSESATPESYEQLAPQPCVGETLHSSLPRDSELFVPEEGSSEKESEDAPKTSPPTPGKHGLEQTGEEKVMVTVPDKNPPCPCCGTRVNSVLNLIEHLKVSHGKRGVCFRCAKCGKENSNYHSVVCHFKKCRGPETEKAPAGEWICEVCNRDFTTKIGLGQHKRLAHPAVRNQERIVASQPKETSNRGAHKRCWTKEEEELLIRLEAQFEGNKNINKLIAEHITTKTAKQISDKRRLLSRKPAEEPREEPGTCHHTRRAAASLRTEPEMSHHAQAEDRDNGPGRRPLPGRAAAGGRTMDEIRRHPDKGNGQQRPTKQKSEEQLQAYYKKTLEERLSAGALNTFPRAFKQVMEGRDIKLVINQTAQDCFGCLESISQIRTATRDKKDTVTREKHPKKPFQKWMKKRAIKKGNYLRFQRLFYLDRGKLAKIILDDIECLSCDIPLSEIYSVFKTRWETTGSFKSLGDFKTYGKADNTAFRELITAKEIEKNVQEMSKGSAPGPDGITLGDVVKMDPEFSRTMEIFNLWLTTGKIPDMVRGCRTVLIPKSSKPDRLKDINNWRPITIGSILLRLFSRIVTARLSKACPLNPRQRGFIRAAGCSENLKLLQTIIWSAKREHRPLGVVFVDIAKAFDTVSHQHIIHALQQREVDPHIVGLVSNMYENISTYITTKRNTHTDKIQIRVGVKQGDPMSPLLFNLAMDPLLCKLEESGKGYHRGQSSITAMAFADDLVLLSDSWENMNTNISILETFCNLTGLKTQGQKCHGFYIKPTKDSYTINDCAAWTINGTPLNMIDPGESEKYLGLQFDPWIGIARSGLSTKLDFWLQRIDQAPLKPLQKTDILKTYTIPRLIYIADHSEVKSALLETLDQKIRTAVKEWLHLPPCTCDAILYSSTRDGGLGITKLAGLIPSVQARRLHRIAQSSDDTMKCFMEKEKMEQLHKKLWIQAGGDRENIPSIWEAPPSSEPPNNVSTNSEWEAPTQKDKFPKPCNWRKNEFKKWTKLASQGRGIVNFERDKISNHWIQYYRRIPHRKLLTALQLRANVYPTREFLARGRQDQYIKACRHCDADNESCAHIIGNCPVTQDARIKRHNYICELLLEEAKKKDWVVFKEPHIRDSNKELYKPDLIFVKDGRALVVDVTVRYEAAKSSLEEAAAEKVRKYKHLETEVRHLTNAKDVTFVGFPLGARGKWHQDNFKLLTELGLSKSRQVKMAETFSTVALFSSVDIVHMFASRARKSMVM

SEQ ID NO: 1125 - protein, 1665 aa, synthetic construct
MAPKKKRKVNISGSSCGSPNSADTSSDFKDLWTKLKECHDREVQGLQVKVTKLKQERILDAQRLEEFFTKNQQLREQQKVLHETIKVLEDRLRAGLCDRCAVTEEHMRKKQQEFENIRQQNLKLITELMNERNTLQEENKKLSEQLQQKIENDQQHQAAELECEEDVIPDSPITAFSFSGVNRLRRKENPHVRYIEQTHTKLEHSVCANEMRKVSKSSTHPQHNPNENEILVADTYDQSQSPMAKAHGTSSYTPDKSSFNLATVVAETLGLGVQEESETQGPMSPLGDELYHCLEGNHKKQPFESGSETPGTSESATPEGSPKRKVSSAEGAAKEEPKRRSARLSAKPPAKVEAKPKKAAAKDKSSDKKVQTKGKRGAKGKQAEVANQETKEDLPAENGETKTEESPASDEAGEKEAKSDSGSETPGTSESATPESYEQLAPQPCVGETLHSSLPRDSELFVPEEGSSEKESEDAPKTSPPTPGKHGLRQTGEEKVMVTVPDKNPPCPCCGTRVNSVLNLIEHLKVSHGKRGVCFRCAKCGKERSNYHSVVCHFKKCRGPETEKAPAGEWICEVCNRDFTTKIGLGQHKRLAHPAVRNQERIVASQPKETSNRGAHKRCWTKEEEELLIRLEAQFEGNKNINKLIAEHITTKTAKQISDKRRLLSRKPAEEPRMEPGTCHHTRRAAASLRTEPEMSHHAQAEDRDNGPGRRPLPGRAAAGGRTMDEIRRHPDKGNGQQRPTKQKSEEQLQAYYKKTLEERLSAGALNTFPRAFKQVMEGRDIKLVINQTAQDCFGCLESISQIRTATRDKKYTVTREKHPKKPFQKWMKKRAIKKGNYLRFQRLFYLDRGKLAKIILDDIECLSCDIPLSEIYSVFKTRWETTGSFKSLGDFKTYGKADNTAFRELITAKEIEKNVQEMSKGSAPGPDGITLGDVVKMDPEFSRTMEIFNLWLTTGKIPDMVRGCRTVLIPKSSDPDRLKDINNWRPITIGSILLRLFSRIVTARLSKACPLNPRQRGFIRAAGCSENLKLLQTIIWSAKREHRPLGVVFVDIAKAFDTVSHQHIIHALQQREVDPHIVGLVSNMYENISTYITTKRNTHTDKIQIRVGVKQGDPMSPLLFNLAMDPLLCKLEESGKGYHRGQSSITAMAFADDLVLLSDSWENMNTNISILETFCNLTGLKTQGQKCHGFYIKPTKKSYTINDCAAWTINGTPLNMIDPGESEKYLGLQFDPWIGIARSGLSTKLDFWLQRIDQAPLKPLQKLDILKTYTIPRLIYIADHSEVKSALLETLDQKIRTAVKEWLHLPPCTCDAILYSSTRDGGLGITKLAGLIPSVQARRLHRIAQSSDDTMKCFMEKEKMEQLHKKLWIQAGGDRENIPSIWEAPPSSEPPNNVSTNSEWEAPTQKDKFPKPCNWRKNEFKKWTKLASQGRGIVNFERDKISNHWIQYYRRIPHRKLLTALQLRANVYPTREFLARGRQDQYIKACRHCDADNESCAHIIGNCPVTQDARIKRHNYICELLLEEAKKKDWVVFKEPHIRDSNKELYKPDLIFVKDGRALVVDVTVRYEAAKSSLEEAAAEKVRKYKHLETEVRHLTNAKDVTFVGFPLGARGKWHQDNFKLLTELGLSKSRQVKMAETFSTVALFSSVDIVHMFASRARKSMVM

SEQ ID NO: 1126 - protein, 1665 aa, synthetic construct
MAPKKKRKVNISGSSCGSPNSADTSSDFKDLWTKLKECHDREVQGLQVKVTKLKQERILDAQRLEEFFTKNQQLREQQKVLHETIKVLEDRLRAGLCDRCAVTEEHMRKKQQEFENIRQQNLKLITELMNERNTLQEENKKLSEQLQQKIENDQQHQAAELECEEDVIPDSPITAFSFSGVNRLRRKENPHVRYIEQTHTKLEHSVCANEMRKVSKSSTHPQHNPNENEILVADTYDQSQSPMAKAHGTSSYTPDKSSFNLATVVAETLGLGVQEESETQGPMSPLGDELYHCLEGNHKKQPFESGSETPGTSESATPEGSPKRKVSSAEGAAKEEPKRRSARLSAKPPAKVEAKPKKAAAKDKSSDKKVQTKGKRGAKGKQAEVANQETKEDLPAENGETKTEESPASDEAGEKEAKSDSGSETPGTSESATPESYEQLAPQPCVGETLHSSLPRDSELFVPEEGSSEKESEDAPKTSPPTPGKHGLEQTGEEKVMVTVPDKNPPCPCCGTRVNSVLNLIEHLKVSHGKRGVCFRCAKCGKENSNYHSVVCHFKKCRGPETEKAPAGEWICEVCNRDFTTKIGLGQHKRLAHPAVRNQERIVASQPKETSNRGAHKRCWTKEEEELLIRLEAQFEGNKNINKLIAEHITTKTAKQISDKRRLLSRKPAEEPRMEPGTCHHTRRAAASLRTEPEMSHHAQAEDRDNGPGRRPLPGRAAAGGRTMDEIRRHPDKGNGQQRPTKQKSEEQLQAYYKKTLEERLSAGALNTFPRAFKQVMEGRDIKLVINQTAQDCFGCLESISQIRTATRDKKYTVTREKHPKKPFQKWMKKRAIKKGNYLRFQRLFYLDRGKLAKIILDDIECLSCDIPLSEIYSVFKTRWETTGSFKSLGDFKTYGKADNTAFRELITAKEIEKNVQEMSKGSAPGPDGITLGDVVKMDPEFSLTMEIFNLWLTTGKIPDMVRGCRTVLIPKSSKPDRLKDINNWRPITIGSILLRLFSRIVTARLSKACPLNPRQRGFIRAAGCSENLKLLQTIIWSAKREHRPLGVVFVDIAKAFDTVSHQHIIHALQQREVDPHIVGLVSNMYENISTYITTKRNTHTDKIQIRVGVKQGDPMSPLLFNLAMDPLLCKLEESGKGYHRGQSSITAMAFADDLVLLSDSWENMNTNISILETFCNLTGLKTQGQKCHGFYIKPTKKSYTINDCAAWTINGTPLNMIDPGESEKYLGLQFDPWIGIARSGLSTKLDEWLQRIDQAPLKPLQKLDILKTYTIPRLIYIADHSEVKSALLETLDQKIRTAVKEWLHLPPCTCDAILYSSTRDGGLGITKLAGLIPSVQARRLHRIAQSSDDTMKCFMEKEKMEQLHKKLWIQAGGDRENIPSIWEAPPSSEPPNNVSTNSEWEAPTQKPKFPKPCNWRKNEFKKWTKLASQGRGIVNFERDKISNHWIQYYRRIPHRKLLTALQLRANVYPTREFLARGRQDQYIKACRHCDADNESCAHIIGNCPVTQDARIKRHNYICELLLEEAKKKDWVVFKEPHIRDSNKELYKPDLIFVKDGRALVVDVTVRYEAAKSSLEEAAAEKVRKYKHLETEVRHLTNAKDVTFVGFPLGARGKWHQDNFKLLTELGLSKSRQVKMAETFSTVALFSSVDIVHMFASRARKSMVM

SEQ ID NO: 1127 - protein, 1665 aa, synthetic construct
MAPKKKRKVNISGSSCGSPNSADTSSDFKDLWTKLKECHDREVQGLQVKVTKLKQERILDAQRLEEFFTKNQQLREQQKVLHETIKVLEDRLRAGLCDRCAVTEEHMRKKQQEFENIRQQNLKLITELMNERNTLQEENKKLSEQLQQKIENDQQHQAAELECEEDVIPDSPITAFSFSGVNRLRRKENPHVRYIEQTHTKLEHSVCANEMRKVSKSSTHPQHNPNENEILVADTYDQSQSPMAKAHGTSSYTPDKSSFNLATVVAETLGLGVQEESETQGPMSPLGDELYHCLEGNHKKQPFESGSETPGTSESATPEGSPKRKVSSAEGAAKEEPKRRSARLSAKPPAKVEAKPKKAAAKDKSSDKKVQTKGKRGAKGKQAEVANQETKEDLPAENGETKTEESPASDEAGEKEAKSDSGSETPGTSESATPESYEQLAPQPCVGETLHSSLPRDSELFVPEEGSSEKESEDAPKTSPPTPGKHGLEQTGEEKVMVTVPDKNPPCPCCGTRVNSVLNLIEHLKVSHGKRGVCFRCAKCGKENSNYHSVVCHFKKCRGPETEKAPAGEWICEVCNRDFTTKIGLGQHKRLAHPAVRNQERIVASQPKETSNRGAHKRCWTKEEEELLIRLEAQFEGHKNINKLIAEHITTKTAKQISDKRRLLSRKPAEEPRMEPGTCHHTRRAAASLRTEPEMSHHAQAEDRDNGPGRRPLPGRAAAGGRTMDEIRRHPDKGNGQQRPTKQKSEEQLQAYYKKTLEERLSAGALNTFPRAFKQVMEGRDIKLVINQTAQDCFGCLESISQIRTATRDKKDTVTREKHPKRPFQKWMKKRAIKKGNYLRFQRLFYLDRGKLAKIILDDIECLSCDIPLSEIYSVFKTRWETTGSFKSLGDFKTYGKADNTAFRELITAKEIEKNVQEMSKGSAPGPDGITLGDVVKMDPEFSRTMEIFNLWLTTGKIPDMVRGCRTVLIPKSSKPDRLKDINNWRPITIGSILLRLFSRIVTARLSKACPLNPRQRGFIRAAGCSENLKLLQTIIWSAKREHRPLGVVFVDIAKAFDTVSHQHIIHALQQREVDPHIVGLVSNMYENISTYITTKRNTHTDKIQIRVGVKQGDPMSPLLFNLAMDPLLCKLEESGKGYHRGQSSITAMAFADDLVLLSDSWENMNTNISILETFCNLTGLKTQGQKCHGFYIKPTKKSYTINDCAAWTINGTPLNMIDPGESEKYLGLQFDPWIGIARSGLSTKLDFWLQRIDQAPLKPLQKLDILKTYTIPRLIYIADHSEVKSALLETLDQKIRTAVKEWLHLPPCTCDAILYSSTRDGGLGITKLAGLIPSVQARRLHRIAQSSDDTMKCFMEKERMEQLHKKLWIQAGGDRENIPSIWEAPPSSEPPNNVSTNSEWEAPTQKDKFPKPCNWRKNEFKKWTKLASQGRGIVNFERDKISNHWIQYYRRIPHRKLLTALQLRANVYPTREFLARGRQDQYIKACRHCDADNESCAHIIGNCPVTQDARIKRHNYICELLLEEAKKKDWVVFKEPHIRDSNKELYKPDLIFVKDGRALVVDVTVRYEAAKSSLEEAAAEKVRKYKHLETEVRHLTNAKDVTFVGFPLGARGKWHQDNFKLLTELGLSKSRQVKMAETFSTVALFSSVDIVHMFASRARKSMVM

SEQ ID NO: 1128 - protein, 1665 aa, synthetic construct
MAPKKKRKVNISGSSCGSPNSADTSSDFKDLWTKLKECHDREVQGLQVKVTKLKQERILDAQRLEEFFTKNQQLREQQKVLHETIKVLEDRLRAGLCDRCAVTEEHMRKKQQEFENIRQQNLKLITELMNERNTLQEENKKLSEQLQQKIENDQQHQAAELECEEDVIPDSPITAFSFSGVNRLRRKENPHVRYIEQTHTKLEHSVCANEMRKVSKSSTHPQHNPNENEILVADTYDQSQSPMAKAHGTSSYTPDKSSFNLATVVAETLGLGVQEESETQGPMSPLGDELYHCLEGNHKKQPFESGSETPGTSESATPEGSPKRKVSSAEGAAKEEPKRRSARLSAKPPAKVEAKPKKAAAKDKSSDKKVQTKGKRGAKGKQAEVANQETKEDLPAENGETKTEESPASDEAGEKEAKSDSGSETPGTSESATPESYEQLAPQPCVGETLHSSLPRDSELFVPEEGSSEKESEDAPKTSPPTPGKHGLEQTGEEKVMVTVPDKNPPCPCCGTRVNSVLNLIEHLKVSHGKRRVCFRCAKCGKENSNYHSVVCHFKKCRGPETEKAPAGEWICEVCNRDFTTKIGLGQHKRLAHPAVRNQERIVASQPKETSNRGAHKRCWTKEEEELLIRLEAQFEGHKNINKLIAEHITTKTAKQISDKRRLLSRKPAEEPRMEPGTCHHTRRAAASLRTEPEMSHHAQAEDRDNGPGRRPLPGRPAAGGRTMDEIRRHPDKGNGQQRPTKQKSEEQLQAYYKKTLEERLSAGALNTFPRAFKQVMEGRDIKLVINQTAQDCFGCLESISQIRTATRDKKDTVTREKHPKRPFQKWMKKRAIKKGNYLRFQRLFYLDRGKLAKIILDDIECLSCDIPLSEIYSVFKTRWETTGSFKSLGDFKTYGKADNTAFRELITAKEIEKNVQEMSKGSAPGPDGITLGDVVKMDPEFSRTMEIFNLWLTTGKIPDMVRGCRTVLIPKSSKPDRLKDINNWRPITIGSILLRLFSRIVTARLSKACPLNPRQRGFIRAAGCSENLKLLQTIIWSAKREHRPLGVVFVDIAKAFDTVSHQHIIHALQQREVDPHIVGLVSNMYENISTYITTKRNTHTDKIQIRVGVKQGDPMSPLLFNLAMDPLLCKLEESGKGYHRGQSSITAMAFADDLVLLSDSWENMNTNISILETFCNLTGLKTQGQKCHGFYIKPTKKSYTINDCAAWTINGTPLNMIDPGESEKYLGLQFDPWIGIARSGLSTKLDFWLQRIDQAPLKPLQKLDILKTYTIPRLIYIADHSEVKSALLETLDQKIRTAVKEWLHLPPCTCDAILYSSTRDGGLGITKLAGLIPSVQARRLHRIAQSSDDTMKCFMEKERMEQLHKKLWIQAGGDRENIPSIWEAPPSSEPPNNVSTNSEWEAPTQKDKFPKPCNWRKNEFKKWTKLASQGRGIVNFERDKISNHWIQYYRRIPHRKLLTALQLRANVYPTREFLARGRQDQYIKACRHCDADNESCAHIIGNCPVTQDARIKRHNYICELLLEEAKKKDWVVFKEPHIRDSNKELYKPDLIFVKDGRALVVDVTVRYEAAKSSLEEAAAEKVRKYKHLETEVRHLTNAKDVTFVGFPLGARGKWHQDNFKLLTELGLSKSRQVKMAETFSTVALFSSVDIVHMFASRARKSMVM

SEQ ID NO: 1129 - protein, 1665 aa, synthetic construct
MAPKKKRKVNISGSSCGSPNSADTSSDFKDLWTKLKECHDREVQGLQVKVTKLKQERILDAQRLEEFFTKNQQLREQQKVLHETIKVLEDRLRAGLCDRCAVTEEHMRKKQQEFENIRQQNLKLITELMNERNTLQEENKKLSEQLQQKIENDQQHQAAELECEEDVIPDSPITAFSFSGVNRLRRKENPHVRYIEQTHTKLEHSVCANEMRKVSKSSTHPQHNPNENEILVADTYDQSQSPMAKAHGTSSYTPDKSSFNLATVVAETLGLGVQEESETQGPMSPLGDELYHCLEGNHKKQPFESGSETPGTSESATPEGSPKRKVSSAEGAAKEEPKRRSARLSAKPPAKVEAKPKKAAAKDKSSDKKVQTKGKRGAKGKQAEVANQETKEDLPAENGETKTEESPASDEAGEKEAKSDSGSETPGTSESATPESYEQLAPQPCVGETLHSSLPRDSELFVPEEGSSEKESEDAPKTSPPTPGKHGLEQTGEEKVMVTVPDKNPPCPCCGTRVNSVLNLIEHLKVSHGKRGVCFRCAKCGKENSNYHSVVCHFKKCRGPETEKAPAGEWICEVCNRDFTTKIGLGQHKRLAHPAVRNQERIVASQPKETSNRGAHKRCWTKEEEELLIRLEAQFEGNKNINKLIAEHITTKTAKQISDKRRLLSRKPAEEPRMEPGTCHHTRRAAASLRTEPEMSHHAQAEDRDNGPGRRPLPGRAAAGGRTMDEIRRHPDKGNGQQRPTKQKSEEQLQAYYKKTLEERLSAGALNTFPRAFKQVMEGRDIKLVINQTAQDCFGCLESISQIRTATRDKKDTVTREKHPKKPFQKWMKKRAIKKGNYLRFQRLFYLDRGKLAKIILDDIECLSCDIPLSEIYSVFKTRWETTGSFKSLGDFKTYGKADNTAFRELITAKEIEKNVQEMSKGSAPGPDGITLGDVVKMDPEFSRTMEIFNLWLTTGKIPDMVRGCRTVLIPKSSKPDRLKDINNWRPITIGSILLRLFSRIVTARLSKACPLNPRQRGFIRAAGCSENLKLLQTIIWSAKREHRPLGVVFVDIAKAFDTVSHQHIIHALQQREVDPHIVGLVSNMYENISTYITTKRNTHTDKIQIRVGVKQGDPMSPLLFNLAMDPLLCKLEESGKGYHRGQSSITAMAFADDLVLLSDSWENMNTNISILETFCNLTGLKTQGQKCHGFYIKPTKKSYTINDCAAWTINGTPLNMIDPGESEKYLGLQFDPWIGIARSGLSTKLDFWLQRIDQAPLKPLQKLDILKTYTIPRLIYIADHSEVKSALLETLDQKIRTAVKEWLHLPPCTCDAILYSSTRDGGLGITKLAGLIPSVQARRLHRIAQSSDDTMKCFMEKEKMEQLHKKLWIQAGGDRENIPSIWEAPPSSEPPNNVSTNSEWEAPTQKDKFPKPCNWRKNEFKKWTKLASQGRGIVNFERDKISNHWIQYYRRIPHRKLLTALQLRANVYPTREFLARGRQDQYIKACRHCDADNESCAHIIGNCPVTQDARIKRANYICELLLEEAKKKDWVVFKEPHIRDSNKELYKPDLIFVKDGRALVVDVTVRYEAAKSSLEEAAAEKVRKYKHLETEVRHLTNAKDVTFVGFPLGARGKWHQDNFKLLTELGLSKSRQVKMAETFSTVALFSSVDIVHMFASRARKSMVM

SEQ ID NO: 1130 - protein, 1665 aa, synthetic construct
MAPKKKRKVNISGSSCGSPNSADTSSDFKDLWTKLKECHDREVQGLQVKVTKLKQERILDAQRLEEFFTKNQQLREQQKVLHETIKVLEDRLRAGLCDRCAVTEEHMRKKQQEFENIRQQNLKLITELMNERNTLQEENKKLSEQLQQKIENDQQHQAAELECEEDVIPDSPITAFSFSGVNRLRRKENPHVRYIEQTHTKLEHSVCANEMRKVSKSSTHPQHNPNENEILVADTYDQSQSPMAKAHGTSSYTPDKSSFNLATVVAETLGLGVQEESETQGPMSPLGDELYHCLEGNHKKQPFESGSETPGTSESATPEGSPKRKVSSAEGAAKEEPKRRSARLSAKPPAKVEAKPKKAAAKDKSSDKKVQTKGKRGAKGKQAEVANQETKEDLPAENGETKTEESPASDEAGEKEAKSDSGSETPGTSESATPESYEQLAPQPCVGETLHSSLPRDSELFVPEEGSSEKESEDAPKTSPPTPGKHGLEQTGEEKVMVTVPDKNPPCPCCGTRVNSVLNLIEHLKVSHGKRGVCFRCAKCGKENSNYHSVVCHFKKCRGPETEKAPAGEWICEVCNRDFTTKIGLGQHKRLAHPAVRNQERIVASQPKETSNRGAHKRCWTKEEEELLIRLEAQFEGNKNINKLIAEHITTKTAKQISDKRRLLSRKPAEEPRMEPGTCHHTRRAAASLRTEPEMSHHAQAEDRDNGPGRRPLPGRAAAGGRTMDEIRRHPDKGNGQQRPTKQKSEEQLQAYYKKTLEERLSAGALNTFPRAFKQVMEGRDIKLVINQTAQDCFGCLESISQIRTATRDKKDTVTREKHPKKPFQKWMKKRAIKKGNYLRFQRLFYLDRGKLAKIILDDIECLSCDIPLSEIYSVFKTRWETTGSFKSLGDFKTYGKADNTAFRELITAKEIEKNVQEMSKGSAPGPDGITLGDVVKMDPEFSRTMEIFNLWLTTGKIPDMVRGCRTVLIPKSSKPDRLKDINNWRPITIGSILLRLFSRIVTARLSKACPLNPRQRGFIRAAGCSENLKLLQTIIWSAKREHRPLGVVFVDIAKAFDTVSHQHIIHALQQREVDPHIVGLVSNMYENISTYITTKRNTHTDKIQIRVGVKQGDPMSPLLFNLAMDPLLCKLEESGKGYHRGQSSITAMAFADDLVLLSDSWENMNTNISILETFCNLTGLKTQGQKCHGFYIKPTKKSYTINDCAAWTINGTPLNMIDPGESEKYLGLQFDPWIGIARSGLSTKLDFWLQRIDQAPLKPLQKLDILKTYTIPRLIYIADHSEVKSALLETLDQKIRTAVKEWLHLPPCTCDAILYSSTRDGGLGITKLAGLIPSVQARRLHRIAQSSDDTMKCFMEKEKMEQLHKKLWIQAGGDRENIPSIWEAPPSSEPPNNVSTNSEWEAPTQKDKFPKPCNWRKNEFKKWTKLASQGRGIVNFERDKISNHWIQYYRRIPHRKLLTALQLRANVYPTREFLARGRQDQYIKACRHCDADNESCAHIIGNCPVTQDARIKRANYICELLLEEAKKKDWVVFKEPHIRDSNKELYKPDLIFVKDGRALVVDVTVRYEAAKSSLEEAAAEKVRKYKHLETEVRHLTNAKDVTFVGFPLGAAGKWHQDNFKLLTELGLSKSRQVKMAETFSTVALFSSVDIVHMFASRARKSMVM

SEQ ID NO: 1131 - protein, 1949 aa, synthetic construct
MASNDYTQQATQSYGAYPTQPGQGYSQQSSQPYGQQSYSGYSQSTDTSGYGQSSYSSYGQSQNTGYGTQSTPQGYGSTGGYGSSQSSQSSYGQQSSYPGYGQQPAPSSTSGSYGSSSQSSSYGQPQSGSYSQQPSYGGQQQSYGQQQSYNPPQGYGQQNQYNSSSGGGGGGGGGGNYGQDQSSMSSGGGSGGGYGNQDQSGGGGSGGYGQQDRGGRGRGGSGGGGGGGGGGYNRSSGGYEPRGRGGGRGGRGGMGGSDRGGFNKFGGPRDQGSRHDSEQDNSDNNTPKKKRKVNISGSSCGSPNSADTSSDFKDLWTKLKECHDREVQGLQVKVTKLKQERILDAQRLEEFFTKNQQLREQQKVLHETIKVLEDRLRAGLCDRCAVTEEHMRKKQQEFENIRQQNLKLITELMNERNTLQEENKKLSEQLQQKIENDQQHQAAELECEEDVIPDSPITAFSFSGVNRLRRKENPHVRYIEQTHTKLEHSVCANEMRKVSKSSTHPQHNPNENEILVADTYDQSQSPMAKAHGTSSYTPDKSSFNLATVVAETLGLGVQEESETQGPMSPLGDELYHCLEGNHKKQPFESGSETPGTSESATPEGSPKRKVSSAEGAAKEEPKRRSARLSAKPPAKVEAKPKKAAAKDKSSDKKVQTKGKRGAKGKQAEVANQETKEDLPAENGETKTEESPASDEAGEKEAKSDSGSETPGTSESATPESYEQLAPQPCVGETLHSSLPRDSELFVPEEGSSEKESEDAPKTSPPTPGKHGLEQTGEEKVMVTVPDKNPPCPCCGTRVNSVLNLIEHLKVSHGKRGVCFRCAKCGKENSNYHSVVCHFKKCRGPETEKAPAGEWICEVCNRDFTTKIGLGQHKRLAHPAVRNQERIVASQPKETSNRGAHKRCWTKEEEELLIRLEAQFEGNKNINKLIAEHITTKTAKQISDKRRLLSRKPAEEPREEPGTCHHTRRAAASLRTEPEMSHHAQAEDRDNGPGRRPLPGRAAAGGRTMDEIRRHPDKGNGQQRPTKQKSEEQLQAYYKKTLEERLSAGALNTFPRAFKQVMEGRDIKLVINQTAQDCFGCLESISQIRTATRDKKDTVTREKHPKKPFQKWMKKRAIKKGNYLRFQRLFYLDRGKLAKIILDDIECLSCDIPLSEIYSVFKTRWETTGSFKSLGDFKTYGKADNTAFRELITAKEIEKNVQEMSKGSAPGPDGITLGDVVKMDPEFSRTMEIFNLWLTTGKIPDMVRGCRTVLIPKSSKPDRLKDINNWRPITIGSILLRLFSRIVTARLSKACPLNPRQRGFIRAAGCSENLKLLQTIIWSAKREHRPLGVVFVDIAKAFDTVSHQHIIHALQQREVDPHIVGLVSNMYENISTYITTKRNTHTDKIQIRVGVKQGDPMSPLLFNLAMDPLLCKLEESGKGYHRGQSSITAMAFADDLVLLSDSWENMNTNISILETFCNLTGLKTQGQKCHGFYIKPTKKSYTINDCAAWTINGTPLNMIDPGESEKYLGLQFDPWIGIARSGLSTKLDFWLQRIDQAPLKPLQKTDILKTYTIPRLIYIADHSEVKSALLETLDQKIRTAVKEWLHLPPCTCDAILYSSTRDGGLGITKLAGLIPSVQARRLHRIAQSSDDTMKCFMEKEKMEQLHKKLWIQAGGDRENIPSIWEAPPSSEPPNNVSTNSEWEAPTQKDKFPKPCNWRKNEFKKWTKLASQGRGIVNFERDKISNHWIQYYRRIPHRKLLTALQLRANVYPTREFLARGRQDQYIKACRHCDADNESCAHIIGNCPVTQDARIKRHNYICELLLEEAKKKDWVVFKEPHIRDSNKELYKPDLIFVKDGRALVVDVTVRYEAAKSSLEEAAAEKVRKYKHLETEVRHLTNAKDVTFVGFPLGARGKWHQDNFKLLTELGLSKSRQVKMAETFSTVALFSSVDIVHMFASRARKSMVM

SEQ ID NO: 1132 - protein, 1665 aa, synthetic construct
MAPKKKRKVNISGSSCGSPNSADTSSDFKDLWTKLKECHDREVQGLQVKVTKLKQERILDAQRLEEFFTKNQQLREQQKVLHETIKVLEDRLRAGLCDRCAVTEEHMRKKQQEFENIRQQNLKLITELMNERNTLQEENKKLSEQLQQKIENDQQHQAAELECEEDVIPDSPITAFSFSGVNRLRRKENPHVRYIEQTHTKLEHSVCANEMRKVSKSSTHPQHNPNENEILVADTYDQSQSPMAKAHGTSSYTPDKSSFNLATVVAETLGLGVQEESETQGPMSPLGDELYHCLEGNHKKQPFESGSETPGTSESATPEGSPKRKVSSAEGAAKEEPKRRSARLSAKPPAKVEAKPKKAAAKDKSSDKKVQTKGKRGAKGKQAEVANQETKEDLPAENGETKTEESPASDEAGEKEAKSDSGSETPGTSESATPESYEQLAPQPCVGETLHSSLPRDSELFVPEEGSSEKESEDAPKTSPPTPGKHGLEQTGEEKVMVTVPDKNPPCPCCGTRVNSVLNLIEHLKVSHGKRGVCFRCAKCGKENSNYHSVVCHFKKCRGPETEKAPAGEWICEVCNRDFTTKIGLGQHKRLAHPAVRNQERIVASQPKETSNRGAHKRCWTKEEEELLIRLEAQFEGNKNINKLIAEHITTKTAKQISDKRRLLSRKPAEEPREEPGTCHHTRRAAASLRTEPEMSHHAQAEDRDNGPGRRPLPGRAAAGGRTMDEIRRHPDKGNGQQRPTKQKSEEQLQAYYKKTLEERLSAGALNTFPRAFKQVMEGRDIKLVINQTAQDCFGCLESISQIRTATRDKKDTVTREKHPKKPFQKWMKKRAIKKGNYLRFQRLFYKDRGKLAKIILDDIECLSCDIPLSEIYSVFKTRWETTGSFKSLGDFKTYGKADNTAFRELITAKEIEKNVQEMSKGSAPGPDGITLGDVVKMDPEFSRTMEIFNLWLTTGKIPDMVRGCRTVLIPKSSKPDRLKDINNWRPITIGSILLRLFSRIVTARLSKACPLNPRQRGFIRAAGCSENLKLLQTIIWSAKREHRPLGVVFVDIAKAFDTVSHQHIIHALQQREVDPHIVGLVSNMYENISTYITTKRNTHTDKIQIRVGVKQGDPMSPLLFNLAMDPLLCKLEESGKGYHRGQSSITAMAFADDLVLLSDSWENMNTNISILETFCNLTGLKTQGQKCHGFYIKPTKKSYTINDCAAWTINGTPLNMIDPGESEKYLGLQFDPWIGIARSGLSTKLDFWLQRIDQAPLKPLQKTDILKTYTIPRLIYIADHSEVKSALLETLDQKIRTAVKEWLHLPPCTCDAILYSSTRDGGLGITKLAGLIPSVQARRLHRIAQSSDDTMKCFMEKEKMEQLHKKLWIQAGGDRENIPSIWEAPPSSEPPNNVSTNSEWEAPTQKDKFPKPCNWRKNEFKKWTKLASQGRGIVNFERDKISNHWIQYYRRIPHRKLLTALQLRANVYPTREFLARGRQDQYIKACRHCDADNESCAHIIGNCPVTQDARIKRHNYICELLLEEAKKKDWVVFKEPHIRDSNKELYKPDLIFVKDGRALVVDVTVRYEAAKSSLEEAAAEKVRKYKHLETEVRHLTNAKDVTFVGFPLGARGKWHQDNFKLLTELGLSKSRQVKMAETFSTVALFSSVDIVHMFASRARKSMVM

SEQ ID NO: 1133 - protein, 1665 aa, synthetic construct
MAPKKKRKVNISGSSCGSPNSADTSSDFKDLWTKLKECHDREVQGLQVKVTKLKQERILDAQRLEEFFTKNQQLREQQKVLHETIKVLEDRLRAGLCDRCAVTEEHMRKKQQEFENIRQQNLKLITELMNERNTLQEENKKLSEQLQQKIENDQQHQAAELECEEDVIPDSPITAFSFSGVNRLRRKENPHVRYIEQTHTKLEHSVCANEMRKVSKSSTHPQHNPNENEILVADTYDQSQSPMAKAHGTSSYTPDKSSFNLATVVAETLGLGVQEESETQGPMSPLGDELYHCLEGNHKKQPFESGSETPGTSESATPEGSPKRKVSSAEGAAKEEPKRRSARLSAKPPAKVEAKPKKAAAKDKSSDKKVQTKGKRGAKGKQAEVANQETKEDLPAENGETKTEESPASDEAGEKEAKSDSGSETPGTSESATPESYEQLAPQPCVGETLHSSLPRDSELFVPEEGSSEKESEDAPKTSPPTPGKHGLEQTGEEKVMVTVPDKNPPCPCCGTRVNSVLNLIEHLKVSHGKRGVCFRCAKCGKENSNYHSVVCHFKKCRGPETEKAPAGEWICEVCNRDFTTKIGLGQHKRLAHPAVRNQERIVASQPKETSNRGAHKRCWTKEEEELLIRLEAQFEGNKNINKLIAEHITTKTAKQISDKRRLLSRKPAEEPREEPGTCHHTRRAAASLRTEPEMSHHAQAEDRDNGPGRRPLPGRAAAGGRTMDEIRRHPDKGNGQQRPTKQKSEEQLQAYYKKTLEERLSAGALNTFPRAFKQVMEGRDIKLVINQTAQDCFGCLESISQIRTATRDKKDTVTREKHPKKPFQKWMKKRAIKKGNYLRFQRLFYLDRGKLAKIILDDIECLSCDIPLSEIYSVFKTRWETTGSFKSLGDFKTYGKADNTAFRELITAKEIEKNVQEMSKGSAPGPDGITLGDVVKMDPEFSRTMEIFNLWLTTGKIPDMVRGCRTVLIPKSSKPDRLKDINNWRPITIGSILLRLFSRIVTARLSKACPLNPRQRGFIRAAGCSENLKLLQTIIWSAKREHRPLGVVFVDIAKAFDTVSHQHIIHALQQREVDPHIVGLVSNMYENISTYITTKRNTHTDKIQIRVGVKQGDPMSPLLFNLAMDPLLCKLEESGKGYHRGQSSITAMAFADDLVLLSDSWENMNTNISILETFCNLTGLKTQGQKCHGFYIKPTKKSYTINDCAAWTINGTPLNMIDPGESEKYLGLQFDPWIGIARSGLSTKLDFWLQRIDQAPLKPLQKTDILKTYTIPRLIYIADHSEVKSALLETLDQKIRTAVKEWLHLPPCTCDAILYSSTRDGGLGITKLAGLIPSVRARRLHRIAQSSDDTMKCFMEKEKMEQLHKKLWIQAGGDRENIPSIWEAPPSSEPPNNVSTNSEWEAPTQKDKFPKPCNWRKNEFKKWTKLASQGRGIVNFERDKISNHWIQYYRRIPHRKLLTALQLRANVYPTREFLARGRQDQYIKACRHCDADNESCAHIIGNCPVTQDARIKRHNYICELLLEEAKKKDWVVFKEPHIRDSNKELYKPDLIFVKDGRALVVDVTVRYEAAKSSLEEAAAEKVRKYKHLETEVRHLTNAKDVTFVGFPLGARGKWHQDNFKLLTELGLSKSRQVKMAETFSTVALFSSVDIVHMFASRARKSMVM

SEQ ID NO: 1134 - protein, 1665 aa, synthetic construct
MAPKKKRKVNISGSSCGSPNSADTSSDFKDLWTKLKECHDREVQGLQVKVTKLKQERILDAQRLEEFFTKNQQLREQQKVLHETIKVLEDRLRAGLCDRCAVTEEHMRKKQQEFENIRQQNLKLITELMNERNTLQEENKKLSEQLQQKIENDQQHQAAELECEEDVIPDSPITAFSFSGVNRLRRKENPHVRYIEQTHTKLEHSVCANEMRKVSKSSTHPQHNPNENEILVADTYDQSQSPMAKAHGTSSYTPDKSSFNLATVVAETLGLGVQEESETQGPMSPLGDELYHCLEGNHKKQPFESGSETPGTSESATPEGSPKRKVSSAEGAAKEEPKRRSARLSAKPPAKVEAKPKKAAAKDKSSDKKVQTKGKRGAKGKQAEVANQETKEDLPAENGETKTEESPASDEAGEKEAKSDSGSETPGTSESATPESYEQLAPQPCVGETLHSSLPRDSELFVPEEGSSEKESEDAPKTSPPTPGKHGLEQTGEEKVMVTVPDKNPPCPCCGTRVNSVLNLIEHLKVSHGKRGVCFRCAKCGKENSNYHSVVCHFKKCRGPETEKAPAGEWICEVCNRDFTTKIGLGQHKRLAHPAVRNQERIVASQPKETSNRGAHKRCWTKEEEELLIRLEAQFEGNKNINKLIAEHITTKTAKQISDKRRLLSRKPAEEPREEPGTCHHTRRAAASLRTEPEMSHHAQAEDRDNGPGRRPLPGRAAAGGRTMDEIRRHPDKGNGQQRPTKQKSEEQLQAYYKKTLEERLSAGALNTFPRAFKQVMEGRDIKLVINQTAQDCFGCLESISQIRTATRDKKDTVTREKHPKKPFQKWMKKRAIKKGNYLRFQRLFYLDRGKLAKIILDDIECLSCDIPLSEIYSVFKTRWETTGSFKSLGDFKTYGKADNTAFRELITAKEIEKNVQEMSKGSAPGPDGITLGDVVKMDPEFSRTMEIFNLWLTTGKIPDMVRGCRTVLIPKSSKPDRLKDINNWRPITIGSILLRLFSRIVTARLSKACPLNPRQRGFIRAAGCSENLKLLQTIIWSAKREHRPLGVVFVDIAKAFDTVSHQHIIHALQQREVDPHIVGLVSNMYENISTYITTKRNTHTDKIQIRVGVKQGDPMSPLLFNLAMDPLLCKLEESGKGYHRGQSSITAMAFADDLVLLSDSWENMNTNISILETFCNLTGLKTQGQKCHGFYIKPTKKSYTINDCAAWTINGTPLNMIDPGESEKYLGLQFDPWIGIARSGLSTKLDFWLQRIDQAPLKPLQKTDILKTYTIPRLIYIADHSEVKSALLETLDQKIRTAVKEWLHLPPCTCDAILYSSTRDGGLGITKLAGLIPSVQARRLHRIAQSSDDTMKCFMEKEKMEQLHKKLWIQAGGDRENIPSIWEAPPSSEPPNNVSTNSEWEAPTQKDKFPKPCNWRKNEFKKWTKLASQGRGIVNFERDKISNHWIQYYRRIPHRKLITALQLRANVYPTREFLARGRQDQYIKACRHCDADNESCAHIIGNCPVTQDARIKRHNYICELLLEEAKKKDWVVFKEPHIRDSNKELYKPDLIFVKDGRALVVDVTVRYEAAKSSLEEAAAEKVRKYKHLETEVRHLTNAKDVTFVGFPLGARGKWHQDNFKLLTELGLSKSRQVKMAETFSTVALFSSVDIVHMFASRARKSMVM

SEQ ID NO: 1135 - protein, 1665 aa, synthetic construct
MAPKKKRKVNISGSSCGSPNSADTSSDFKDLWTKLKECHDREVQGLQVKVTKLKQERILDAQRLEEFFTKNQQLREQQKVLHETIKVLEDRLRAGLCDRCAVTEEHMRKKQQEFENIRQQNLKLITELMNERNTLQEENKKLSEQLQQKIENDQQHQAAELECEEDVIPDSPITAFSFSGVNRLRRKENPHVRYIEQTHTKLEHSVCANEMRKVSKSSTHPQHNPNENEILVADTYDQSQSPMAKAHGTSSYTPDKSSFNLATVVAETLGLGVQEESETQGPMSPLGDELYHCLEGNHKKQPFESGSETPGTSESATPEGSPKRKVSSAEGAAKEEPKRRSARLSAKPPAKVEAKPKKAAAKDKSSDKKVQTKGKRGAKGKQAEVANQETKEDLPAENGETKTEESPASDEAGEKEAKSDSGSETPGTSESATPESYEQLAPQPCVGETLHSSLPRDSELFVPEEGSSEKESEDAPKTSPPTPGKHGLEQTGEEKVMVTVPDKNPPCPCCGTRVNSVLNLIEHLKVSHGKRGVCFRCAKCGKENSNYHSVVCHFKKCRGPETEKAPAGEWICEVCNRDFTTKIGLGQHKRLAHPAVRNQERIVASQPKETSNRGAHKRCWTKEEEELLIRLEAQFEGNKNINKLIAEHITTKTAKQISDKRRLLSRKPAEEPREEPGTCHHTRRAAASLRTEPEMSHHAQAEDRDNGPGRRPLPGRAAAGGRTMDEIRRHPDKGNGQQRPTKQKSEEQLQAYYKKTLEERLSAGALNTFPRAFKQVMEGRDIKLVINQTAQDCFGCLESISQIRTATRDKKDTVTREKHPKKPFQKWMKKRAIKKGNYLRFQRLFYLDRGKLAKIILDDIECLSCDIPLSEIYSVFKTRWETTGSFKSLGDFKTYGKADNTAFRELITAKEIEKNVQEMSKGSAPGPDGITLGDVVKMDPEFSRTMEIFNLWLTTGKIPDMVRGCRTVLIPKSSKPDRLKDINNWRPITIGSILLRLFSRIVTARLSKACPLNPRQRGFIRAAGCSENLKLLQTIIWSAKREHRPLGVVFVDIAKAFDTVSHQHIIHALQQREVDPHIVGLVSNMYENISTYITTKRNTHTDKIQIRVGVKQGDPMSPLLFNLAMDPLLCKLEESGKGYHRGQSSITAMAFADDLVLLSDSWENMNTNISILETFCNLTGLKTQGQKCHGFYIKPTKKSYTINDCAAWTINGTPLNMIDPGESEKYLGLQFDPWIGIARSGLSTKLDFWLQRIDQAPLKPLQKTDILKTYTIPRLIYIADHSEVKSALLETLDQKIRTAVKEWLHLPPCTCDAILYSSTRDGGLGITKLAGLIPSVQARRLHRIAQSSDDTMKCFMEKEKMEQLHKKLWIQAGGDRENIPSIWEAPPSSEPPNNVSTNSEWEAPTQKDKFPKPCNWRKNEFKKWTKLASQGRGIVNFERDKISNHWIQYYRRIPHRKLLTALQLRANVYPTREFLARGRQDQYIKACRHCDADNESCAHIIGQCPVTQDARIKRHNYICELLLEEAKKKDWVVFKEPHIRDSNKELYKPDLIFVKDGRALVVDVTVRYEAAKSSLEEAAAEKVRKYKHLETEVRHLTNAKDVTFVGFPLGARGKWHQDNFKLLTELGLSKSRQVKMAETFSTVALFSSVDIVHMFASRARKSMVM

SEQ ID NO: 1136 - protein, 1665 aa, synthetic construct
MAPKKKRKVNISGSSCGSPNSADTSSDFKDLWTKLKECHDREVQGLQVKVTKLKQERILDAQRLEEFFTKNQQLREQQKVLHETIKVLEDRLRAGLCDRCAVTEEHMRKKQQEFENIRQQNLKLITELMNERNTLQEENKKLSEQLQQKIENDQQHQAAELECEEDVIPDSPITAFSFSGVNRLRRKENPHVRYIEQTHTKLEHSVCANEMRKVSKSSTHPQHNPNENEILVADTYDQSQSPMAKAHGTSSYTPDKSSFNLATVVAETLGLGVQEESETQGPMSPLGDELYHCLEGNHKKQPFESGSETPGTSESATPEGSPKRKVSSAEGAAKEEPKRRSARLSAKPPAKVEAKPKKAAAKDKSSDKKVQTKGKRGAKGKQAEVANQETKEDLPAENGETKTEESPASDEAGEKEAKSDSGSETPGTSESATPESYEQLAPQPCVGETLHSSLPRDSELFVPEEGSSEKESEDAPKTSPPTPGKHGLEQTGEEKVMVTVPDKNPPCPCCGTRVNSVLNLIEHLKVSHGKRGVCFRCAKCGKENSNYHSVVCHFKKCRGPETEKAPAGEWICEVCNRDFTTKIGLGQHKRLAHPAVRNQERIVASQPKETSNRGAHKRCWTKEEEELLIRLEAQFEGNKNINKLIAEHITTKTAKQISDKRRLLSRKPAEEPREEPGTCHHTRRAAASLRTEPEMSHHAQAEDRDNGPGRRPLPGRAAAGGRTMDEIRRHPDKGNGQQRPTKQKSEEQLQAYYKKTLEERLSAGALNTFPRAFKQVMEGRDIKLVINQTAQDCFGCLESISQIRTATRDKKDTVTREKHPKKPFQKWMKKRAIKKGNYLRFQRLFYLDRGKLAKIILDDIECLSCDIPLSEIYSVFKTRWETTGSFKSLGDFKTYGKADNTAFRELITAKEIEKNVQEMSKGSAPGPDGITLGDVVKMDPEFSRTMEIFNLWLTTGKIPDMVRGCRTVLIPKSSKPDRLKDINNWRPITIGSILLRLFSRIVTARLSKACPLNPRQRGFIRAAGCSENLKLLQTIIWSAKREHRPLGVVFVDIAKAFDTVSHQHIIHALQQREVDPHIVGLVSNMYENISTYITTKRNTHTDKIQIRVGVKQGDPMSPLLFNLAMDPLLCKLEESGKGYHRGQSSITAMAFADDLVLLSDSWENMNTNISILETFCNLTGLKTQGQKCHGFYIKPTKKSYTINDCAAWTINGTPLNMIDPGESEKYLGLQFDPWIGIARSGLSTKLDFWLQRIDQAPLKPLQKTDILKTYTIPRLIYIADHSEVKSALLETLDQKIRTAVKEWLHLPPCTCDAILYSSTRDGGLGITKLAGLIPSVQARRLHRIAQSSDDTMKCFMEKEKMEQLHKKLWIQAGGDRENIPSIWEAPPSSEPPNNVSTNSEWEAPTQKDKFPKPCNWRKNEFKKWTKLASQGRGIVNFERDKISNHWIQYYRRIPHRKLLTALQLRANVYPTREFLARGRQDQYIKACRHCDADNESCAHIIGNCPVTQDARIKRHNYICELLLEEAKKKDWVVFKEPHIRDSNKELYKPDLIFVKDGRALVVDVTVRYEAAKSSLEEAAAEKVRKYKHLETEVRHLTNAKDVTFVGFPLGARGKWHQDNNKLLTELGLSKSRQVKMAETFSTVALFSSVDIVHMFASRARKSMVM

SEQ ID NO: 1137 - protein, 1665 aa, synthetic construct
MAPKKKRKVNISGSSCGSPNSADTSSDFKDLWTKLKECHDREVQGLQVKVTKLKQERILDAQRLEEFFTKNQQLREQQKVLHETIKVLEDRLRAGLCDRCAVTEEHMRKKQQEFENIRQQNLKLITELMNERNTLQEENKKLSEQLQQKIENDQQHQAAELECEEDVIPDSPITAFSFSGVNRLRRKDNPHVRYIEQTHTKLEHSVCANEMRKVSKSSTHPQHNPNENEILVADTYDQSQSPMAKAHGTSSYTPDKSSFNLATVVAETLGLGVQEESETQGPMSPLGDELYHCLEGNHKKQPFESGSETPGTSESATPEGSPKRKVSSAEGAAKEEPKRRSARLSAKPPAKVEAKPKKAAAKDKSSDKKVQTKGKRGAKGKQAEVANQETKEDLPAENGETKTEESPASDEAGEKEAKSDSGSETPGTSESATPESYEQLAPQPCVGETLHSSLPRDSELFVPEEGSSEKESEDAPKTSPPTPGKHGLEQTGEEKVMVTVPDKNPPCPCCGTRVNSVLNLIEHLKVSHGKRGVCFRCAKCGKENSNYHSVVCHFKKCRGPETEKAPAGEWICEVCNRDFTTKIGLGQHKRLAHPAVRNQERIVASQPKETSNRGAHKRCWTKEEEELLIRLEAQFEGNKNINKLIAEHITTKTAKQISDKRRLLSRKPAEEPREEPGTCHHTRRAAASLRTEPEMSHHAQAEDRDNGPGRRPLPGRAAAGGRTMDEIRRHPDKGNGQQRPTKQKSEEQLQAYYKKTLEERLSAGALNTFPRAFKQVMEGRDIKLVINQTAQDCFGCLESISQIRTATRDKKDTVTREKHPKKPFQKWMKKRAIKKGNYLRFQRLFYLDRGKLAKIILDDIECLSCDIPLSEIYSVFKTRWETTGSFKSLGDFKTYGKADNTAFRELITAKEIEKNVQEMSKGSAPGPDGITLGDVVKMDPEFSRTMEIFNLWLTTGKIPDMVRGCRTVLIPKSSKPDRLKDINNWRPITIGSILLRLFSRIVTARLSKACPLNPRQRGFIRAAGCSENLKLLQTIIWSAKREHRPLGVVFVDIAKAFDTVSHQHIIHALQQREVDPHIVGLVSNMYENISTYITTKRNTHTDKIQIRVGVKQGDPMSPLLFNLAMDPLLCKLEESGKGYHRGQSSITAMAFADDLVLLSDSWENMNTNISILETFCNLTGLKTQGQKCHGFYIKPTKDSYTINDCAAWTINGTPLNMIDPGESEKYLGLQFDPWIGIARSGLSTKLDFWLQRIDQAPLKPLQKTDILKTYTIPRLIYIADHSEVKSALLETLDQKIRTAVKEWLHLPPCTCDAILYSSTRDGGLGITKLAGLIPSVQARRLHRIAQSSDDTMKCFMEKEKMEQLHKKLWIQAGGDRENIPSIWEAPPSSEPPNNVSTNSEWEAPTQKDKFPKPCNWRKNEFKKWTKLASQGRGIVNFERDKISNHWIQYYRRIPHRKLLTALQLRANVYPTREFLARGRQDQYIKACRHCDADNESCAHIIGNCPVTQDARIKRHNYICELLLEEAKKKDWVVFKEPHIRDSNKELYKPDLIFVKDGRALVVDVTVRYEAAKSSLEEAAAEKVRKYKHLETEVRHLTNAKDVTFVGFPLGARGKWHQDNFKLLTELGLSKSRQVKMAETFSTVALFSSVDIVHMFASRARKSMVM

SEQ ID NO: 1138 - protein, 1665 aa, synthetic construct
MAPKKKRKVNISGSSCGSPNSADTSSDFKDLWTKLKECHDREVQGLQVKVTKLKQERILDAQRLEEFFTKNQQLREQQKVLHETIKVLEDRLRAGLCDRCAVTEEHMRKKQQEFENIRQQNLKLITELMNERNTLQEENKKLSEQLQQKIENDQQHQAAELECEEDVIPDSPITAFSFSGVNRLRRKANPHVRYIEQTHTKLEHSVCANEMRKVSKSSTHPQHNPNENEILVADTYDQSQSPMAKAHGTSSYTPDKSSFNLATVVAETLGLGVQEESETQGPMSPLGDELYHCLEGNHKKQPFESGSETPGTSESATPEGSPKRKVSSAEGAAKEEPKRRSARLSAKPPAKVEAKPKKAAAKDKSSDKKVQTKGKRGAKGKQAEVANQETKEDLPAENGETKTEESPASDEAGEKEAKSDSGSETPGTSESATPESYEQLAPQPCVGETLHSSLPRDSELFVPEEGSSEKESEDAPKTSPPTPGKHGLEQTGEEKVMVTVPDKNPPCPCCGTRVNSVLNLIEHLKVSHGKRGVCFRCAKCGKDNSNYHSVVCHFKKCRGPETEKAPAGEWICEVCNRDFTTKIGLGQHKRLAHPAVRNQERIVASQPKETSNRGAHKRCWTKEEEELLIRLEAQFEGNKNINKLIAEHITTKTAKQISDKRRLLSRKPAEEPREEPGTCHHTRRAAASLRTEPEMSHHAQAEDRDNGPGRRPLPGRAAAGGRTMDEIRRHPDKGNGQQRPTKQKSEEQLQAYYKKTLEERLSAGALNTFPRAFKQVMEGRDIKLVINQTAQDCFGCLESISQIRTATRDKKDTVTREKHPKKPFQKWMKKRAIKKGNYLRFQRLFYLDRGKLAKIILDDIECLSCDIPLSEIYSVFKTRWETTGSFKSLGDFKTYGKADNTAFRELITAKEIEKNVQEMSKGSAPGPDGITLGDVVKMDPEFSRTMEIFNLWLTTGKIPDMVRGCRTVLIPKSSKPDRLKDINNWRPITIGSILLRLFSRIVTARLSKACPLNPRQRGFIRAAGCSENLKLLQTIIWSAKREHRPLGVVFVDIAKAFDTVSHQHIIHALQQREVDPHIVGLVSNMYENISTYITTKRNTHTDKIQIRVGVKQGDPMSPLLFNLAMDPLLCKLEESGKGYHRGQSSITAMAFADDLVLLSDSWENMNTNISILETFCNLTGLKTQGQKCHGFYIKPTKDSYTINDCAAWTINGTPLNMIDPGESEKYLGLQFDPWIGIARSGLSTKLDFWLQRIDQAPLKPLQKTDILKTYTIPRLIYIADHSEVKSALLETLDQKIRTAVKEWLHLPPCTCDAILYSSTRDGGLGITKLAGLIPSVQARRLHRIAQSSDDTMKCFMEKEKMEQLHKKLWIQAGGDRENIPSIWEAPPSSEPPNNVSTNSEWEAPTQKDKFPKPCNWRKNEFKKWTKLASQGRGIVNFERDKISNHWIQYYRRIPHRKLLTALQLRANVYPTREFLARGRQDQYIKACRHCDADNESCAHIIGNCPVTQDARIKRHNYICELLLEEAKKKDWVVFKEPHIRDSNKELYKPDLIFVKDGRALVVDVTVRYEAAKSSLEEAAAEKVRKYKHLETEVRHLTNAKDVTFVGFPLGARGKWHQDNFKLLTELGLSKSRQVKMAETFSTVALFSSVDIVHMFASRARKSMVM

SEQ ID NO: 1139 - protein, 1665 aa, synthetic construct
MAPKKKRKVNISGSSCGSPNSADTSSDFKDLWTKLKECHDREVQGLQVKVTKLKQERILDAQRLEEFFTKNQQLREQQKVLHETIKVLEDRLRAGLCDRCAVTEEHMRKKQQEFENIRQQNLKLITELMNERNTLQEENKKLSEQLQQKIENDQQHQAAELECEEDVIPDSPITAFSFSGVNRLRRKENPHVRYIEQTHTKLEHSVCANEMRKVSKSSTHPQHNPNENEILVADTYDQSQSPMAKAHGTSSYTPDKSSFNLATVVAETLGLGVQEESETQGPMSPLGDELYHCLEGNHKKQPFESGSETPGTSESATPEGSPKRKVSSAEGAAKEEPKRRSARLSAKPPAKVEAKPKKAAAKDKSSDKKVQTKGKRGAKGKQAEVANQETKEDLPAENGETKTEESPASDEAGEKEAKSDSGSETPGTSESATPESYEQLAPQPCVGETLHSSLPRDSELFVPEEGSSEKESEDAPKTSPPTPGKHGLEQTGEEKVMVTVPDKNPPCPCCGTRVNSVLNLIEHLKVSHGKRGVCFRCAKCGKENSNYHSVVCHFKKCRGPETEKAPAGEWICEVCNRDFTTKIGLGQHKRLAHPAVRNQERIVASQPKETSNRGAHKRCWTKEEEELLIRLEAQFEGNKNINKLIAEHITTKTAKQISDKRRLLSRKPAEEPREEPGTCHHTRRAAASLRTEPEMSHHAQAEDRDNGPGKRPLPGRAAAGGRTMDEIRRHPDKGNGQQRPTKQKSEEQLQAYYKKTLEERLSAGALNTFPRAFKQVMEGRDIKLVINQTAQDCFGCLESISQIRTATRDKKDTVTREKHPKKPFQKWMKKRAIKKGNYLRFQRLFYLDRGKLAKIILDDIECLSCDIPLSEIYSVFKTRWETTGSFKSLGDFKTYGKADNTAFRELITAKEIEKNVQEMSKGSAPGPDGITLGDVVKMDPEFSRTMEIFNLWLTTGKIPDMVRGCRTVLIPKSSKPDRLKDINNWRPITIGSILLRLFSRIVTARLSKACPLNPRQRGFIRAAGCSENLKLLQTIIWSAKREHRPLGVVFVDIAKAFDTVSHQHIIHALQQREVDPHIVGLVSNMYENISTYITTKRNTHTDKIQIRVGVKQGDPMSPLLFNLAMDPLLCKLEESGKGYHRGQSSITAMAFADDLVLLSDSWENMNTNISILETFCNLTGLKTQGQKCHGFYIKPTKDSYTINDCAAWTINGTPLNMIDPGESEKYLGLQFDPWIGIARSGLSTKLDFWLQRIDQAPLKPLQKTDILKTYTIPRLIYIADHSEVKSALLETLDQKIRTAVKEWLHLPPCTCDAILYSSTRDGGLGITKLAGLIPSVQARRLHRIAQSSDDTMKCFMEKEKMEQLHKKLWIQAGGDRENIPSIWEAPPSSEPPNNVSTNSEWEAPTQKDKFPKPCNWRKNEFKKWTKLASQGRGIVNFERDKISNHWIQYYRRIPHRKLLTALQLRANVYPTREFLARGRQDQYIKACRHCDADNESCAHIIGNCPVTQDARIKRHNYICELLLEEAKKKDWVVFKEPHIRDSNKELYKPDLIFVKDGRALVVDVTVRYEAAKSSLEEAAAEKVRKYKHLETEVRHLTNAKDVTFVGFPLGARGKWHQDNFKLLTELGLSKSRQVKMAETFSTVALFSSVDIVHMFASRARKSMVM

SEQ ID NO: 1140 - protein, 1665 aa, synthetic construct
MAPKKKRKVNISGSSCGSPNSADTSSDFKDLWTKLKECHDREVQGLQVKVTKLKQERILDAQRLEEFFTKNQQLREQQKVLHETIKVLEDRLRAGLCDRCAVTEEHMRKKQQEFENIRQQNLKLITELMNERNTLQEENKKLSEQLQQKIENDQQHQAAELECEEDVIPDSPITAFSFSGVNRLRRKENPHVRYIEQTHTKLEHSVCANEMRKVSKSSTHPQHNPNENEILVADTYDQSQSPMAKAHGTSSYTPDKSSFNLATVVAETLGLGVQEESETQGPMSPLGDELYHCLEGNHKKQPFESGSETPGTSESATPEGSPKRKVSSAEGAAKEEPKRRSARLSAKPPAKVEAKPKKAAAKDKSSDKKVQTKGKRGAKGKQAEVANQETKEDLPAENGETKTEESPASDEAGEKEAKSDSGSETPGTSESATPESYEQLAPQPCVGETLHSSLPRDSELFVPEEGSSEKESEDAPKTSPPTPGKHGLEQTGEEKVMVTVPDKNPPCPCCGTRVNSVLNLIEHLKVSHGKRGVCFRCAKCGKENSNYHSVVCHFKKCRGPETEKAPAGEWICEVCNRDFTTKIGLGQHKRLAHPAVRNQERIVASQPKETSNRGAHKRCWTKEEEELLIRLEAQFEGNKNINKLIAEHITTKTAKQISDKRRLLSRKPAEEPREEPGTCHHTRRAAASLRTEPEMSHHAQAEDRDNGPGRRPAPGRAAAGGRTMDEIRRHPDKGNGQQRPTKQKSEEQLQAYYKKTLEERLSAGALNTFPRAFKQVMEGRDIKLVINQTAQDCFGCLESISQIRTATRDKKDTVTREKHPKKPFQKWMKKRAIKKGNYLRFQRLFYLDRGKLAKIILDDIECLSCDIPLSEIYSVFKTRWETTGSFKSLGDFKTYGKADNTAFRELITAKEIEKNVQEMSKGSAPGPDGITLGDVVKMDPEFSRTMEIFNLWLTTGKIPDMVRGCRTVLIPKSSKPDRLKDINNWRPITIGSILLRLFSRIVTARLSKACPLNPRQRGFIRAAGCSENLKLLQTIIWSAKREHRPLGVVFVDIAKAFDTVSHQHIIHALQQREVDPHIVGLVSNMYENISTYITTKRNTHTDKIQIRVGVKQGDPMSPLLFNLAMDPLLCKLEESGKGYHRGQSSITAMAFADDLVLLSDSWENMNTNISILETFCNLTGLKTQGQKCHGFYIKPTKDSYTINDCAAWTINGTPLNMIDPGESEKYLGLQFDPWIGIARSGLSTKLDFWLQRIDQAPLKPLQKTDILKTYTIPRLIYIADHSEVKSALLETLDQKIRTAVKEWLHLPPCTCDAILYSSTRDGGLGITKLAGLIPSVQARRLHRIAQSSDDTMKCFMEKEKMEQLHKKLWIQAGGDRENIPSIWEAPPSSEPPNNVSTNSEWEAPTQKDKFPKPCNWRKNEFKKWTKLASQGRGIVNFERDKISNHWIQYYRRIPHRKLLTALQLRANVYPTREFLARGRQDQYIKACRHCDADNESCAHIIGNCPVTQDARIKRHNYICELLLEEAKKKDWVVFKEPHIRDSNKELYKPDLIFVKDGRALVVDVTVRYEAAKSSLEEAAAEKVRKYKHLETEVRHLTNAKDVTFVGFPLGARGKWHQDNFKLLTELGLSKSRQVKMAETFSTVALFSSVDIVHMFASRARKSMVM

SEQ ID NO: 1141 - protein, 1665 aa, synthetic construct
MAPKKKRKVNISGSSCGSPNSADTSSDFKDLWTKLKECHDREVQGLQVKVTKLKQERILDAQRLEEFFTKNQQLREQQKVLHETIKVLEDRLRAGLCDRCAVTEEHMRKKQQEFENIRQQNLKLITELMNERNTLQEENKKLSEQLQQKIENDQQHQAAELECEEDVIPDSPITAFSFSGVNRLRRKENPHVRYIEQTHTKLEHSVCANEMRKVSKSSTHPQHNPNENEILVADTYDQSQSPMAKAHGTSSYTPDKSSFNLATVVAETLGLGVQEESETQGPMSPLGDELYHCLEGNHKKQPFESGSETPGTSESATPEGSPKRKVSSAEGAAKEEPKRRSARLSAKPPAKVEAKPKKAAAKDKSSDKKVQTKGKRGAKGKQAEVANQETKEDLPAENGETKTEESPASDEAGEKEAKSDSGSETPGTSESATPESYEQLAPQPCVGETLHSSLPRDSELFVPEEGSSEKESEDAPKTSPPTPGKHGLEQTGEEKVMVTVPDKNPPCPCCGTRVNSVLNLIEHLKVSHGKRGVCFRCAKCGKENSNYHSVVCHFKKCRGPETEKAPAGEWICEVCNRDFTTKIGLGQHKRLAHPAVRNQERIVASQPKETSNRGAHKRCWTKEEEELLIRLEAQFEGNKNINKLIAEHITTKTAKQISDKRRLLSRKPAEEPREEPGTCHHTRRAAASLRTEPEMSHHAQAEDRDNGPGRRPLPGRAAAGGRTMDEIRRHPDKGNGQQRPTKQKSEEQLQAYYKKTLEERLSAGALNTFPRAFKQVMEGRDIKLVINQTAQDCFGCLESISQIRTATRDKKDTVTREKHPKKPFQKWMKKRAIKKGNYLRFQRLFYLDRGKLAKIILDDIECLSCDIPLSEIYSVFKTRWETTGSFKSLGDFKTYGKADNTAFRELITAKEIEKNVQEMSKGSAPGPDGITLGDVVKMDPEFSRTMEIFNLWLTTGKIPDMVRGCRTVLIPKSSKPDRLKDINNWRPITIGSILLRLFSRIVTARLSKACPLNPRQRGFIRAAGCSENLKLLQTIIWSAKREHRPLGVVFVDIAKAFDTVSHQHIIHALQQREVDPHIVGLVSNMYENISTYITTKRNTHTDKIQIRVGVKQGDPMSPLLFNLAMDPLLCKLEESGKGYHRGQSSITAMAFADDLVLLSDSWENMNTNISILETFCNLTGLKTQGQKCHGFYIKPTKDSYTINDCAAWTINGTPLNMIDPGESEKYLGLQFDPWIGIARSGLSTKLDFWLQRIDQAPLKPLQKTDILKTYTIPRLIYIADHSEVKSALLETLDQKIRTAVKEWLHLPPCTCDAILYSSTRDGGLGITKLAGLIPSVQARRLHRIAQSSDDTMKCFMEKEKMEQLHKKLWIQAGGDRENIPSIWEAPPSSEPPNNVSTNSEWEAPTQKDKFPKPCNWRKNEFKKWTKLASQGRGIVNFERDKISNHWIQYYRRIPHRKLLTALQLRLNVYPTREFLARGRQDQYIKACRHCDADNESCAHIIGNCPVTQDARIKRHNYICELLLEEAKKKDWVVFKEPHIRDSNKELYKPDLIFVKDGRALVVDVTVRYEAAKSSLEEAAAEKVRKYKHLETEVRHLTNAKDVTFVGFPLGARGKWHQDNFKLLTELGLSKSRQVKMAETFSTVALFSSVDIVHMFASRARKSMVM

SEQ ID NO: 1142 - protein, 1665 aa, synthetic construct
MAPKKKRKVNISGSSCGSPNSADTSSDFKDLWTKLKECHDREVQGLQVKVTKLKQERILDAQRLEEFFTKNQQLREQQKVLHETIKVLEDRLRAGLCDRCAVTEEHMRKKQQEFENIRQQNLKLITELMNERNTLQEENKKLSEQLQQKIENDQQHQAAELECEEDVIPDSPITAFSFSGVNRLRRKENPHVRYIEQTHTKLEHSVCANEMRKVSKSSTHPQHNPNENEILVADTYDQSQSPMAKAHGTSSYTPDKSSFNLATVVAETLGLGVQEESETQGPMSPLGDELYHCLEGNHKKQPFESGSETPGTSESATPEGSPKRKVSSAEGAAKEEPKRRSARLSAKPPAKVEAKPKKAAAKDKSSDKKVQTKGKRGAKGKQAEVANQETKEDLPAENGETKTEESPASDEAGEKEAKSESGSETPGTSESATPESYEQLAPQPCVGETLHSSLPRDSELFVPEEGSSEKESEDAPKTSPPTPGKHGLEQTGEEKVMVTVPDKNPPCPCCGTRVNSVLNLIEHLKVSHGKRGVCFRCAKCGKENSNYHSVVCHFKKCRGPETEKAPAGEWICEVCNRDFTTKIGLGQHKRLAHPAVRNQERIVASQPKETSNRGAHKRCWTKEEEELLIRLEAQFEGNKNINKLIAEHITTKTAKQISDKRRLLSRKPAEEPREEPGTCHHTRRAAASLRTEPEMSHHAQAEDRDNGPGRRPLPGRAAAGGRTMDEIRRHPDKGNGQQRPTKQKSEEQLQAYYKKTLEERLSAGALNTFPRAFKQVMEGRDIKLVINQTAQDCFGCLESISQIRTATRDKKDTVTREKHPKKPFQKWMKKRAIKKGNYLRFQRLFYLDRGKLAKIILDDIECLSCDIPLSEIYSVFKTRWETTGSFKSLGDFKTYGKADNTAFRELITAKEIEKNVQEMSKGSAPGPDGITLGDVVKMDPEFSRTMEIFNLWLTTGKIPDMVRGCRTVLIPKSSKPDRLKDINNWRPITIGSILLRLFSRIVTARLSKACPLNPRQRGFIRAAGCSENLKLLQTIIWSAKREHRPLGVVFVDIAKAFDTVSHQHIIHALQQREVDPHIVGLVSNMYENISTYITTKRNTHTDKIQIRVGVKQGDPMSPLLFNLAMDPLLCKLEESGKGYHRGQSSITAMAFADDLVLLSDSWENMNTNISILETFCNLTGLKTQGQKCHGFYIKPTKDSYTINDCAAWTINGTPLNMIDPGESEKYLGLQFDPWIGIARSGLSTKLDFWLQRIDQAPLKPLQKTDILKTYTIPRLIYIADHSEVKSALLETLDQKIRTAVKEWLHLPPCTCDAILYSSTRDGGLGITKLAGLIPSVQARRLHRIAQSSDDTMKCFMEKEKMEQLHKKLWIQAGGDRENIPSIWEAPPSSEPPNNVSTNSEWEAPTQKDKFPKPCNWRKNEFKKWTKLASQGRGIVNFERDKISNHWIQYYRRIPHRKLLTALQLRANVYPTREFLARGRQDQYIKACRHCDADNESCAHIIGNCPVTQDARIKRHNYICELLLEEAKKKDWVVFKEPHIRDSNKELYKPDLIFVKDGRALVVDVTVRYEAAKSSLEEAAAEKVRKYKHLETEVRHLTNAKDVTFVGFPLGARGKWHQDNFKLLTELGLSKSRQVKMAETFSTVALFSSVDIVHMFASRARKSMVM

SEQ ID NO: 1143 - protein, 1665 aa, synthetic construct
MAPKKKRKVNISGSSCGSPNSADTSSDFKDLWTKLKECHDREVQGLQVKVTKLKQERILDAQRLEEFFTKNQQLREQQKVLHETIKVLEDRLRAGLCDRCAVTEEHMRKKQQEFENIRQQNLKLITELMNERNTLQEENKKLSEQLQQKIENDQQHQAAELECEEDVIPDSPITAFSFSGVNRLRRKENPHVRYIEQTHTKLEHSVCANEMRKVSKSSTHPQHNPNENEILVADTYDQSQSPMAKAHGTSSYTPDKSSFNLATVVAETLGLGVQEESETQGPMSPLGDELYHCLEGNHKKQPFESGSETPGTSESATPEGSPKRKVSSAEGAAKEEPKRRSARLSAKPPAKVEAKPKKAAAKDKSSDKKVQTKGKRGAKGKQAEVANQETKEDLPAENGETKTEESPASDEAGEKEAKSGSGSETPGTSESATPESYEQLAPQPCVGETLHSSLPRDSELFVPEEGSSEKESEDAPKTSPPTPGKHGLEQTGEEKVMVTVPDKNPPCPCCGTRVNSVLNLIEHLKVSHGKRGVCFRCAKCGKENSNYHSVVCHFKKCRGPETEKAPAGEWICEVCNRDFTTKIGLGQHKRLAHPAVRNQERIVASQPKETSNRGAHKRCWTKEEEELLIRLEAQFEGNKNINKLIAEHITTKTAKQISDKRRLLSRKPAEEPREEPGTCHHTRRAAASLRTEPEMSHHAQAEDRDNGPGRRPLPGRAAAGGRTMDEIRRHPDKGNGQQRPTKQKSEEQLQAYYKKTLEERLSAGALNTFPRAFKQVMEGRDIKLVINQTAQDCFGCLESISQIRTATRDKKDTVTREKHPKKPFQKWMKKRAIKKGNYLRFQRLFYLDRGKLAKIILDDIECLSCDIPLSEIYSVFKTRWETTGSFKSLGDFKTYGKADNTAFRELITAKEIEKNVQEMSKGSAPGPDGITLGDVVKMDPEFSRTMEIFNLWLTTGKIPDMVRGCRTVLIPKSSKPDRLKDINNWRPITIGSILLRLFSRIVTARLSKACPLNPRQRGFIRAAGCSENLKLLQTIIWSAKREHRPLGVVFVDIAKAFDTVSHQHIIHALQQREVDPHIVGLVSNMYENISTYITTKRNTHTDKIQIRVGVKQGDPMSPLLFNLAMDPLLCKLEESGKGYHRGQSSITAMAFADDLVLLSDSWENMNTNISILETFCNLTGLKTQGQKCHGFYIKPTKDSYTINDCAAWTINGTPLNMIDPGESEKYLGLQFDPWIGIARSGLSTKLDFWLQRIDQAPLKPLQKTDILKTYTIPRLIYIADHSEVKSALLETLDQKIRTAVKEWLHLPPCTCDAILYSSTRDGGLGITKLAGLIPSVQARRLHRIAQSSDDTMKCFMEKEKMEQLHKKLWIQAGGDRENIPSIWEAPPSSEPPNNVSTNSEWEAPTQKDKFPKPCNWRKNEFKKWTKLASQGRGIVNFERDKISNHWIQYYRRIPHRKLLTALQLRANVYPTREFLARGRQDQYIKACRHCDADNESCAHIIGNCPVTQDARIKRHNYICELLLEEAKKKDWVVFKEPHIRDSNKELYKPDLIFVKDGRALVVDVTVRYEAAKSSLEEAAAEKVRKYKHLETEVRHLTNAKDVTFVGFPLGARGKWHQDNFKLLTELGLSKSRQVKMAETFSTVALFSSVDIVHMFASRARKSMVM

SEQ ID NO: 1144 - protein, 1665 aa, synthetic construct
MAPKKKRKVNISGSSCGSPNSADTSSDFKDLWTKLKECHDREVQGLQVKVTKLKQERILDAQRLEEFFTKNQQLREQQKVLHETIKVLEDRLRAGLCDRCAVTEEHMRKKQQEFENIRQQNLKLITELMNERNTLQEENKKLSEQLQQKIENDQQHQAAELECEEDVIPDSPITAFSFSGVNRLRRKENPHVRYIEQTHTKLEHSVCANEMRKVSKSSTHPQHNPNENEILVADTYDQSQSPMAKAHGTSSYTPDKSSFNLATVVAETLGLGVQEESETQGPMSPLGDELYHCLEGNHKKQPFESGSETPGTSESATPEGSPKRKVSSAEGAAKEEPKRRSARLSAKPPAKVEAKPKKAAAKDKSSDKKVQTKGKRGAKGKQAEVANQETKEDLPAENGETKTEESPASDEAGEKEAKSDSGSETPGTSESATPESYEQLAPQPCVGETLHSSLPRDSELFVPEEGSSEKESEDAPKTSPPTPGKHGLEQTGEEKVMVTVPDKNPPCPCCGTRVNSVLNLIEHLKVSHGKRGVCFRCAKCGKENSNYHSVVCHFKKCRGPETEKAPAGEWICEVCNRDFTTKIGLGQHKRLAHPAVRNQERIVASQPKETSNRGAHKRCWTKEEEELLIRLEAQFEGNKNINKLIAEHITTKTAKQISDKRRLLSRKPAEEPREEPGTCHHTRRAAASLRTEPEMSHHAQAEDRDNGPGRRPLPGRAAAGGRTMDEIRRHPDKGNGQQRPTKQKSEEQLQAYYKKTLEERLSAGALNTFPRAFKQVMEGRDIKLVINQTAQDCFGCLESISQIRTATRDKKDTVTREKHPKKPFQKWMKKRAIKKGNYLRFQRLFYLDRGKLAKIILDDIECLSCDIPLSEIYSVFKTRWETTGSFKSLGDFKTYGKADNTAFRELITAKEIEKNVQEMSKGSAPGPDGITLGDVVKMDPEFSRTMEIFNLWLTTGKIPDMVRGCRTVLIPKSSKPDRLKDINNWRPITIGSILLRLFSRIVTARLSKACPLNPRQRGFIRAAGCSENLKLLQTIIWSAKREHRPLGVVFVDIAKAFDTVSHQHIIHALQQREVDPHIVGLVSNMYENISTYITTKRNTHTDKIQIRVGVKQGDPMSPLLFNLAMDPLLCKLEESGKGYHRGQSSITAMAFADDLVLLSDSWENMNTNISILETFCNLTGLKTQGQKCHGFYIKPTKDSYTINDCAAWTINGTPLNMIDPGESEKYLGLQFDPWIGIARSGLSTKLDFWLQRIDQAPLKPLQKTDILKTYTIPRLIYIADHSEVKSALLETLDQKIRTAVKEWLHLPPCTCDAILYSSTRDGGLGITKLAGLIPSVQARRLHRIAQSSDDTMKCFMEKEKMEQLHKKLWIQAGGDRENIPSIWEAPPSSEPPNNVSTNSEWEAPTQKDKFPKPCNWRKNEFKKWTKLASQGRGIVNFERDKISNHWIQYYRRIPHRKLLTALQLRANVYPTKEFLARGRQDQYIKACRHCDADNESCAHIIGNCPVTQDARIKRHNYICELLLEEAKKKDWVVFKEPHIRDSNKELYKPDLIFVKDGRALVVDVTVRYEAAKSSLEEAAAEKVRKYKHLETEVRHLTNAKDVTFVGFPLGARGKWHQDNFKLLTELGLSKSRQVKMAETFSTVALFSSVDIVHMFASRARKSMVM

SEQ ID NO: 1145 - protein, 1665 aa, synthetic construct
MAPKKKRKVNISGSSCGSPNSADTSSDFKDLWTKLKECHDREVQGLQVKVTKLKQERILDAQRLEEFFTKNQQLREQQKVLHETIKVLEDRLRAGLCDRCAVTEEHMRKKQQEFENIRQQNLKLITELMNERNTLQEENKKLSEQLQQKIENDQQHQAAELECEEDVIPDSPITAFSFSGVNRLRRKENPHVRYIEQTHTKLEHSVCANEMRKVSKSSTHPQHNPNENEILVADTYDQSQSPMAKAHGTSSYTPDKSSFNLATVVAETLGLGVQEESETQGPMSPLGDELYHCLEGNHKKQPFESGSETPGTSESATPEGSPKRKVSSAEGAAKEEPKRRSARLSAKPPAKVEAKPKKAAAKDKSSDKKVQTKGKRGAKGKQAEVANQETKEDLPAENGETKTEESPASDEAGEKEAKSDSGSETPGTSESATPESYEQLAPQPCVGETLHSSLPRDSELFVPEEGSSEKESEDAPKTSPPTPGKHGLEQTGEEKVMVTVPDKNPPCPCCGTRVNSVLNLIEHLKVSHGKRGVCFRCAKCGKENSNYHSVVCHFKKCRGPETEKAPAGEWICEVCNRDFTTKIGLGQHKRLAHPAVRNQERIVASQPKETSNRGAHKRCWTKEEEELLIRLEAQFEGNKNINKLIAEHITTKTAKQISDKRRLLSRKPAEEPREEPGTCHHTRRAAASLRTEPEMSHHAQAEDRDNGPGRRPLPGRAAAGGRTMDEIRRHPDKGNGQQRPTKQKSEEQLQAYYKKTLEERLSAGALNTFPRAFKQVMEGRDIKLVINQTAQDCFGCLESISQIRTATRDKKDTVTREKHPKKPFQKWMKKRAIKKGNYLRFQRLFYLDRGKLAKIILDDIECLSCDIPLSEIYSVFKTRWETTGSFKSLGDFKTYGKADNTAFRELITAKEIEKNVQEMSKGSAPGPDGITLGDVVKMDPEFSRTMEIFNLWLTTGKIPDMVRGCRTVLIPKSSKPDRLKDINNWRPITIGSILLRLFSRIVTARLSKACPLNPRQRGFIRAAGCSENLKLLQTIIWSAKREHRPLGVVFVDIAKAFDTVSHQHIIHALQQREVDPHIVGLVSNMYENISTYITTKRNTHTDKIQIRVGVKQGDPMSPLLFNLAMDPLLCKLEESGKGYHRGQSSITAMAFADDLVLLSDSWENMNTNISILETFCNLTGLKTQGQKCHGFYIKPTKDSYTINDCAAWTINGTPLNMIDPGESEKYLGLQFDPWIGIARSGLSTKLDFWLQRIDQAPLKPLQKTDILKTYTIPRLIYIADHSEVKSALLETLDQKIRTAVKEWLHLPPCTCDAILYSSTRDGGLGITKLAGLIPSVQARRLHRIAQSSDDTMKCFMEKEKMEQLHKKLWIQAGGDRENIPSIWEAPPSSEPPNNVSTNSEWEAPTQKDKFPKPCNWRKNEFKKWTKLASQGRGIVNFERDKISNHWIQYYRRIPHRKLLTALQLRANVYPTKEFIARGRQDQYIKACRHCDADNESCAHIIGNCPVTQDARIKRHNYICELLLEEAKKKDWVVFKEPHIRDSNKELYKPDLIFVKDGRALVVDVTVRYEAAKSSLEEAAAEKVRKYKHLETEVRHLTNAKDVTFVGFPLGARGKWHQDNFKLLTELGLSKSRQVKMAETFSTVALFSSVDIVHMFASRARKSMVM

SEQ ID NO: 1146 - protein, 1665 aa, synthetic construct
MAPKKKRKVNISGSSCGSPNSADTSSDFKDLWTKLKECHDREVQGLQVKVTKLKQERILDAQRLEEFFTKNQQLREQQKVLHETIKVLEDRLRAGLCDRCAVTEEHMRKKQQEFENIRQQNLKLITELMNERNTLQEENKKLSEQLQQKIENDQQHQAAELECEEDVIPDSPITAFSFSGVNRLRRKENPHVRYIEQTHTKLEHSVCANEMRKVSKSSTHPQHNPNENEILVADTYDQSQSPMAKAHGTSSYTPDKSSFNLATVVAETLGLGVQEESETQGPMSPLGDELYHCLEGNHKKQPFESGSETPGTSESATPEGSPKRKVSSAEGAAKEEPKRRSARLSAKPPAKVEAKPKKAAAKDKSSDKKVQTKGKRGAKGKQAEVANQETKEDLPAENGETKTEESPASDEAGEKEAKSDSGSETPGTSESATPESYEQLAPQPCVGETLHSSLPRDSELFVPEEGSSEKESEDAPKTSPPTPGKHGLEQTGEEKVMVTVPDKNPPCPCCGTRVNSVLNLIEHLKVSHGKRGVCFRCAKCGKENSNYHSVVCHFKKCRGPETEKAPAGEWICEVCNRDFTTKIGLGQHKRLAHPAVRNQERIVASQPKETSNRGAHKRCWTKEEEELLIRLEAQFEGNKNINKLIAEHITTKTAKQISDKRRLLSRKPAEEPREEPGTCHHTRRAAASLRTEPEMSHHAQAEDRDNGPGRRPLPGRAAAGGRTMDEIRRHPDKGNGQQRPTKQKSEEQLQAYYKKTLEERLSAGALNTFPRAFKQVMEGRDIKLVINQTAQDCFGCLESISQIRTATRDKKDTVTREKHPKKPFQKWMKKRAIKKGNYLRFQRLFYLDRGKLAKIILDDIECLSCDIPLSEIYSVFKTRWETTGSFKSLGDFKTYGKADNTAFRELITAKEIEKNVQEMSKGSAPGPDGITLGDVVKMDPEFSRTMEIFNLWLTTGKIPDMVRGCRTVLIPKSSKPDRLKDINNWRPITIGSILLRLFSRIVTARLSKACPLNPRQRGFIRAAGCSENLKLLQTIIWSAKREHRPLGVVFVDIAKAFDTVSHQHIIHALQQREVDPHIVGLVSNMYENISTYITTKRNTHTDKIQIRVGVKQGDPMSPLLFNLAMDPLLCKLEESGKGYHRGQSSITAMAFADDLVLLSDSWENMNTNISILETFCNLTGLKTQGQKCHGFYIKPTKDSYTINDCAAWTINGTPLNMIDPGESEKYLGLQFDPWIGIARSGLSTKLDFWLQRIDQAPLKPLQKTDILKTYTIPRLIYIADHSEVKSALLETLDQKIRTAVKEWLHLPPCTCDAILYSSTRDGGLGITKLAGLIPSVQARRLHRIAQSSDDTMKCFMEKEKMEQLHKKLWIQAGGDRENIPSIWEAPPSSEPPNNVSTNSEWEAPTQKDKFPKPCNWRKNEFKKWTKLASQGRGIVNFERDKISNHWIQYYRRIPHRKLLTALQLRANVYPTREFLARGRQDQYIKACRHCDADNESCAHIIGNCPVTQDARIKRHNYICELLLEEAKKKDWVVFKEPHIRDSNKELYKPDLIFVKDGRALVVDVTVRYEAAKSSLEEAAAEKVRKYKHLETEVRHLTNAKDVTFVAFPLGARGKWHQDNFKLLTELGLSKSRQVKMAETFSTVALFSSVDIVHMFASRARKSMVM

SEQ ID NO: 1147 - protein, 1665 aa, synthetic construct
MAPKKKRKVNISGSSCGSPNSADTSSDFKDLWTKLKECHDREVQGLQVKVTKLKQERILDAQRLEEFFTKNQQLREQQKVLHETIKVLEDRLRAGLCDRCAVTEEHMRKKQQEFENIRQQNLKLITELMNERNTLQEENKKLSEQLQQKIENDQQHQAAELECEEDVIPDSPITAFSFSGVNRLRRKENPHVRYIEQTHTKLEHSVCANEMRKVSKSSTHPQHNPNENEILVADTYDQSQSPMAKAHGTSSYTPDKSSFNLATVVAETLGLGVQEESETQGPMSPLGDELYHCLEGNHKKQPFESGSETPGTSESATPEGSPKRKVSSAEGAAKEEPKRRSARLSAKPPAKVEAKPKKAAAKDKSSDKKVQTKGKRGAKGKQAEVANQETKEDLPAENGETKTEESPASDEAGEKEAKSDSGSETPGTSESATPESYEQLAPQPCVGETLHSSLPRDSELFVPEEGSSEKESEDAPKTSPPTPGKHGLEQTGEEKVMVTVPDKNPPCPCCGTRVNSVLNLIEHLKVSHGKRGVCFRCAKCGKENSNYHSVVCHFKKCRGPETEKAPAGEWICEVCNRDFTTKIGLGQHKRLAHPAVRNQERIVASQPKETSNRGAHKRCWTKEEEELLIRLEAQFEGNKNINKLIAEHITTKTAKQISDKRRLLSRKPAEEPREEPGTCHHTRRAAASLRTEPEMSHHAQAEDRDNGPGRRPLPGRAAAGGRTMDEIRRHPDKGNGQQRPTKQKSEEQLQAYYKKTLEERLSAGALNTFPRAFKQVMEGRDIKLVINQTAQDCFGCLESISQIRTATRDKKDTVTREKHPKKPFQKWMKKRAIKKGNYLRFQRLFYLDRGKLAKIILDDIECLSCDIPLSEIYSVFKTRWETTGSFKSLGDFKTYGKADNTAFRELITAKEIEKNVQEMSKGSAPGPDGITLGDVVKMDPEFSRTMEIFNLWLTTGKIPDMVRGCRTVLIPKSSKPDRLKDINNWRPITIGSILLRLFSRIVTARLSKACPLNPRQRGFIRAAGCSENLKLLQTIIWSAKREHRPLGVVFVDIAKAFDTVSHQHIIHALQQREVDPHIVGLVSNMYENISTYITTKRNTHTDKIQIRVGVKQGDPMSPLLFNLAMDPLLCKLEESGKGYHRGQSSITAMAFADDLVLLSDSWENMNTNISILETFCNLTGLKTQGQKCHGFYIKPTKDSYTINDCAAWTINGTPLNMIDPGESEKYLGLQFDPWIGIARSGLSTKLDFWLQRIDQAPLKPLQKTDILKTYTIPRLIYIADHSEVKSALLETLDQKIRTAVKEWLHLPPCTCDAILYSSTRDGGLGITKLAGLIPSVQARRLHRIAQSSDDTMKCFMEKEKMEQLHKKLWIQAGGDRENIPSIWEAPPSSEPPNNVSTNSEWEAPTQKDKFPKPCNWRKNEFKKWTKLASQGRGIVNFERDKISNHWIQYYRRIPHRKLLTALQLRANVYPTREFLARGRQDQYIKACRHCDADNESCAHIIGNCPVTQDARIKRHNYICELLLEEAKKKDWVVFKEPHIRDSNKELYKPDLIFVKDGRALVVDVTVRYEAAKSSLEEAAAEKVRKYKHLETEVRHLTNAKDVTFVGFPLAARGKWHQDNFKLLTELGLSKSRQVKMAETFSTVALFSSVDIVHMFASRARKSMVM

SEQ ID NO: 1148 - protein, 1665 aa, synthetic construct
MAPKKKRKVNISGSSCGSPNSADTSSDFKDLWTKLKECHDREVQGLQVKVTKLKQERILDAQRLEEFFTKNQQLREQQKVLHETIKVLEDRLRAGLCDRCAVTEEHMRKKQQEFENIRQQNLKLITELMNERNTLQEENKKLSEQLQQKIENDQQHQAAELECEEDVIPDSPITAFSFSGVNRLRRKENPHVRYIEQTHTKLEHSVCANEMRKVSKSSTHPQHNPNENEILVADTYDQSQSPMAKAHGTSSYTPDKSSFNLATVVAETLGLGVQEESETQGPMSPLGDELYHCLEGNHKKQPFESGSETPGTSESATPEGSPKRKVSSAEGAAKEEPKRRSARLSAKPPAKVEAKPKKAAAKDKSSDKKVQTKGKRGAKGKQAEVANQETKEDLPAENGETKTEESPASDEAGEKEAKSDSGSETPGTSESATPESYEQLAPQPCVGETLHSSLPRDSELFVPEEGSSEKESEDAPKTSPPTPGKHGLEQTGEEKVMVTVPDKNPPCPCCGTRVNSVLNLIEHLKVSHGKRGVCFRCAKCGKENSNYHSVVCHFKKCRGPETEKAPAGEWICEVCNRDFTTKIGLGQHKRLAHPAVRNQERIVASQPKETSNRGAHKRCWTKEEEELLIRLEAQFEGNKNINKLIAEHITTKTAKQISDKRRLLSRKPAEEPREEPGTCHHTRRAAASLRTEPEMSHHAQAEDRDNGPGRRPLPGRAAAGGRTMDEIRRHPDKGNGQQRPTKQKSEEQLQAYYKKTLEERLSAGALNTFPRAFKQVMEGRDIKLVINQTAQDCFGCLESISQIRTATRDKKDTVTREKHPKKPFQKWMKKRAIKKGNYLRFQRLFYLDRGKLAKIILDDIECLSCDIPLSEIYSVFKTRWETTGSFKSLGDFKTYGKADNTAFRELITAKEIEKNVQEMSKGSAPGPDGITLGDVVKMDPEFSRTMEIFNLWLTTGKIPDMVRGCRTVLIPKSSKPDRLKDINNWRPITIGSILLRLFSRIVTARLSKACPLNPRQRGFIRAAGCSENLKLLQTIIWSAKREHRPLGVVFVDIAKAFDTVSHQHIIHALQQREVDPHIVGLVSNMYENISTYITTKRNTHTDKIQIRVGVKQGDPMSPLLFNLAMDPLLCKLEESGKGYHRGQSSITAMAFADDLVLLSDSWENMNTNISILETFCNLTGLKTQGQKCHGFYIKPTKDSYTINDCAAWTINGTPLNMIDPGESEKYLGLQFDPWIGIARSGLSTKLDFWLQRIDQAPLKPLQKTDILKTYTIPRLIYIADHSEVKSALLETLDQKIRTAVKEWLHLPPCTCDAILYSSTRDGGLGITKLAGLIPSVQARRLHRIAQSSDDTMKCFMEKEKMEQLHKKLWIQAGGDRENIPSIWEAPPSSEPPNNVSTNSEWEAPTQKDKFPKPCNWRKNEFKKWTKLASQGRGIVNFERDKISNHWIQYYRRIPHRKLLTALQLRANVYPTREFLARGRQDQYIKACRHCDADNESCAHIIGNCPVTQDARIKRHNYICELLLEEAKKKDWVVFKEPHIRDSNKELYKPDLIFVKDGRALVVDVTVRYEAAKSSLEEAAAEKVRKYKHLETEVRHLTNAKDVTFVAFPLAARGKWHQDNFKLLTELGLSKSRQVKMAETFSTVALFSSVDIVHMFASRARKSMVM

SEQ ID NO: 1149 - protein, 1665 aa, synthetic construct
MAPKKKRKVNISGSSCGSPNSADTSSDFKDLWTKLKECHDREVQGLQVKVTKLKQERILDAQRLEEFFTKNQQLREQQKVLHETIKVLEDRLRAGLCDRCAVTEEHMRKKQQEFENIRQQNLKLITELMNERNTLQEENKKLSEQLQQKIENDQQHQAAELECEEDVIPDSPITAFSFSGVNRLRRKENPHVRYIEQTHTKLEHSVCANEMRKVSKSSTHPQHNPNENEILVADTYDQSQSPMAKAHGTSSYTPDKSSFNLATVVAETLGLGVQEESETQGPMSPLGDELYHCLEGNHKKQPFESGSETPGTSESATPEGSPKRKVSSAEGAAKEEPKRRSARLSAKPPAKVEAKPKKAAAKDKSSDKKVQTKGKRGAKGKQAEVANQETKEDLPAENGETKTEESPASDEAGEKEAKSDSGSETPGTSESATPESYEQLAPQPCVGETLHSSLPRDSELFVPEEGSSEKESEDAPKTSPPTPGKHGLEQTGEEKVMVTVPDKNPPCPCCGTRVNSVLNLIEHLKVSHGKRGVCFRCAKCGKENSNYHSVVCHFKKCRGPETEKAPAGEWICEVCNRDFTTKIGLGQHKRLAHPAVRNQERIVASQPKETSNRGAHKRCWTKEEEELLIRLEAQFEGNKNINKLIAEHITTKTAKQISDKRRLLSRKPAEEPREEPGTCHHTRRAAASLRTEPEMSHHAQAEDRDNGPGRRPLPGRAAAGGRTMDEIRRHPDKGNGQQRPTKQKSEEQLQAYYKKTLEERLSAGALNTFPRAFKQVMEGRDIKLVINQTAQDCFGCLESISQIRTATRDKKDTVTREKHPKKPFQKWMKKRAIKKGNYLRFQRLFYLDRGKLAKIILDDIECLSCDIPLSEIYSVFKTRWETTGSFKSLGDFKTYGKADNTAFRELITAKEIEKNVQEMSKGSAPGPDGITLGDVVKMDPEFSRTMEIFNLWLTTGKIPDMVRGCRTVLIPKSSKPDRLKDINNWRPITIGSILLRLFSRIVTARLSKACPLNPRQRGFIRAAGCSENLKLLQTIIWSAKREHRPLGVVFVDIAKAFDTVSHQHIIHALQQREVDPHIVGLVSNMYENISTYITTKRNTHTDKIQIRVGVKQGDPMSPLLFNLAMDPLLCALEEAGKGYHRGQSSITAMAFADDLVLLSDSWENMNTNISILETFCNLTGLKTQGQKCHGFYIKPTKDSYTINDCAAWTINGTPLNMIDPGESEKYLGLQFDPWIGIARSGLSTKLDFWLQRIDQAPLKPLQKTDILKTYTIPRLIYIADHSEVKSALLETLDQKIRTAVKEWLHLPPCTCDAILYSSTRDGGLGITKLAGLIPSVQARRLHRIAQSSDDTMKCFMEKEKMEQLHKKLWIQAGGDRENIPSIWEAPPSSEPPNNVSTNSEWEAPTQKDKFPKPCNWRKNEFKKWTKLASQGRGIVNFERDKISNHWIQYYRRIPHRKLLTALQLRANVYPTREFLARGRQDQYIKACRHCDADNESCAHIIGNCPVTQDARIKRHNYICELLLEEAKKKDWVVFKEPHIRDSNKELYKPDLIFVKDGRALVVDVTVRYEAAKSSLEEAAAEKVRKYKHLETEVRHLTNAKDVTFVGFPLGARGKWHQDNFKLLTELGLSKSRQVKMAETFSTVALFSSVDIVHMFASRARKSMVM

SEQ ID NO: 1150 - protein, 1665 aa, synthetic construct
MAPKKKRKVNISGSSCGSPNSADTSSDFKDLWTKLKECHDREVQGLQVKVTKLKQERILDAQRLEEFFTKNQQLREQQKVLHETIKVLEDRLRAGLCDRCAVTEEHMRKKQQEFENIRQQNLKLITELMNERNTLQEENKKLSEQLQQKIENDQQHQAAELECEEDVIPDSPITAFSFSGVNRLRRKENPHVRYIEQTHTKLEHSVCANEMRKVSKSSTHPQHNPNENEILVADTYDQSQSPMAKAHGTSSYTPDKSSFNLATVVAETLGLGVQEESETQGPMSPLGDELYHCLEGNHKKQPFESGSETPGTSESATPEGSPKRKVSSAEGAAKEEPKRRSARLSAKPPAKVEAKPKKAAAKDKSSDKKVQTKGKRGAKGKQAEVANQETKEDLPAENGETKTEESPASDEAGEKEAKSDSGSETPGTSESATPESYEQLAPQPCVGETLHSSLPRDSELFVPEEGSSEKESEDAPKTSPPTPGKHGLEQTGEEKVMVTVPDKNPPCPCCGTRVNSVLNLIEHLKVSHGKRGVCFRCAKCGKENSNYHSVVCHFKKCRGPETEKAPAGEWICEVCNRDFTTKIGLGQHKRLAHPAVRNQERIVASQPKETSNRGAHKRCWTKEEEELLIRLEAQFEGNKNINKLIAEHITTKTAKQISDKRRLLSRKPAEEPREEPGTCHHTRRAAASLRTEPEMSHHAQAEDRDNGPGRRPLPGRAAAGGRTMDEIRRHPDKGNGQQRPTKQKSEEQLQAYYKKTLEERLSAGALNTFPRAFKQVMEGRDIKLVINQTAQDCFGCLESISQIRTATRDKKDTVTREKHPKKPFQKWMKKRAIKKGNYLRFQRLFYLDRGKLAKIILDDIECLSCDIPLSEIYSVFKTRWETTGSFKSLGDFKTYGKADNTAFRELITAKEIEKNVQEMSKGSAPGPDGITLGDVVKMDPEFSRTMEIFNLWLTTGKIPDMVRGCRTVLIPKSSKPDRLKDINNWRPITIGSILLRLFSRIVTARLSKACPLNPRQRGFIRAAGCSENLKLLQTIIWSAKREHRPLGVVFVDIAKAFDTVSHQHIIHALQQREVDPHIVGLVSNMYENISTYITTKRNTHTDKIQIRVGVKQGDPMSPLLFNLAMDPLLCKLEESGKGYHRGQSSITAMAFADDLVLLSDSWENMSVNIVILETFCNLTGLKTQGQKCHGFYIKPTKDSYTINDCAAWTINGTPLNMIDPGESEKYLGLQFDPWIGIARSGLSTKLDFWLQRIDQAPLKPLQKTDILKTYTIPRLIYIADHSEVKSALLETLDQKIRTAVKEWLHLPPCTCDAILYSSTRDGGLGITKLAGLIPSVQARRLHRIAQSSDDTMKCFMEKEKMEQLHKKLWIQAGGDRENIPSIWEAPPSSEPPNNVSTNSEWEAPTQKDKFPKPCNWRKNEFKKWTKLASQGRGIVNFERDKISNHWIQYYRRIPHRKLLTALQLRANVYPTREFLARGRQDQYIKACRHCDADNESCAHIIGNCPVTQDARIKRHNYICELLLEEAKKKDWVVFKEPHIRDSNKELYKPDLIFVKDGRALVVDVTVRYEAAKSSLEEAAAEKVRKYKHLETEVRHLTNAKDVTFVGFPLGARGKWHQDNFKLLTELGLSKSRQVKMAETFSTVALFSSVDIVHMFASRARKSMVM

SEQ ID NO: 1151 - protein, 1665 aa, synthetic construct
MAPKKKRKVNISGSSCGSPNSADTSSDFKDLWTKLKECHDREVQGLQVKVTKLKQERILDAQRLEEFFTKNQQLREQQKVLHETIKVLEDRLRAGLCDRCAVTEEHMRKKQQEFENIRQQNLKLITELMNERNTLQEENKKLSEQLQQKIENDQQHQAAELECEEDVIPDSPITAFSFSGVNRLRRKENPHVRYIEQTHTKLEHSVCANEMRKVSKSSTHPQHNPNENEILVADTYDQSQSPMAKAHGTSSYTPDKSSFNLATVVAETLGLGVQEESETQGPMSPLGDELYHCLEGNHKKQPFESGSETPGTSESATPEGSPKRKVSSAEGAAKEEPKRRSARLSAKPPAKVEAKPKKAAAKDKSSDKKVQTKGKRGAKGKQAEVANQETKEDLPAENGETKTEESPASDEAGEKEAKSDSGSETPGTSESATPESYEQLAPQPCVGETLHSSLPRDSELFVPEEGSSEKESEDAPKTSPPTPGKHGLEQTGEEKVMVTVPDKNPPCPCCGTRVNSVLNLIEHLKVSHGKRGVCFRCAKCGKENSNYHSVVCHFKKCRGPETEKAPAGEWICEVCNRDFTTKIGLGQHKRLAHPAVRNQERIVASQPKETSNRGAHKRCWTKEEEELLIRLEAQFEGNKNINKLIAEHITTKTAKQISDKRRLLSRKPAEEPREEPGTCHHTRRAAASLRTEPEMSHHAQAEDRDNGPGRRPLPGRAAAGGRTMDEIRRHPDKGNGQQRPTKQKSEEQLQAYYKKTLEERLSAGALNTFPRAFKQVMEGRDIKLVINQTAQDCFGCLESISQIRTATRDKKDTVTREKHPKKPFQKWMKKRAIKKGNYLRFQRLFYLDRGKLAKIILDDIECLSCDIPLSEIYSVFKTRWETTGSFKSLGDFKTYGKADNTAFRELITAKEIEKNVQEMSKGSAPGPDGITLGDVVKMDPEFSRTMEIFNLWLTTGKIPDMVRGCRTVLIPKSSKPDRLKDINNWRPITIGSILLRLFSRIVTARLSKACPLNPRQRGFIRAAGCSENLKLLQTIIWSAKREHRPLGVVFVDIAKAFDTVSHQHIIHALQQREVDPHIVGLVSNMYENISTYITTKRNTHTDKIQIRVGVKQGDPMSPLLFNLAMDPLLCKLEESGKGYHRGQSSITAMAFADDLVLLSDSWENMAANIAILETFCNLTGLKTQGQKCHGFYIKPTKDSYTINDCAAWTINGTPLNMIDPGESEKYLGLQFDPWIGIARSGLSTKLDFWLQRIDQAPLKPLQKTDILKTYTIPRLIYIADHSEVKSALLETLDQKIRTAVKEWLHLPPCTCDAILYSSTRDGGLGITKLAGLIPSVQARRLHRIAQSSDDTMKCFMEKEKMEQLHKKLWIQAGGDRENIPSIWEAPPSSEPPNNVSTNSEWEAPTQKDKFPKPCNWRKNEFKKWTKLASQGRGIVNFERDKISNHWIQYYRRIPHRKLLTALQLRANVYPTREFLARGRQDQYIKACRHCDADNESCAHIIGNCPVTQDARIKRHNYICELLLEEAKKKDWVVFKEPHIRDSNKELYKPDLIFVKDGRALVVDVTVRYEAAKSSLEEAAAEKVRKYKHLETEVRHLTNAKDVTFVGFPLGARGKWHQDNFKLLTELGLSKSRQVKMAETFSTVALFSSVDIVHMFASRARKSMVM

SEQ ID NO: 1152 - protein, 1665 aa, synthetic construct
MAPKKKRKVNISGSSCGSPNSADTSSDFKDLWTKLKECHDREVQGLQVKVTKLKQERILDAQRLEEFFTKNQQLREQQKVLHETIKVLEDRLRAGLCDRCAVTEEHMRKKQQEFENIRQQNLKLITELMNERNTLQEENKKLSEQLQQKIENDQQHQAAELECEEDVIPDSPITAFSFSGVNRLRRKENPHVRYIEQTHTKLEHSVCANEMRKVSKSSTHPQHNPNENEILVADTYDQSQSPMAKAHGTSSYTPDKSSFNLATVVAETLGLGVQEESETQGPMSPLGDELYHCLEGNHKKQPFESGSETPGTSESATPEGSPKRKVSSAEGAAKEEPKRRSARLSAKPPAKVEAKPKKAAAKDKSSDKKVQTKGKRGAKGKQAEVANQETKEDLPAENGETKTEESPASDEAGEKEAKSDSGSETPGTSESATPESYEQLAPQPCVGETLHSSLPRDSELFVPEEGSSEKESEDAPKTSPPTPGKHGLEQTGEEKVMVTVPDKNPPCPCCGTRVNSVLNLIEHLKVSHGKRGVCFRCAKCGKENSNYHSVVCHFKKCRGPETEKAPAGEWICEVCNRDFTTKIGLGQHKRLAHPAVRNQERIVASQPKETSNRGAHKRCWTKEEEELLIRLEAQFEGNKNINKLIAEHITTKTAKQISDKRRLLSRKPAEEPREEPGTCHHTRRAAASLRTEPEMSHHAQAEDRDNGPGRRPLPGRAAAGGRTMDEIRRHPDKGNGQQRPTKQKSEEQLQAYYKKTLEERLSAGALNTFPRAFKQVMEGRDIKLVINQTAQDCFGCLESISQIRTATRDKKDTVTREKHPKKPFQKWMKKRAIKKGNYLRFQRLFYLDRGKLAKIILDDIECLSCDIPLSEIYSVFKTRWETTGSFKSLGDFKTYGKADNTAFRELITAKEIEKNVQEMSKGSAPGPDGITLGDVVKMDPEFSRTMEIFNLWLTTGKIPDMVRGCRTVLIPKSSKPDRLKDINNWRPITIGSILLRLFSRIVTARLSKACPLNPRQRGFIRAAGCSENLKLLQTIIWSAKREHRPLGVVFVDIAKAFDTVSHQHIIHALQQREVDPHIVGLVSNMYENISTYITTKRNTHTDKIQIRVGVKQGDPMSPLLFNLAMDPLLCKLEESGKGYHRGQSSITAMAFADDLVLLSDSWENMNTNISILSVFCSLTGLKTQGQKCHGFYIKPTKDSYTINDCAAWTINGTPLNMIDPGESEKYLGLQFDPWIGIARSGLSTKLDFWLQRIDQAPLKPLQKTDILKTYTIPRLIYIADHSEVKSALLETLDQKIRTAVKEWLHLPPCTCDAILYSSTRDGGLGITKLAGLIPSVQARRLHRIAQSSDDTMKCFMEKEKMEQLHKKLWIQAGGDRENIPSIWEAPPSSEPPNNVSTNSEWEAPTQKDKFPKPCNWRKNEFKKWTKLASQGRGIVNFERDKISNHWIQYYRRIPHRKLLTALQLRANVYPTREFLARGRQDQYIKACRHCDADNESCAHIIGNCPVTQDARIKRHNYICELLLEEAKKKDWVVFKEPHIRDSNKELYKPDLIFVKDGRALVVDVTVRYEAAKSSLEEAAAEKVRKYKHLETEVRHLTNAKDVTFVGFPLGARGKWHQDNFKLLTELGLSKSRQVKMAETFSTVALFSSVDIVHMFASRARKSMVM

SEQ ID NO: 1153 - protein, 1665 aa, synthetic construct
MAPKKKRKVNISGSSCGSPNSADTSSDFKDLWTKLKECHDREVQGLQVKVTKLKQERILDAQRLEEFFTKNQQLREQQKVLHETIKVLEDRLRAGLCDRCAVTEEHMRKKQQEFENIRQQNLKLITELMNERNTLQEENKKLSEQLQQKIENDQQHQAAELECEEDVIPDSPITAFSFSGVNRLRRKENPHVRYIEQTHTKLEHSVCANEMRKVSKSSTHPQHNPNENEILVADTYDQSQSPMAKAHGTSSYTPDKSSFNLATVVAETLGLGVQEESETQGPMSPLGDELYHCLEGNHKKQPFESGSETPGTSESATPEGSPKRKVSSAEGAAKEEPKRRSARLSAKPPAKVEAKPKKAAAKDKSSDKKVQTKGKRGAKGKQAEVANQETKEDLPAENGETKTEESPASDEAGEKEAKSDSGSETPGTSESATPESYEQLAPQPCVGETLHSSLPRDSELFVPEEGSSEKESEDAPKTSPPTPGKHGLEQTGEEKVMVTVPDKNPPCPCCGTRVNSVLNLIEHLKVSHGKRGVCFRCAKCGKENSNYHSVVCHFKKCRGPETEKAPAGEWICEVCNRDFTTKIGLGQHKRLAHPAVRNQERIVASQPKETSNRGAHKRCWTKEEEELLIRLEAQFEGNKNINKLIAEHITTKTAKQISDKRRLLSRKPAEEPREEPGTCHHTRRAAASLRTEPEMSHHAQAEDRDNGPGRRPLPGRAAAGGRTMDEIRRHPDKGNGQQRPTKQKSEEQLQAYYKKTLEERLSAGALNTFPRAFKQVMEGRDIKLVINQTAQDCFGCLESISQIRTATRDKKDTVTREKHPKKPFQKWMKKRAIKKGNYLRFQRLFYLDRGKLAKIILDDIECLSCDIPLSEIYSVFKTRWETTGSFKSLGDFKTYGKADNTAFRELITAKEIEKNVQEMSKGSAPGPDGITLGDVVKMDPEFSRTMEIFNLWLTTGKIPDMVRGCRTVLIPKSSKPDRLKDINNWRPITIGSILLRLFSRIVTARLSKACPLNPRQRGFIRAAGCSENLKLLQTIIWSAKREHRPLGVVFVDIAKAFDTVSHQHIIHALQQREVDPHIVGLVSNMYENISTYITTKRNTHTDKIQIRVGVKQGDPMSPLLFNLAMDPLLCKLEESGKGYHRGQSSITAMAFADDLVLLSDSWENMNTNISILAAFCALTGLKTQGQKCHGFYIKPTKDSYTINDCAAWTINGTPLNMIDPGESEKYLGLQFDPWIGIARSGLSTKLDFWLQRIDQAPLKPLQKTDILKTYTIPRLIYIADHSEVKSALLETLDQKIRTAVKEWLHLPPCTCDAILYSSTRDGGLGITKLAGLIPSVQARRLHRIAQSSDDTMKCFMEKEKMEQLHKKLWIQAGGDRENIPSIWEAPPSSEPPNNVSTNSEWEAPTQKDKFPKPCNWRKNEFKKWTKLASQGRGIVNFERDKISNHWIQYYRRIPHRKLLTALQLRANVYPTREFLARGRQDQYIKACRHCDADNESCAHIIGNCPVTQDARIKRHNYICELLLEEAKKKDWVVFKEPHIRDSNKELYKPDLIFVKDGRALVVDVTVRYEAAKSSLEEAAAEKVRKYKHLETEVRHLTNAKDVTFVGFPLGARGKWHQDNFKLLTELGLSKSRQVKMAETFSTVALFSSVDIVHMFASRARKSMVM

SEQ ID NO: 1154 - protein, 1665 aa, synthetic construct
MAPKKKRKVNISGSSCGSPNSADTSSDFKDLWTKLKECHDREVQGLQVKVTKLKQERILDAQRLEEFFTKNQQLREQQKVLHETIKVLEDRLRAGLCDRCAVTEEHMRKKQQEFENIRQQNLKLITELMNERNTLQEENKKLSEQLQQKIENDQQHQAAELECEEDVIPDSPITAFSFSGVNRLRRKENPHVRYIEQTHTKLEHSVCANEMRKVSKSSTHPQHNPNENEILVADTYDQSQSPMAKAHGTSSYTPDKSSFNLATVVAETLGLGVQEESETQGPMSPLGDELYHCLEGNHKKQPFESGSETPGTSESATPEGSPKRKVSSAEGAAKEEPKRRSARLSAKPPAKVEAKPKKAAAKDKSSDKKVQTKGKRGAKGKQAEVANQETKEDLPAENGETKTEESPASDEAGEKEAKSDSGSETPGTSESATPESYEQLAPQPCVGETLHSSLPRDSELFVPEEGSSEKESEDAPKTSPPTPGKHGLEQTGEEKVMVTVPDKNPPCPCCGTRVNSVLNLIEHLKVSHGKRGVCFRCAKCGKENSNYHSVVCHFKKCRGPETEKAPAGEWICEVCNRDFTTKIGLGQHKRLAHPAVRNQERIVASQPKETSNRGAHKRCWTKEEEELLIRLEAQFEGNKNINKLIAEHITTKTAKQISDKRRLLSRKPAEEPREEPGTCHHTRRAAASLRTEPEMSHHAQAEDRDNGPGRRPLPGRAAAGGRTMDEIRRHPDKGNGQQRPTKQKSEEQLQAYYKKTLEERLSAGALNTFPRAFKQVMEGRDIKLVINQTAQDCFGCLESISQIRTATRDKKDTVTREKHPKKPFQKWMKKRAIKKGNYLRFQRLFYLDRGKLAKIILDDIECLSCDIPLSEIYSVFKTRWETTGSFKSLGDFKTYGKADNTAFRELITAKEIEKNVQEMSKGSAPGPDGITLGDVVKMDPEFSRTMEIFNLWLTTGKIPDMVRGCRTVLIPKSSKPDRLKDINNWRPITIGSILLRLFSRIVTARLSKACPLNPRQRGFIRAAGCSENLKLLQTIIWSAKREHRPLGVVFVDIAKAFDTVSHQHIIHALQQREVDPHIVGLVSNMYENISTYITTKRNTHTDKIQIRVGVKQGDPMSPLLFNLAMDPLLCKLEESGKGYHRGQSSITAMAFADDLVLLSDSWENMNTNISILETFCNLTGLKTQGQKCHGFYIKPTKDSYTINDCAAWVINPTPLNMIDPGESEKYLGLQFDPWIGIARSGLSTKLDFWLQRIDQAPLKPLQKTDILKTYTIPRLIYIADHSEVKSALLETLDQKIRTAVKEWLHLPPCTCDAILYSSTRDGGLGITKLAGLIPSVQARRLHRIAQSSDDTMKCFMEKEKMEQLHKKLWIQAGGDRENIPSIWEAPPSSEPPNNVSTNSEWEAPTQKDKFPKPCNWRKNEFKKWTKLASQGRGIVNFERDKISNHWIQYYRRIPHRKLLTALQLRANVYPTREFLARGRQDQYIKACRHCDADNESCAHIIGNCPVTQDARIKRHNYICELLLEEAKKKDWVVFKEPHIRDSNKELYKPDLIFVKDGRALVVDVTVRYEAAKSSLEEAAAEKVRKYKHLETEVRHLTNAKDVTFVGFPLGARGKWHQDNFKLLTELGLSKSRQVKMAETFSTVALFSSVDIVHMFASRARKSMVM

SEQ ID NO: 1155 - protein, 1665 aa, synthetic construct
MAPKKKRKVNISGSSCGSPNSADTSSDFKDLWTKLKECHDREVQGLQVKVTKLKQERILDAQRLEEFFTKNQQLREQQKVLHETIKVLEDRLRAGLCDRCAVTEEHMRKKQQEFENIRQQNLKLITELMNERNTLQEENKKLSEQLQQKIENDQQHQAAELECEEDVIPDSPITAFSFSGVNRLRRKENPHVRYIEQTHTKLEHSVCANEMRKVSKSSTHPQHNPNENEILVADTYDQSQSPMAKAHGTSSYTPDKSSFNLATVVAETLGLGVQEESETQGPMSPLGDELYHCLEGNHKKQPFESGSETPGTSESATPEGSPKRKVSSAEGAAKEEPKRRSARLSAKPPAKVEAKPKKAAAKDKSSDKKVQTKGKRGAKGKQAEVANQETKEDLPAENGETKTEESPASDEAGEKEAKSDSGSETPGTSESATPESYEQLAPQPCVGETLHSSLPRDSELFVPEEGSSEKESEDAPKTSPPTPGKHGLEQTGEEKVMVTVPDKNPPCPCCGTRVNSVLNLIEHLKVSHGKRGVCFRCAKCGKENSNYHSVVCHFKKCRGPETEKAPAGEWICEVCNRDFTTKIGLGQHKRLAHPAVRNQERIVASQPKETSNRGAHKRCWTKEEEELLIRLEAQFEGNKNINKLIAEHITTKTAKQISDKRRLLSRKPAEEPREEPGTCHHTRRAAASLRTEPEMSHHAQAEDRDNGPGRRPLPGRAAAGGRTMDEIRRHPDKGNGQQRPTKQKSEEQLQAYYKKTLEERLSAGALNTFPRAFKQVMEGRDIKLVINQTAQDCFGCLESISQIRTATRDKKDTVTREKHPKKPFQKWMKKRAIKKGNYLRFQRLFYLDRGKLAKIILDDIECLSCDIPLSEIYSVFKTRWETTGSFKSLGDFKTYGKADNTAFRELITAKEIEKNVQEMSKGSAPGPDGITLGDVVKMDPEFSRTMEIFNLWLTTGKIPDMVRGCRTVLIPKSSKPDRLKDINNWRPITIGSILLRLFSRIVTARLSKACPLNPRQRGFIRAAGCSENLKLLQTIIWSAKREHRPLGVVFVDIAKAFDTVSHQHIIHALQQREVDPHIVGLVSNMYENISTYITTKRNTHTDKIQIRVGVKQGDPMSPLLFNLAMDPLLCKLEESGKGYHRGQSSITAMAFADDLVLLSDSWENMNTNISILETFCNLTGLKTQGQKCHGFYIKPTKDSYTINDCAAWAINATPLNMIDPGESEKYLGLQFDPWIGIARSGLSTKLDFWLQRIDQAPLKPLQKTDILKTYTIPRLIYIADHSEVKSALLETLDQKIRTAVKEWLHLPPCTCDAILYSSTRDGGLGITKLAGLIPSVQARRLHRIAQSSDDTMKCFMEKEKMEQLHKKLWIQAGGDRENIPSIWEAPPSSEPPNNVSTNSEWEAPTQKDKFPKPCNWRKNEFKKWTKLASQGRGIVNFERDKISNHWIQYYRRIPHRKLLTALQLRANVYPTREFLARGRQDQYIKACRHCDADNESCAHIIGNCPVTQDARIKRHNYICELLLEEAKKKDWVVFKEPHIRDSNKELYKPDLIFVKDGRALVVDVTVRYEAAKSSLEEAAAEKVRKYKHLETEVRHLTNAKDVTFVGFPLGARGKWHQDNFKLLTELGLSKSRQVKMAETFSTVALFSSVDIVHMFASRARKSMVM

SEQ ID NO: 1156 - protein, 1665 aa, synthetic construct
MAPKKKRKVNISGSSCGSPNSADTSSDFKDLWTKLKECHDREVQGLQVKVTKLKQERILDAQRLEEFFTKNQQLREQQKVLHETIKVLEDRLRAGLCDRCAVTEEHMRKKQQEFENIRQQNLKLITELMNERNTLQEENKKLSEQLQQKIENDQQHQAAELECEEDVIPDSPITAFSFSGVNRLRRKENPHVRYIEQTHTKLEHSVCANEMRKVSKSSTHPQHNPNENEILVADTYDQSQSPMAKAHGTSSYTPDKSSFNLATVVAETLGLGVQEESETQGPMSPLGDELYHCLEGNHKKQPFESGSETPGTSESATPEGSPKRKVSSAEGAAKEEPKRRSARLSAKPPAKVEAKPKKAAAKDKSSDKKVQTKGKRGAKGKQAEVANQETKEDLPAENGETKTEESPASDEAGEKEAKSDSGSETPGTSESATPESYEQLAPQPCVGETLHSSLPRDSELFVPEEGSSEKESEDAPKTSPPTPGKHGLEQTGEEKVMVTVPDKNPPCPCCGTRVNSVLNLIEHLKVSHGKRGVCFRCAKCGKENSNYHSVVCHFKKCRGPETEKAPAGEWICEVCNRDFTTKIGLGQHKRLAHPAVRNQERIVASQPKETSNRGAHKRCWTKEEEELLIRLEAQFEGNKNINKLIAEHITTKTAKQISDKRRLLSRKPAEEPREEPGTCHHTRRAAASLRTEPEMSHHAQAEDRDNGPGRRPLPGRAAAGGRTMDEIRRHPDKGNGQQRPTKQKSEEQLQAYYKKTLEERLSAGALNTFPRAFKQVMEGRDIKLVINQTAQDCFGCLESISQIRTATRDKKDTVTREKHPKKPFQKWMKKRAIKKGNYLRFQRLFYLDRGKLAKIILDDIECLSCDIPLSEIYSVFKTRWETTGSFKSLGDFKTYGKADNTAFRELITAKEIEKNVQEMSKGSAPGPDGITLGDVVKMDPEFSRTMEIFNLWLTTGKIPDMVRGCRTVLIPKSSKPDRLKDINNWRPITIGSILLRLFSRIVTARLSKACPLNPRQRGFIRAAGCSENLKLLQTIIWSAKREHRPLGVVFVDIAKAFDTVSHQHIIHALQQREVDPHIVGLVSNMYENISTYITTKRNTHTDKIQIRVGVKQGDPMSPLLFNLAMDPLLCKLEESGKGYHRGQSSITAMAFADDLVLLSDSWENMNTNISILETFCNLTGLKTQGQKCHGFYIKPTKDSYTINDCAAWTINGTPLNMIDPGESEKYLGLQFDPWIGIARSGLSTKLDFWLQRIDQAPLKPLQKTDILKTYTIPRLIYIADHSEVKSALLETLDQKIRTAVKEWLHLPPCTCDAILYSSTRDGGLGITKLAGLIPSVQARRLHRIAQSSDDTMKCFMEKEKMEQLHKKLWIQAGGDRENIPSIWEAPPSSEPPNNVSTNSEWEAPTQKDKFPKPCNWRKNEFKKWTKLASQGRGIVNFERDKISNHWIQYYRRIPHRKLLTALQLRANVYPTREFLARGRQDQYIKACRHCDADNESCAHIIGNCPVTQDARIKRHNYICELLLEEADKKKGVVFKEPHIRDSNKELYKPDLIFVKDGRALVVDVTVRYEAAKSSLEEAAAEKVRKYKHLETEVRHLTNAKDVTFVGFPLGARGKWHQDNFKLLTELGLSKSRQVKMAETFSTVALFSSVDIVHMFASRARKSMVM

SEQ ID NO: 1157 - protein, 1665 aa, synthetic construct
MAPKKKRKVNISGSSCGSPNSADTSSDFKDLWTKLKECHDREVQGLQVKVTKLKQERILDAQRLEEFFTKNQQLREQQKVLHETIKVLEDRLRAGLCDRCAVTEEHMRKKQQEFENIRQQNLKLITELMNERNTLQEENKKLSEQLQQKIENDQQHQAAELECEEDVIPDSPITAFSFSGVNRLRRKENPHVRYIEQTHTKLEHSVCANEMRKVSKSSTHPQHNPNENEILVADTYDQSQSPMAKAHGTSSYTPDKSSFNLATVVAETLGLGVQEESETQGPMSPLGDELYHCLEGNHKKQPFESGSETPGTSESATPEGSPKRKVSSAEGAAKEEPKRRSARLSAKPPAKVEAKPKKAAAKDKSSDKKVQTKGKRGAKGKQAEVANQETKEDLPAENGETKTEESPASDEAGEKEAKSDSGSETPGTSESATPESYEQLAPQPCVGETLHSSLPRDSELFVPEEGSSEKESEDAPKTSPPTPGKHGLEQTGEEKVMVTVPDKNPPCPCCGTRVNSVLNLIEHLKVSHGKRGVCFRCAKCGKENSNYHSVVCHFKKCRGPETEKAPAGEWICEVCNRDFTTKIGLGQHKRLAHPAVRNQERIVASQPKETSNRGAHKRCWTKEEEELLIRLEAQFEGNKNINKLIAEHITTKTAKQISDKRRLLSRKPAEEPREEPGTCHHTRRAAASLRTEPEMSHHAQAEDRDNGPGRRPLPGRAAAGGRTMDEIRRHPDKGNGQQRPTKQKSEEQLQAYYKKTLEERLSAGALNTFPRAFKQVMEGRDIKLVINQTAQDCFGCLESISQIRTATRDKKDTVTREKHPKKPFQKWMKKRAIKKGNYLRFQRLFYLDRGKLAKIILDDIECLSCDIPLSEIYSVFKTRWETTGSFKSLGDFKTYGKADNTAFRELITAKEIEKNVQEMSKGSAPGPDGITLGDVVKMDPEFSRTMEIFNLWLTTGKIPDMVRGCRTVLIPKSSKPDRLKDINNWRPITIGSILLRLFSRIVTARLSKACPLNPRQRGFIRAAGCSENLKLLQTIIWSAKREHRPLGVVFVDIAKAFDTVSHQHIIHALQQREVDPHIVGLVSNMYENISTYITTKRNTHTDKIQIRVGVKQGDPMSPLLFNLAMDPLLCKLEESGKGYHRGQSSITAMAFADDLVLLSDSWENMNTNISILETFCNLTGLKTQGQKCHGFYIKPTKDSYTINDCAAWTINGTPLNMIDPGESEKYLGLQFDPWIGIARSGLSTKLDFWLQRIDQAPLKPLQKTDILKTYTIPRLIYIADHSEVKSALLETLDQKIRTAVKEWLHLPPCTCDAILYSSTRDGGLGITKLAGLIPSVQARRLHRIAQSSDDTMKCFMEKEKMEQLHKKLWIQAGGDRENIPSIWEAPPSSEPPNNVSTNSEWEAPTQKDKFPKPCNWRKNEFKKWTKLASQGRGIVNFERDKISNHWIQYYRRIPHRKLLTALQLRANVYPTREFLARGRQDQYIKACRHCDADNESCAHIIGNCPVTQDARIKRHNYICELLLEEAAKKAAVVFKEPHIRDSNKELYKPDLIFVKDGRALVVDVTVRYEAAKSSLEEAAAEKVRKYKHLETEVRHLTNAKDVTFVGFPLGARGKWHQDNFKLLTELGLSKSRQVKMAETFSTVALFSSVDIVHMFASRARKSMVM

SEQ ID NO: 1158 - protein, 1665 aa, synthetic construct
MAPKKKRKVNISGSSCGSPNSADTSSDFKDLWTKLKECHDREVQGLQVKVTKLKQERILDAQRLEEFFTKNQQLREQQKVLHETIKVLEDRLRAGLCDRCAVTEEHMRKKQQEFENIRQQNLKLITELMNERNTLQEENKKLSEQLQQKIENDQQHQAAELECEEDVIPDSPITAFSFSGVNRLRRKENPHVRYIEQTHTKLEHSVCANEMRKVSKSSTHPQHNPNENEILVADTYDQSQSPMAKAHGTSSYTPDKSSFNLATVVAETLGLGVQEESETQGPMSPLGDELYHCLEGNHKKQPFESGSETPGTSESATPEGSPKRKVSSAEGAAKEEPKRRSARLSAKPPAKVEAKPKKAAAKDKSSDKKVQTKGKRGAKGKQAEVANQETKEDLPAENGETKTEESPASDEAGEKEAKSDSGSETPGTSESATPESYEQLAPQPCVGETLHSSLPRDSELFVPEEGSSEKESEDAPKTSPPTPGKHGLEQTGEEKVMVTVPDKNPPCPCCGTRVNSVLNLIEHLKVSHGKRGVCFRCAKCGKENSNYHSVVCHFKKCRGPETEKAPAGEWICEVCNRDFTTKIGLGQHKRLAHPAVRNQERIVASQPKETSNRGAHKRCWTKEEEELLIRLEAQFEGNKNINKLIAEHITTKTAKQISDKRRLLSRKPAEEPREEPGTCHHTRRAAASLRTEPEMSHHAQAEDRDNGPGRRPLPGRAAAGGRTMDEIRRHPDKGNGQQRPTKQKSEEQLQAYYKKTLEERLSAGALNTFPRAFKQVMEGRDIKLVINQTAQDCFGCLESISQIRTATRDKKDTVTREKHPKKPFQKWMKKRAIKKGNYLRFQRLFYLDRGKLAKIILDDIECLSCDIPLSEIYSVFKTRWETTGSFDSLGKFKTYGKADNTAFRELITAKEIEKNVQEMSKGSAPGPDGITLGDVVKMDPEFSRTMEIFNLWLTTGKIPDMVRGCRTVLIPKSSKPDRLKDINNWRPITIGSILLRLFSRIVTARLSKACPLNPRQRGFIRAAGCSENLKLLQTIIWSAKREHRPLGVVFVDIAKAFDTVSHQHIIHALQQREVDPHIVGLVSNMYENISTYITTKRNTHTDKIQIRVGVKQGDPMSPLLFNLAMDPLLCKLEESGKGYHRGQSSITAMAFADDLVLLSDSWENMNTNISILETFCNLTGLKTQGQKCHGFYIKPTKDSYTINDCAAWTINGTPLNMIDPGESEKYLGLQFDPWIGIARSGLSTKLDFWLQRIDQAPLKPLQKTDILKTYTIPRLIYIADHSEVKSALLETLDQKIRTAVKEWLHLPPCTCDAILYSSTRDGGLGITKLAGLIPSVQARRLHRIAQSSDDTMKCFMEKEKMEQLHKKLWIQAGGDRENIPSIWEAPPSSEPPNNVSTNSEWEAPTQKDKFPKPCNWRKNEFKKWTKLASQGRGIVNFERDKISNHWIQYYRRIPHRKLLTALQLRANVYPTREFLARGRQDQYIKACRHCDADNESCAHIIGNCPVTQDARIKRHNYICELLLEEAKKKDWVVFKEPHIRDSNKELYKPDLIFVKDGRALVVDVTVRYEAAKSSLEEAAAEKVRKYKHLETEVRHLTNAKDVTFVGFPLGARGKWHQDNFKLLTELGLSKSRQVKMAETFSTVALFSSVDIVHMFASRARKSMVM

SEQ ID NO: 1159 - protein, 1665 aa, synthetic construct
MAPKKKRKVNISGSSCGSPNSADTSSDFKDLWTKLKECHDREVQGLQVKVTKLKQERILDAQRLEEFFTKNQQLREQQKVLHETIKVLEDRLRAGLCDRCAVTEEHMRKKQQEFENIRQQNLKLITELMNERNTLQEENKKLSEQLQQKIENDQQHQAAELECEEDVIPDSPITAFSFSGVNRLRRKENPHVRYIEQTHTKLEHSVCANEMRKVSKSSTHPQHNPNENEILVADTYDQSQSPMAKAHGTSSYTPDKSSFNLATVVAETLGLGVQEESETQGPMSPLGDELYHCLEGNHKKQPFESGSETPGTSESATPEGSPKRKVSSAEGAAKEEPKRRSARLSAKPPAKVEAKPKKAAAKDKSSDKKVQTKGKRGAKGKQAEVANQETKEDLPAENGETKTEESPASDEAGEKEAKSDSGSETPGTSESATPESYEQLAPQPCVGETLHSSLPRDSELFVPEEGSSEKESEDAPKTSPPTPGKHGLEQTGEEKVMVTVPDKNPPCPCCGTRVNSVLNLIEHLKVSHGKRGVCFRCAKCGKENSNYHSVVCHFKKCRGPETEKAPAGEWICEVCNRDFTTKIGLGQHKRLAHPAVRNQERIVASQPKETSNRGAHKRCWTKEEEELLIRLEAQFEGNKNINKLIAEHITTKTAKQISDKRRLLSRKPAEEPREEPGTCHHTRRAAASLRTEPEMSHHAQAEDRDNGPGRRPLPGRAAAGGRTMDEIRRHPDKGNGQQRPTKQKSEEQLQAYYKKTLEERLSAGALNTFPRAFKQVMEGRDIKLVINQTAQDCFGCLESISQIRTATRDKKDTVTREKHPKKPFQKWMKKRAIKKGNYLRFQRLFYLDRGKLAKIILDDIECLSCDIPLSEIYSVFKTRWETTGSFASLGAFKTYGKADNTAFRELITAKEIEKNVQEMSKGSAPGPDGITLGDVVKMDPEFSRTMEIFNLWLTTGKIPDMVRGCRTVLIPKSSKPDRLKDINNWRPITIGSILLRLFSRIVTARLSKACPLNPRQRGFIRAAGCSENLKLLQTIIWSAKREHRPLGVVFVDIAKAFDTVSHQHIIHALQQREVDPHIVGLVSNMYENISTYITTKRNTHTDKIQIRVGVKQGDPMSPLLFNLAMDPLLCKLEESGKGYHRGQSSITAMAFADDLVLLSDSWENMNTNISILETFCNLTGLKTQGQKCHGFYIKPTKDSYTINDCAAWTINGTPLNMIDPGESEKYLGLQFDPWIGIARSGLSTKLDFWLQRIDQAPLKPLQKTDILKTYTIPRLIYIADHSEVKSALLETLDQKIRTAVKEWLHLPPCTCDAILYSSTRDGGLGITKLAGLIPSVQARRLHRIAQSSDDTMKCFMEKEKMEQLHKKLWIQAGGDRENIPSIWEAPPSSEPPNNVSTNSEWEAPTQKDKFPKPCNWRKNEFKKWTKLASQGRGIVNFERDKISNHWIQYYRRIPHRKLLTALQLRANVYPTREFLARGRQDQYIKACRHCDADNESCAHIIGNCPVTQDARIKRHNYICELLLEEAKKKDWVVFKEPHIRDSNKELYKPDLIFVKDGRALVVDVTVRYEAAKSSLEEAAAEKVRKYKHLETEVRHLTNAKDVTFVGFPLGARGKWHQDNFKLLTELGLSKSRQVKMAETFSTVALFSSVDIVHMFASRARKSMVM

SEQ ID NO: 1160 - protein, 1665 aa, synthetic construct
MAPKKKRKVNISGSSCGSPNSADTSSDFKDLWTKLKECHDREVQGLQVKVTKLKQERILDAQRLEEFFTKNQQLREQQKVLHETIKVLEDRLRAGLCDRCAVTEEHMRKKQQEFENIRQQNLKLITELMNERNTLQEENKKLSEQLQQKIENDQQHQAAELECEEDVIPDSPITAFSFSGVNRLRRKENPHVRYIEQTHTKLEHSVCANEMRKVSKSSTHPQHNPNENEILVADTYDQSQSPMAKAHGTSSYTPDKSSFNLATVVAETLGLGVQEESETQGPMSPLGDELYHCLEGNHKKQPFESGSETPGTSESATPEGSPKRKVSSAEGAAKEEPKRRSARLSAKPPAKVEAKPKKAAAKDKSSDKKVQTKGKRGAKGKQAEVANQETKEDLPAENGETKTEESPASDEAGEKEAKSDSGSETPGTSESATPESYEQLAPQPCVGETLHSSLPRDSELFVPEEGSSEKESEDAPKTSPPTPGKHGLEQTGEEKVMVTVPDKNPPCPCCGTRVNSVLNLIEHLKVSHGKRGVCFRCAKCGKENSNYHSVVCHFKKCRGPETEKAPAGEWICEVCNRDFTTKIGLGQHKRLAHPAVRNQERIVASQPKETSNRGAHKRCWTKEEEELLIRLEAQFEGNKNINKLIAEHITTKTAKQISDKRRLLSRKPAEEPREEPGTCHHTRRAAASLRTEPEMSHHAQAEDRDNGPGRRPLPGRAAAGGRTMDEIRRHPDKGNGQQRPTKQKSEEQLQAYYKKTLEERLSAGALNTFPRAFKQVMEGRDIKLVINQTAQDCFGCLESISQIRTATRDKKDTVTREKHPKKPFQKWMKKRAIKKGNYLRFQRLFYLDRGKLAKIILDDIECLSCDIPLSEIYSVFKTRWETTGSFKSLGDFKTYGKADNTAFRELITAKEIEKNVQEMSKGSAPGPDGITLGDVVKMDPEFSRTMEIFNLWLTTGKIPDMVRGCRTVLIPKSSKPDRLKDINNWRPITIGSILLRLFSRIVTARLSKACPLNPRQRGFIRAAGCSENLKLLQTIIWSAKREHRPLGVVFVDIAKAFDTVSHQHIIHALQQREVDPHIVGLVSNMYENISTYITTKRNTHTDKIQIRVGVKQGDPMSPLLFNLAMDPLLCDLEEKGKGYHRGQSSITAMAFADDLVLLSDSWENMNTNISILETFCNLTGLKTQGQKCHGFYIKPTKDSYTINDCAAWTINGTPLNMIDPGESEKYLGLQFDPWIGIARSGLSTKLDFWLQRIDQAPLKPLQKTDILKTYTIPRLIYIADHSEVKSALLETLDQKIRTAVKEWLHLPPCTCDAILYSSTRDGGLGITKLAGLIPSVQARRLHRIAQSSDDTMKCFMEKEKMEQLHKKLWIQAGGDRENIPSIWEAPPSSEPPNNVSTNSEWEAPTQKDKFPKPCNWRKNEFKKWTKLASQGRGIVNFERDKISNHWIQYYRRIPHRKLLTALQLRANVYPTREFLARGRQDQYIKACRHCDADNESCAHIIGNCPVTQDARIKRHNYICELLLEEAKKKDWVVFKEPHIRDSNKELYKPDLIFVKDGRALVVDVTVRYEAAKSSLEEAAAEKVRKYKHLETEVRHLTNAKDVTFVGFPLGARGKWHQDNFKLLTELGLSKSRQVKMAETFSTVALFSSVDIVHMFASRARKSMVM

SEQ ID NO: 1161 - protein, 1665 aa, synthetic construct
MAPKKKRKVNISGSSCGSPNSADTSSDFKDLWTKLKECHDREVQGLQVKVTKLKQERILDAQRLEEFFTKNQQLREQQKVLHETIKVLEDRLRAGLCDRCAVTEEHMRKKQQEFENIRQQNLKLITELMNERNTLQEENKKLSEQLQQKIENDQQHQAAELECEEDVIPDSPITAFSFSGVNRLRRKENPHVRYIEQTHTKLEHSVCANEMRKVSKSSTHPQHNPNENEILVADTYDQSQSPMAKAHGTSSYTPDKSSFNLATVVAETLGLGVQEESETQGPMSPLGDELYHCLEGNHKKQPFESGSETPGTSESATPEGSPKRKVSSAEGAAKEEPKRRSARLSAKPPAKVEAKPKKAAAKDKSSDKKVQTKGKRGAKGKQAEVANQETKEDLPAENGETKTEESPASDEAGEKEAKSDSGSETPGTSESATPESYEQLAPQPCVGETLHSSLPRDSELFVPEEGSSEKESEDAPKTSPPTPGKHGLEQTGEEKVMVTVPDKNPPCPCCGTRVNSVLNLIEHLKVSHGKRGVCFRCAKCGKENSNYHSVVCHFKKCRGPETEKAPAGEWICEVCNRDFTTKIGLGQHKRLAHPAVRNQERIVASQPKETSNRGAHKRCWTKEEEELLIRLEAQFEGNKNINKLIAEHITTKTAKQISDKRRLLSRKPAEEPREEPGTCHHTRRAAASLRTEPEMSHHAQAEDRDNGPGRRPLPGRAAAGGRTMDEIRRHPDKGNGQQRPTKQKSEEQLQAYYKKTLEERLSAGALNTFPRAFKQVMEGRDIKLVINQTAQDCFGCLESISQIRTATRDKKDTVTREKHPKKPFQKWMKKRAIKKGNYLRFQRLFYLDRGKLAKIILDDIECLSCDIGLVSIYVVFKTRWETTGSFKSLGDFKTYGKADNTAFRELITAKEIEKNVQEMSKGSAPGPDGITLGDVVKMDPEFSRTMEIFNLWLTTGKIPDMVRGCRTVLIPKSSKPDRLKDINNWRPITIGSILLRLFSRIVTARLSKACPLNPRQRGFIRAAGCSENLKLLQTIIWSAKREHRPLGVVFVDIAKAFDTVSHQHIIHALQQREVDPHIVGLVSNMYENISTYITTKRNTHTDKIQIRVGVKQGDPMSPLLFNLAMDPLLCKLEESGKGYHRGQSSITAMAFADDLVLLSDSWENMNTNISILETFCNLTGLKTQGQKCHGFYIKPTKDSYTINDCAAWTINGTPLNMIDPGESEKYLGLQFDPWIGIARSGLSTKLDFWLQRIDQAPLKPLQKTDILKTYTIPRLIYIADHSEVKSALLETLDQKIRTAVKEWLHLPPCTCDAILYSSTRDGGLGITKLAGLIPSVQARRLHRIAQSSDDTMKCFMEKEKMEQLHKKLWIQAGGDRENIPSIWEAPPSSEPPNNVSTNSEWEAPTQKDKFPKPCNWRKNEFKKWTKLASQGRGIVNFERDKISNHWIQYYRRIPHRKLLTALQLRANVYPTREFLARGRQDQYIKACRHCDADNESCAHIIGNCPVTQDARIKRHNYICELLLEEAKKKDWVVFKEPHIRDSNKELYKPDLIFVKDGRALVVDVTVRYEAAKSSLEEAAAEKVRKYKHLETEVRHLTNAKDVTFVGFPLGARGKWHQDNFKLLTELGLSKSRQVKMAETFSTVALFSSVDIVHMFASRARKSMVM

SEQ ID NO: 1162 - protein, 1665 aa, synthetic construct
MAPKKKRKVNISGSSCGSPNSADTSSDFKDLWTKLKECHDREVQGLQVKVTKLKQERILDAQRLEEFFTKNQQLREQQKVLHETIKVLEDRLRAGLCDRCAVTEEHMRKKQQEFENIRQQNLKLITELMNERNTLQEENKKLSEQLQQKIENDQQHQAAELECEEDVIPDSPITAFSFSGVNRLRRKENPHVRYIEQTHTKLEHSVCANEMRKVSKSSTHPQHNPNENEILVADTYDQSQSPMAKAHGTSSYTPDKSSFNLATVVAETLGLGVQEESETQGPMSPLGDELYHCLEGNHKKQPFESGSETPGTSESATPEGSPKRKVSSAEGAAKEEPKRRSARLSAKPPAKVEAKPKKAAAKDKSSDKKVQTKGKRGAKGKQAEVANQETKEDLPAENGETKTEESPASDEAGEKEAKSDSGSETPGTSESATPESYEQLAPQPCVGETLHSSLPRDSELFVPEEGSSEKESEDAPKTSPPTPGKHGLEQTGEEKVMVTVPDKNPPCPCCGTRVNSVLNLIEHLKVSHGKRGVCFRCAKCGKENSNYHSVVCHFKKCRGPETEKAPAGEWICEVCNRDFTTKIGLGQHKRLAHPAVRNQERIVASQPKETSNRGAHKRCWTKEEEELLIRLEAQFEGNKNINKLIAEHITTKTAKQISDKRRLLSRKPAEEPREEPGTCHHTRRAAASLRTEPEMSHHAQAEDRDNGPGRRPLPGRAAAGGRTMDEIRRHPDKGNGQQRPTKQKSEEQLQAYYKKTLEERLSAGALNTFPRAFKQVMEGRDIKLVINQTAQDCFGCLESISQIRTATRDKKDTVTREKHPKKPFQKWMKKRAIKKGNYLRFQRLFYLDRGKLAKIILDDIECLSCDIALAAIYAVFKTRWETTGSFKSLGDFKTYGKADNTAFRELITAKEIEKNVQEMSKGSAPGPDGITLGDVVKMDPEFSRTMEIFNLWLTTGKIPDMVRGCRTVLIPKSSKPDRLKDINNWRPITIGSILLRLFSRIVTARLSKACPLNPRQRGFIRAAGCSENLKLLQTIIWSAKREHRPLGVVFVDIAKAFDTVSHQHIIHALQQREVDPHIVGLVSNMYENISTYITTKRNTHTDKIQIRVGVKQGDPMSPLLFNLAMDPLLCKLEESGKGYHRGQSSITAMAFADDLVLLSDSWENMNTNISILETFCNLTGLKTQGQKCHGFYIKPTKDSYTINDCAAWTINGTPLNMIDPGESEKYLGLQFDPWIGIARSGLSTKLDFWLQRIDQAPLKPLQKTDILKTYTIPRLIYIADHSEVKSALLETLDQKIRTAVKEWLHLPPCTCDAILYSSTRDGGLGITKLAGLIPSVQARRLHRIAQSSDDTMKCFMEKEKMEQLHKKLWIQAGGDRENIPSIWEAPPSSEPPNNVSTNSEWEAPTQKDKFPKPCNWRKNEFKKWTKLASQGRGIVNFERDKISNHWIQYYRRIPHRKLLTALQLRANVYPTREFLARGRQDQYIKACRHCDADNESCAHIIGNCPVTQDARIKRHNYICELLLEEAKKKDWVVFKEPHIRDSNKELYKPDLIFVKDGRALVVDVTVRYEAAKSSLEEAAAEKVRKYKHLETEVRHLTNAKDVTFVGFPLGARGKWHQDNFKLLTELGLSKSRQVKMAETFSTVALFSSVDIVHMFASRARKSMVM

SEQ ID NO: 1163 - protein, 1665 aa, synthetic construct
MAPKKKRKVNISGSSCGSPNSADTSSDFKDLWTKLKECHDREVQGLQVKVTKLKQERILDAQRLEEFFTKNQQLREQQKVLHETIKVLEDRLRAGLCDRCAVTEEHMRKKQQEFENIRQQNLKLITELMNERNTLQEENKKLSEQLQQKIENDQQHQAAELECEEDVIPDSPITAFSFSGVNRLRRKENPHVRYIEQTHTKLEHSVCANEMRKVSKSSTHPQHNPNENEILVADTYDQSQSPMAKAHGTSSYTPDKSSFNLATVVAETLGLGVQEESETQGPMSPLGDELYHCLEGNHKKQPFESGSETPGTSESATPEGSPKRKVSSAEGAAKEEPKRRSARLSAKPPAKVEAKPKKAAAKDKSSDKKVQTKGKRGAKGKQAEVANQETKEDLPAENGETKTEESPASDEAGEKEAKSDSGSETPGTSESATPESYEQLAPQPCVGETLHSSLPRDSELFVPEEGSSEKESEDAPKTSPPTPGKHGLEQTGEEKVMVTVPDKNPPCPCCGTRVNSVLNLIEHLKVSHGKRGVCFRCAKCGKENSNYHSVVCHFKKCRGPETEKAPAGEWICEVCNRDFTTKIGLGQHKRLAHPAVRNQERIVASQPKETSNRGAHKRCWTKEEEELLIRLEAQFEGNKNINKLIAEHITTKTAKQISDKRRLLSRKPAEEPREEPGTCHHTRRAAASLRTEPEMSHHAQAEDRDNGPGRRPLPGRAAAGGRTMDEIRRHPDKGNGQQRPTKQKSEEQLQAYYKKTLEERLSAGALNTFPRAFKQVMEGRDIKLVINQTAQDCFGCLESISQIRTATRDKKDTVTREKHPKKPFQKWMKKRAIKKGNYLRFQRLFYLDRGKLAKIILDDIECLSCDIPLSEIYSVFKTRWETTGSFKSLGDFKTYGKADNTAFRELITAKEIEKNVQEMSKGSAPGPDGITLGDVVKMDPEFSRTMEIFNLWLTTGKIPDMVRGCRTVLIPKSSKPDRLKDINNWRPITIGSILLRLFSRIVTARLSKACPLNPRQRGFIRAAGCSENLKLLQTIIWSAKREHRPLGVVFVDIAKAFDTVSHQHIIHALQQREVDPHIVGLVSNMYENISTYITTKRNTHTDKIQIRVGVKQGDPMSPLLFNLAMDPLLCKLEESGKGYHRGQSSITAMAFADDLVLLSDSWENMNTNISILETFCNLTGLKTQGQKCHGFYIKPTKDSYTINDCAAWTINGTPLNMIDPGESEKYLGLQFDPWIGIARSGLSTKLDFWLQRIDQAPLKPLQKTDILKTYTIPRLIYIADHSEVKSALLETLDQKIRTAVKEWLHLPPCTCDAILYSSTRDGGLGITKLAGLIPSVQARRLHRIAQSSDDTMKCFMEKEKMEQLHKKLWIQAGGDRENIPSIWEAPPSSEPPNNVSTNSEWEAPTQKDKFPKPCNWRKNEFKKWTKLASQGRGIVNFERDKISNHWIQYYRRIPHRKLLTALQLRANVYPTREFIARGRQDQYIKACRHCDADNESCAHIIGNCPVTQDARIKRHNYICELLLEEAKKKDWVVFKEPHIRDSNKELYKPDLIFVKDGRALVVDVTVRYEAAKSSLEEAAAEKVRKYKHLETEVRHLTNAKDVTFVGFPLGARGKWHQDNFKLLTELGLSKSRQVKMAETFSTVALFSSVDIVHMFASRARKSMVM

SEQ ID NO: 1164 - protein, 1665 aa, synthetic construct
MAPKKKRKVNISGSSCGSPNSADTSSDFKDLWTKLKECHDREVQGLQVKVTKLKQERILDAQRLEEFFTKNQQLREQQKVLHETIKVLEDRLRAGLCDRCAVTEEHMRKKQQEFENIRQQNLKLITELMNERNTLQEENKKLSEQLQQKIENDQQHQAAELECEEDVIPDSPITAFSFSGVNRLRRKENPHVRYIEQTHTKLEHSVCANEMRKVSKSSTHPQHNPNENEILVADTYDQSQSPMAKAHGTSSYTPDKSSFNLATVVAETLGLGVQEESETQGPMSPLGDELYHCLEGNHKKQPFESGSETPGTSESATPEGSPKRKVSSAEGAAKEEPKRRSARLSAKPPAKVEAKPKKAAAKDKSSDKKVQTKGKRGAKGKQAEVANQETKEDLPAENGETKTEESPASDEAGEKEAKSDSGSETPGTSESATPESYEQLAPQPCVGETLHSSLPRDSELFVPEEGSSEKESEDAPKTSPPTPGKHGLEQTGEEKVMVTVPDKNPPCPCCGTRVNSVLNLIEHLKVSHGKRGVCFRCAKCGKENSNYHSVVCHFKKCRGPETEKAPAGEWICEVCNRDFTTKIGLGQHKRLAHPAVRNQERIVASQPKETSNRGAHKRCWTKEEEELLIRLEAQFEGNKNINKLIAEHITTKTAKQISDKRRLLSRKPAEEPREEPGTCHHTRRAAASLRTEPEMSHHAQAEDRDNGPGRRPLPGRAAAGGRTMDEIRRHPDKGNGQQRPTKQKSEEQLQAYYKKTLEERLSAGALNTFPRAFKQVMEGRDIKLVINQTAQDCFGCLESISQIRTATRDKKDTVTREKHPKKPFQKWMKKRAIKKGNYLRFQRLFYLDRGKLAKIILDDIECLSCDIPLSEIYSVFKTRWETTGSFKSLGDFKTYGKADNTAFRELITAKEIEKNVQEMSKGSAPGPDGITLGDVVKMDPEFSRTMEIFNLWLTTGKIPDMVRGCRTVLIPKSSKPDRLKDINNWRPITIGSILLRLFSRIVTARLSKACPLNPRQRGFIRAAGCSENLKLLQTIIWSAKREHRPLGVVFVDIAKAFDTVSHQHIIHALQQREVDPHIVGLVSNMYENISTYITTKRNTHTDKIQIRVGVKQGDPMSPLLFNLAMDPLLCKLEESGKGYHRGQSSITAMAFADDLVLLSDSWSNMSVNIVILSVFCSLTGLKTQGQKCHGFYIKPTKDSYTINDCAAWTINGTPLNMIDPGESEKYLGLQFDPWIGIARSGLSTKLDFWLQRIDQAPLKPLQKTDILKTYTIPRLIYIADHSEVKSALLETLDQKIRTAVKEWLHLPPCTCDAILYSSTRDGGLGITKLAGLIPSVQARRLHRIAQSSDDTMKCFMEKEKMEQLHKKLWIQAGGDRENIPSIWEAPPSSEPPNNVSTNSEWEAPTQKDKFPKPCNWRKNEFKKWTKLASQGRGIVNFERDKISNHWIQYYRRIPHRKLLTALQLRANVYPTREFLARGRQDQYIKACRHCDADNESCAHIIGNCPVTQDARIKRHNYICELLLEEAKKKDWVVFKEPHIRDSNKELYKPDLIFVKDGRALVVDVTVRYEAAKSSLEEAAAEKVRKYKHLETEVRHLTNAKDVTFVGFPLGARGKWHQDNFKLLTELGLSKSRQVKMAETFSTVALFSSVDIVHMFASRARKSMVM

SEQ ID NO: 1165 - protein, 1665 aa, synthetic construct
MAPKKKRKVNISGSSCGSPNSADTSSDFKDLWTKLKECHDREVQGLQVKVTKLKQERILDAQRLEEFFTKNQQLREQQKVLHETIKVLEDRLRAGLCDRCAVTEEHMRKKQQEFENIRQQNLKLITELMNERNTLQEENKKLSEQLQQKIENDQQHQAAELECEEDVIPDSPITAFSFSGVNRLRRKENPHVRYIEQTHTKLEHSVCANEMRKVSKSSTHPQHNPNENEILVADTYDQSQSPMAKAHGTSSYTPDKSSFNLATVVAETLGLGVQEESETQGPMSPLGDELYHCLEGNHKKQPFESGSETPGTSESATPEGSPKRKVSSAEGAAKEEPKRRSARLSAKPPAKVEAKPKKAAAKDKSSDKKVQTKGKRGAKGKQAEVANQETKEDLPAENGETKTEESPASDEAGEKEAKSDSGSETPGTSESATPESYEQLAPQPCVGETLHSSLPRDSELFVPEEGSSEKESEDAPKTSPPTPGKHGLEQTGEEKVMVTVPDKNPPCPCCGTRVNSVLNLIEHLKVSHGKRGVCFRCAKCGKENSNYHSVVCHFKKCRGPETEKAPAGEWICEVCNRDFTTKIGLGQHKRLAHPAVRNQERIVASQPKETSNRGAHKRCWTKEEEELLIRLEAQFEGNKNINKLIAEHITTKTAKQISDKRRLLSRKPAEEPREEPGTCHHTRRAAASLRTEPEMSHHAQAEDRDNGPGRRPLPGRAAAGGRTMDEIRRHPDKGNGQQRPTKQKSEEQLQAYYKKTLEERLSAGALNTFPRAFKQVMEGRDIKLVINQTAQDCFGCLESISQIRTATRDKKDTVTREKHPKKPFQKWMKKRAIKKGNYLRFQRLFYLDRGKLAKIILDDIECLSCDIPLSEIYSVFKTRWETTGSFKSLGDFKTYGKADNTAFRELITAKEIEKNVQEMSKGSAPGPDGITLGDVVKMDPEFSRTMEIFNLWLTTGKIPDMVRGCRTVLIPKSSKPDRLKDINNWRPITIGSILLRLFSRIVTARLSKACPLNPRQRGFIRAAGCSENLKLLQTIIWSAKREHRPLGVVFVDIAKAFDTVSHQHIIHALQQREVDPHIVGLVSNMYENISTYITTKRNTHTDKIQIRVGVKQGDPMSPLLFNLAMDPLLCKLEESGKGYHRGQSSITAMAFADDLVLLSDSWANMAANIAILAAFCALTGLKTQGQKCHGFYIKPTKDSYTINDCAAWTINGTPLNMIDPGESEKYLGLQFDPWIGIARSGLSTKLDFWLQRIDQAPLKPLQKTDILKTYTIPRLIYIADHSEVKSALLETLDQKIRTAVKEWLHLPPCTCDAILYSSTRDGGLGITKLAGLIPSVQARRLHRIAQSSDDTMKCFMEKEKMEQLHKKLWIQAGGDRENIPSIWEAPPSSEPPNNVSTNSEWEAPTQKDKFPKPCNWRKNEFKKWTKLASQGRGIVNFERDKISNHWIQYYRRIPHRKLLTALQLRANVYPTREFLARGRQDQYIKACRHCDADNESCAHIIGNCPVTQDARIKRHNYICELLLEEAKKKDWVVFKEPHIRDSNKELYKPDLIFVKDGRALVVDVTVRYEAAKSSLEEAAAEKVRKYKHLETEVRHLTNAKDVTFVGFPLGARGKWHQDNFKLLTELGLSKSRQVKMAETFSTVALFSSVDIVHMFASRARKSMVM

SEQ ID NO: 1166 - protein, 1665 aa, synthetic construct
MAPKKKRKVNISGSSCGSPNSADTSSDFKDLWTKLKECHDREVQGLQVKVTKLKQERILDAQRLEEFFTKNQQLREQQKVLHETIKVLEDRLRAGLCDRCAVTEEHMRKKQQEFENIRQQNLKLITELMNERNTLQEENKKLSEQLQQKIENDQQHQAAELECEEDVIPDSPITAFSFSGVNRLRRKENPHVRYIEQTHTKLEHSVCANEMRKVSKSSTHPQHNPNENEILVADTYDQSQSPMAKAHGTSSYTPDKSSFNLATVVAETLGLGVQEESETQGPMSPLGDELYHCLEGNHKKQPFESGSETPGTSESATPEGSPKRKVSSAEGAAKEEPKRRSARLSAKPPAKVEAKPKKAAAKDKSSDKKVQTKGKRGAKGKQAEVANQETKEDLPAENGETKTEESPASDEAGEKEAKSDSGSETPGTSESATPESYEQLAPQPCVGETLHSSLPRDSELFVPEEGSSEKESEDAPKTSPPTPGKHGLEQTGEEKVMVTVPDKNPPCPCCGTRVNSVLNLIEHLKVSHGKRGVCFRCAKCGKENSNYHSVVCHFKKCRGPETEKAPAGEWICEVCNRDFTTKIGLGQHKRLAHPAVRNQERIVASQPKETSNRGAHKRCWTKEEEELLIRLEAQFEGNKNINKLIAEHITTKTAKQISDKRRLLSRKPAEEPREEPGTCHHTRRAAASLRTEPEMSHHAQAEDRDNGPGRRPLPGRAAAGGRTMDEIRRHPDKGNGQQRPTKQKSEEQLQAYYKKTLEERLSAGALNTFPRAFKQVMEGRDIKLVINQTAQDCFGCLESISQIRTATRDKKDTVTREKHPKKPFQKWMKKRAIKKGNYLRFQRLFYLDRGKLAKIILDDIECLSCDIPLSEIYSVFKTRWETTGSFKSLGDFKTYGKADNTAFRELITAKEIEKNVQEMSKGSAPGPDGITLGDVVKMDPEFSRTMEIFNLWLTTGKIPDMVRGCRTVLIPKSSKPDRLKDINNWRPITIGSILLRLFSRIVTARLSKACPLNPRQRGFIRAAGCSENLKLLQTIIWSAKREHRPLGVVFVDIAKAFDTVSHQHIIHALQQREVDPHIVGLVSNMYENISTYITTKRNTHTDKIQIRVGVKQGDPMSPLLFNLAMDPLLCKLEESGKGYHRGQSSITAMAFADDLVLLSDSWENMNTNISILETFCNLTGLKTQGQKCHGFYIKPTKDSYTINDCAAWVINPTGLNMIDPGESEKYLGLQFDPWIGIARSGLSTKLDFWLQRIDQAPLKPLQKTDILKTYTIPRLIYIADHSEVKSALLETLDQKIRTAVKEWLHLPPCTCDAILYSSTRDGGLGITKLAGLIPSVQARRLHRIAQSSDDTMKCFMEKEKMEQLHKKLWIQAGGDRENIPSIWEAPPSSEPPNNVSTNSEWEAPTQKDKFPKPCNWRKNEFKKWTKLASQGRGIVNFERDKISNHWIQYYRRIPHRKLLTALQLRANVYPTREFLARGRQDQYIKACRHCDADNESCAHIIGNCPVTQDARIKRHNYICELLLEEAKKKDWVVFKEPHIRDSNKELYKPDLIFVKDGRALVVDVTVRYEAAKSSLEEAAAEKVRKYKHLETEVRHLTNAKDVTFVGFPLGARGKWHQDNFKLLTELGLSKSRQVKMAETFSTVALFSSVDIVHMFASRARKSMVM

SEQ ID NO: 1167 - protein, 1665 aa, synthetic construct
MAPKKKRKVNISGSSCGSPNSADTSSDFKDLWTKLKECHDREVQGLQVKVTKLKQERILDAQRLEEFFTKNQQLREQQKVLHETIKVLEDRLRAGLCDRCAVTEEHMRKKQQEFENIRQQNLKLITELMNERNTLQEENKKLSEQLQQKIENDQQHQAAELECEEDVIPDSPITAFSFSGVNRLRRKENPHVRYIEQTHTKLEHSVCANEMRKVSKSSTHPQHNPNENEILVADTYDQSQSPMAKAHGTSSYTPDKSSFNLATVVAETLGLGVQEESETQGPMSPLGDELYHCLEGNHKKQPFESGSETPGTSESATPEGSPKRKVSSAEGAAKEEPKRRSARLSAKPPAKVEAKPKKAAAKDKSSDKKVQTKGKRGAKGKQAEVANQETKEDLPAENGETKTEESPASDEAGEKEAKSDSGSETPGTSESATPESYEQLAPQPCVGETLHSSLPRDSELFVPEEGSSEKESEDAPKTSPPTPGKHGLEQTGEEKVMVTVPDKNPPCPCCGTRVNSVLNLIEHLKVSHGKRGVCFRCAKCGKENSNYHSVVCHFKKCRGPETEKAPAGEWICEVCNRDFTTKIGLGQHKRLAHPAVRNQERIVASQPKETSNRGAHKRCWTKEEEELLIRLEAQFEGNKNINKLIAEHITTKTAKQISDKRRLLSRKPAEEPREEPGTCHHTRRAAASLRTEPEMSHHAQAEDRDNGPGRRPLPGRAAAGGRTMDEIRRHPDKGNGQQRPTKQKSEEQLQAYYKKTLEERLSAGALNTFPRAFKQVMEGRDIKLVINQTAQDCFGCLESISQIRTATRDKKDTVTREKHPKKPFQKWMKKRAIKKGNYLRFQRLFYLDRGKLAKIILDDIECLSCDIGLVSIYVVFKTRWETTGSFKSLGDFKTYGKADNTAFRELITAKEIEKNVQEMSKGSAPGPDGITLGDVVKMDPEFSRTMEIFNLWLTTGKIPDMVRGCRTVLIPKSSKPDRLKDINNWRPITIGSILLRLFSRIVTARLSKACPLNPRQRGFIRAAGCSENLKLLQTIIWSAKREHRPLGVVFVDIAKAFDTVSHQHIIHALQQREVDPHIVGLVSNMYENISTYITTKRNTHTDKIQIRVGVKQGDPMSPLLFNLAMDPLLCKLEESGKGYHRGQSSITAMAFADDLVLLSDSWSNMSVNIAILETFCNLTGLKTQGQKCHGFYIKPTKDSYTINDCAAWTINGTPLNMIDPGESEKYLGLQFDPWIGIARSGLSTKLDFWLQRIDQAPLKPLQKTDILKTYTIPRLIYIADHSEVKSALLETLDQKIRTAVKEWLHLPPCTCDAILYSSTRDGGLGITKLAGLIPSVQARRLHRIAQSSDDTMKCFMEKEKMEQLHKKLWIQAGGDRENIPSIWEAPPSSEPPNNVSTNSEWEAPTQKDKFPKPCNWRKNEFKKWTKLASQGRGIVNFERDKISNHWIQYYRRIPHRKLLTALQLRANVYPTREFLARGRQDQYIKACRHCDADNESCAHIIGNCPVTQDARIKRHNYICELLLEEAKKKDWVVFKEPHIRDSNKELYKPDLIFVKDGRALVVDVTVRYEAAKSSLEEAAAEKVRKYKHLETEVRHLTNAKDVTFVGFPLGARGKWHQDNFKLLTELGLSKSRQVKMAETFSTVALFSSVDIVHMFASRARKSMVM

SEQ ID NO: 1168 - protein, 1665 aa, synthetic construct
MAPKKKRKVNISGSSCGSPNSADTSSDFKDLWTKLKECHDREVQGLQVKVTKLKQERILDAQRLEEFFTKNQQLREQQKVLHETIKVLEDRLRAGLCDRCAVTEEHMRKKQQEFENIRQQNLKLITELMNERNTLQEENKKLSEQLQQKIENDQQHQAAELECEEDVIPDSPITAFSFSGVNRLRRKENPHVRYIEQTHTKLEHSVCANEMRKVSKSSTHPQHNPNENEILVADTYDQSQSPMAKAHGTSSYTPDKSSFNLATVVAETLGLGVQEESETQGPMSPLGDELYHCLEGNHKKQPFESGSETPGTSESATPEGSPKRKVSSAEGAAKEEPKRRSARLSAKPPAKVEAKPKKAAAKDKSSDKKVQTKGKRGAKGKQAEVANQETKEDLPAENGETKTEESPASDEAGEKEAKSDSGSETPGTSESATPESYEQLAPQPCVGETLHSSLPRDSELFVPEEGSSEKESEDAPKTSPPTPGKHGLEQTGEEKVMVTVPDKNPPCPCCGTRVNSVLNLIEHLKVSHGKRGVCFRCAKCGKENSNYHSVVCHFKKCRGPETEKAPAGEWICEVCNRDFTTKIGLGQHKRLAHPAVRNQERIVASQPKETSNRGAHKRCWTKEEEELLIRLEAQFEGNKNINKLIAEHITTKTAKQISDKRRLLSRKPAEEPREEPGTCHHTRRAAASLRTEPEMSHHAQAEDRDNGPGRRPLPGRAAAGGRTMDEIRRHPDKGNGQQRPTKQKSEEQLQAYYKKTLEERLSAGALNTFPRAFKQVMEGRDIKLVINQTAQDCFGCLESISQIRTATRDKKDTVTREKHPKKPFQKWMKKRAIKKGNYLRFQRLFYLDRGKLAKIILDDIECLSCDIGLVSIYVVFKTRWETTGSFKSLGDFKTYGKADNTAFRELITAKEIEKNVQEMSKGSAPGPDGITLGDVVKMDPEFSRTMEIFNLWLTTGKIPDMVRGCRTVLIPKSSKPDRLKDINNWRPITIGSILLRLFSRIVTARLSKACPLNPRQRGFIRAAGCSENLKLLQTIIWSAKREHRPLGVVFVDIAKAFDTVSHQHIIHALQQREVDPHIVGLVSNMYENISTYITTKRNTHTDKIQIRVGVKQGDPMSPLLFNLAMDPLLCKLEESGKGYHRGQSSITAMAFADDLVLLSDSWENMNTNISILSAFCSLTGLKTQGQKCHGFYIKPTKDSYTINDCAAWTINGTPLNMIDPGESEKYLGLQFDPWIGIARSGLSTKLDFWLQRIDQAPLKPLQKTDILKTYTIPRLIYIADHSEVKSALLETLDQKIRTAVKEWLHLPPCTCDAILYSSTRDGGLGITKLAGLIPSVQARRLHRIAQSSDDTMKCFMEKEKMEQLHKKLWIQAGGDRENIPSIWEAPPSSEPPNNVSTNSEWEAPTQKDKFPKPCNWRKNEFKKWTKLASQGRGIVNFERDKISNHWIQYYRRIPHRKLLTALQLRANVYPTREFLARGRQDQYIKACRHCDADNESCAHIIGNCPVTQDARIKRHNYICELLLEEAKKKDWVVFKEPHIRDSNKELYKPDLIFVKDGRALVVDVTVRYEAAKSSLEEAAAEKVRKYKHLETEVRHLTNAKDVTFVGFPLGARGKWHQDNFKLLTELGLSKSRQVKMAETFSTVALFSSVDIVHMFASRARKSMVM

SEQ ID NO: 1169 - protein, 1665 aa, synthetic construct
MAPKKKRKVNISGSSCGSPNSADTSSDFKDLWTKLKECHDREVQGLQVKVTKLKQERILDAQRLEEFFTKNQQLREQQKVLHETIKVLEDRLRAGLCDRCAVTEEHMRKKQQEFENIRQQNLKLITELMNERNTLQEENKKLSEQLQQKIENDQQHQAAELECEEDVIPDSPITAFSFSGVNRLRRKENPHVRYIEQTHTKLEHSVCANEMRKVSKSSTHPQHNPNENEILVADTYDQSQSPMAKAHGTSSYTPDKSSFNLATVVAETLGLGVQEESETQGPMSPLGDELYHCLEGNHKKQPFESGSETPGTSESATPEGSPKRKVSSAEGAAKEEPKRRSARLSAKPPAKVEAKPKKAAAKDKSSDKKVQTKGKRGAKGKQAEVANQETKEDLPAENGETKTEESPASDEAGEKEAKSDSGSETPGTSESATPESYEQLAPQPCVGETLHSSLPRDSELFVPEEGSSEKESEDAPKTSPPTPGKHGLEQTGEEKVMVTVPDKNPPCPCCGTRVNSVLNLIEHLKVSHGKRGVCFRCAKCGKENSNYHSVVCHFKKCRGPETEKAPAGEWICEVCNRDFTTKIGLGQHKRLAHPAVRNQERIVASQPKETSNRGAHKRCWTKEEEELLIRLEAQFEGNKNINKLIAEHITTKTAKQISDKRRLLSRKPAEEPREEPGTCHHTRRAAASLRTEPEMSHHAQAEDRDNGPGRRPLPGRAAAGGRTMDEIRRHPDKGNGQQRPTKQKSEEQLQAYYKKTLEERLSAGALNTFPRAFKQVMEGRDIKLVINQTAQDCFGCLESISQIRTATRDKKDTVTREKHPKKPFQKWMKKRAIKKGNYLRFQRLFYLDRGKLAKIILDDIECLSCDIGLVSIYVVFKTRWETTGSFKSLGDFKTYGKADNTAFRELITAKEIEKNVQEMSKGSAPGPDGITLGDVVKMDPEFSRTMEIFNLWLTTGKIPDMVRGCRTVLIPKSSKPDRLKDINNWRPITIGSILLRLFSRIVTARLSKACPLNPRQRGFIRAAGCSENLKLLQTIIWSAKREHRPLGVVFVDIAKAFDTVSHQHIIHALQQREVDPHIVGLVSNMYENISTYITTKRNTHTDKIQIRVGVKQGDPMSPLLFNLAMDPLLCKLEESGKGYHRGQSSITAMAFADDLVLLSDSWENMNTNISILETFCNLTGLKTQGQKCHGFYIKPTKDSYTINDCAAWAINATPLNMIDPGESEKYLGLQFDPWIGIARSGLSTKLDFWLQRIDQAPLKPLQKTDILKTYTIPRLIYIADHSEVKSALLETLDQKIRTAVKEWLHLPPCTCDAILYSSTRDGGLGITKLAGLIPSVQARRLHRIAQSSDDTMKCFMEKEKMEQLHKKLWIQAGGDRENIPSIWEAPPSSEPPNNVSTNSEWEAPTQKDKFPKPCNWRKNEFKKWTKLASQGRGIVNFERDKISNHWIQYYRRIPHRKLLTALQLRANVYPTREFLARGRQDQYIKACRHCDADNESCAHIIGNCPVTQDARIKRHNYICELLLEEAKKKDWVVFKEPHIRDSNKELYKPDLIFVKDGRALVVDVTVRYEAAKSSLEEAAAEKVRKYKHLETEVRHLTNAKDVTFVGFPLGARGKWHQDNFKLLTELGLSKSRQVKMAETFSTVALFSSVDIVHMFASRARKSMVM

SEQ ID NO: 1170 - protein, 1665 aa, synthetic construct
MAPKKKRKVNISGSSCGSPNSADTSSDFKDLWTKLKECHDREVQGLQVKVTKLKQERILDAQRLEEFFTKNQQLREQQKVLHETIKVLEDRLRAGLCDRCAVTEEHMRKKQQEFENIRQQNLKLITELMNERNTLQEENKKLSEQLQQKIENDQQHQAAELECEEDVIPDSPITAFSFSGVNRLRRKENPHVRYIEQTHTKLEHSVCANEMRKVSKSSTHPQHNPNENEILVADTYDQSQSPMAKAHGTSSYTPDKSSFNLATVVAETLGLGVQEESETQGPMSPLGDELYHCLEGNHKKQPFESGSETPGTSESATPEGSPKRKVSSAEGAAKEEPKRRSARLSAKPPAKVEAKPKKAAAKDKSSDKKVQTKGKRGAKGKQAEVANQETKEDLPAENGETKTEESPASDEAGEKEAKSDSGSETPGTSESATPESYEQLAPQPCVGETLHSSLPRDSELFVPEEGSSEKESEDAPKTSPPTPGKHGLEQTGEEKVMVTVPDKNPPCPCCGTRVNSVLNLIEHLKVSHGKRGVCFRCAKCGKENSNYHSVVCHFKKCRGPETEKAPAGEWICEVCNRDFTTKIGLGQHKRLAHPAVRNQERIVASQPKETSNRGAHKRCWTKEEEELLIRLEAQFEGNKNINKLIAEHITTKTAKQISDKRRLLSRKPAEEPREEPGTCHHTRRAAASLRTEPEMSHHAQAEDRDNGPGRRPLPGRAAAGGRTMDEIRRHPDKGNGQQRPTKQKSEEQLQAYYKKTLEERLSAGALNTFPRAFKQVMEGRDIKLVINQTAQDCFGCLESISQIRTATRDKKDTVTREKHPKKPFQKWMKKRAIKKGNYLRFQRLFYLDRGKLAKIILDDIECLSCDIPLSEIYSVFKTRWETTGSFKSLGDFKTYGKADNTAFRELITAKEIEKNVQEMSKGSAPGPDGITLGDVVKMDPEFSRTMEIFNLWLTTGKIPDMVRGCRTVLIPKSSKPDRLKDINNWRPITIGSILLRLFSRIVTARLSKACPLNPRQRGFIRAAGCSENLKLLQTIIWSAKREHRPLGVVFVDIAKAFDTVSHQHIIHALQQREVDPHIVGLVSNMYENISTYITTKRNTHTDKIQIRVGVKQGDPMSPLLFNLAMDPLLCKLEESGKGYHRGQSSITAMAFADDLVLLSDSWENMSVNIVILETFCNLTGLKTQGQKCHGFYIKPTKDSYTINDCAAWTINGTPLNMIDPGESEKYLGLQFDPWIGIARSGLSTKLDFWLQRIDQAPLKPLQKTDILKTYTIPRLIYIADHSEVKSALLETLDQKIRTAVKEWLHLPPCTCDAILYSSTRDGGLGITKLAGLIPSVQARRLHRIAQSSDDTMKCFMEKEKMEQLHKKLWIQAGGDRENIPSIWEAPPSSEPPNNVSTNSEWEAPTQKDKFPKPCNWRKNEFKKWTKLASQGRGIVNFERDKISNHWIQYYRRIPHRKLLTALQLRANVYPTREFLARGRQDQYIKACRHCDADNESCAHIIGNCPVTQDARIKRHNYICELLLEEADKKKAVVFKEPHIRDSNKELYKPDLIFVKDGRALVVDVTVRYEAAKSSLEEAAAEKVRKYKHLETEVRHLTNAKDVTFVGFPLGARGKWHQDNFKLLTELGLSKSRQVKMAETFSTVALFSSVDIVHMFASRARKSMVM

SEQ ID NO: 1171 - protein, 161 aa, synthetic construct
MASCPKPGPPVSAGAMSLESGLTTHSVLAIERGPNSLANSGSDFGGGGLGLPLRLLRVSVGTQTSRSDWVDLVSWSHPGPTSKSQQVDLVSLFPKHRVDLLSKNDQVDLVAQFLPSKFPPNLAENDLALLVNLEFYRSDLHVYECVHFAAHWEGLSGLPEV

SEQ ID NO: 1172 - protein, 184 aa, synthetic construct
MASCPKPGPPVSAGAMSLESGLTTHSVLAIERGPNSLANSGSDFGGGGLGLPLRLLRVSVGTQTSRSDWVDLVSWSHPGPTSKSQQVDLVSLFPKHRVDLLSKNDQVDLVAQFLPSKFPPNLAENDLALLVNLEFYRSDLHVYECVHFAAHWEGLSGLPEVYEQLAPQPCVGETLHSSLPRDSE

SEQ ID NO: 1173 - protein, 218 aa, synthetic construct
MASCPKPGPPVSAGAMSLESGLTTHSVLAIERGPNSLANSGSDFGGGGLGLPLRLLRVSVGTQTSRSDWVDLVSWSHPGPTSKSQQVDLVSLFPKHRVDLLSKNDQVDLVAQFLPSKFPPNLAENDLALLVNLEFYRSDLHVYECVHFAAHWEGLSGLPEVYEQLAPQPCVGETLHSSLPRDSELFVPEEGSSEKESEDAPKTSPPTPGKHGLEQTGE

SEQ ID NO: 1174 - protein, 32 aa, synthetic construct
MAENGESSGPPRPSRGPAAAQGSAAAPAEPKI

SEQ ID NO: 1175 - protein, 36 aa, synthetic construct
NRPQGQSTQPSNAAGTNTTSASTPRSNSTPISTNSN

SEQ ID NO: 1176 - protein, 63 aa, synthetic construct
FGGNPFASVGSSSSSGEGTQPSRTENRDPLPNPWAPPPATQSSATTSTTTSTGSGSGNSSSNA

SEQ ID NO: 1177 - protein, 40 aa, synthetic construct
NSTGGFDGQARQPTPPFFGRDRSPLRRSPPRASYVAPLTA

SEQ ID NO: 1178 - protein, 25 aa, synthetic construct
VANANSTPPPYERTRLSPPRASYDD

SEQ ID NO: 1179 - protein, 21 aa, synthetic construct
TFGESSFNNELPQDSQEVTCT

SEQ ID NO: 1180 - protein, 35 aa, synthetic construct
SKQEMASASSSQRGRSGSGNFGGGRGGGFGGNDNF

SEQ ID NO: 1181 - protein, 56 aa, synthetic construct
NYNNQSSNFGPMKGGNFGGRSSGPYGGGGQYFAKPRNQGGYGGSSSSSSYGSGRRF

SEQ ID NO: 1182 - protein, 44 aa, synthetic construct
NKPGQNEGGVRGGRGGGYKELDEQELEETKRRRREAEEDDGEMY

SEQ ID NO: 1183 - protein, 88 aa, synthetic construct
KTNQADTRPAVAAGRAGWEVEELGIDKDGRERSRDRQRDRGRDHHYDKDRRRSRSRERERGKERDYDYDHDRDRDRDYGRERGSRYRN

SEQ ID NO: 1184 - protein, 199 aa, synthetic construct
DVMDVFIPKPFRAFAFVTFADDQIAQSLCGEDLIIKGISVHISNAEPKHNSNRQLERSGRFGGNPGGFGNQGGFGNSRGGGAGLGNNQGSNMGGGMNFGAFSINPAMMAAAQAALQSSWGMMGMLASQQNQSGPSGNNQNQGNMQREPNQAFGSGNNSYSGSNSGAAIGWGSASNAGSGSGFNGGFGSSMDSKSSGWGM

SEQ ID NO: 1185 - protein, 43 aa, synthetic construct
EPKHNSNRQLERSGRFGGNPGGFGNQGGFGNSRGGGAGLGNNQ

SEQ ID NO: 1186 - protein, 246 aa, synthetic construct
MGDEDWEAEINPHMSSYVPIFEKDRYSGENGDNFNRTPASSSEMDDGPSRRDHFMKSGFASGRNFGNRDAGECNKRDNTSTMGGFGVGKSFGNRGFSNSRFEDGDSSGFWRESSNDCEDNPTRNRGFSKRGGYRDGNNSEASGPYRRGGRGSFRGCRGGFGLGSPNNDLDPDECMQRTGGLFGSRRPVLSGTGNGDTSQSRSGSGSERGGYKGLNEEVITGSGKNSWKSEAEGGESSDTQGPKVTY

SEQ ID NO: 1187 - protein, 286 aa, synthetic construct
MASNDYTQQATQSYGAYPTQPGQGYSQQSSQPYGQQSYSGYSQSTDTSGYGQSSYSSYGQSQNTGYGTQSTPQGYGSTGGYGSSQSSQSSYGQQSSYPGYGQQPAPSSTSGSYGSSSQSSSYGQPQSGSYSQQPSYGGQQQSYGQQQSYNPPQGYGQQNQYNSSSGGGGGGGGGGNYGQDQSSMSSGGGSGGGYGNQDQSGGGGSGGYGQQDRGGRGRGGSGGGGGGGGGGYNRSSGGYEPRGRGGGRGGRGGMGGSDRGGFNKFGGPRDQGSRHDSEQDNSDNNT

SEQ ID NO: 1188 - protein, 50 aa, synthetic construct
FNRGGGNGRGGRGRGGPMGRGGYGGGGSGGGGRGGFPSGGGGGGGQQRAG

SEQ ID NO: 1189 - protein, 83 aa, synthetic construct
CNQCKAPKPDGPGGGPGGSHMGGNYGDDRRGGRGGYDRGGYRGRGGDRGGFRGGRGGGDRGGFGPGKMDSRGEHRQDRRERPY

SEQ ID NO: 1190 - protein, 188 aa, synthetic construct
MGGTARGPGRKDAGPPGAGLPPQQRRLGDGVYDTFMMIDETKCPPCSNVLCNPSEPPPPRRLNMTTEQFTGDHTQHFLDGGEMKVEQLFQEFGNRKSNTIQSDGISDSEKCSPTVSQGKSSDCLNTVKSNSSSKAPKVVPLTPEQALKQYKHHLTAYEKLEIINYPEIYFVGPNAKKRHGVIGGPNNG

SEQ ID NO: 1191 - protein, 181 aa, synthetic construct
SFGEEAEEEEEEVNRVSQSMKGKSKSSHDLLKDDPHLSSVPVVESEKGDAPDLVDDGEDESAEHDEYIDGDEKNLMRERIAKKLKKDTSANVKSAGEGEVEKKSVSRSEELRKEARQLKRELLAAKQKKVENAAKQAEKRSEEEEAPPDGAVAEYRREKQKYEALRKQQSKKGTSREDQTL

SEQ ID NO: 1192 - protein, 75 aa, synthetic construct
QAIAETPENDIPETEVEDDEGWMSHVLQFEDKSRKVKDASMQDSDTFEIYDPRNPVNKRRREESKKLMREKKERR

SEQ ID NO: 1193 - protein, 46 aa, synthetic construct
MADLLGSILSSMEKPPSLGDQETRRKAREQAARLKKLQEQEKQQKV

SEQ ID NO: 1194 - protein, 43 aa, synthetic construct
LDSYRRGEEWDPQKAEEKRKLKELAQRQEEEAAQQGPVVVSPA

SEQ ID NO: 1195 - protein, 73 aa, synthetic construct
TLHRSRPETGRPRPKGLEGKRPARLTRREADRDTYRRCSVPPGADKKAEAGAGSATEFQFRGRCGRGRGQPPQ

SEQ ID NO: 1196 - protein, 263 aa, synthetic construct
MARGPKKHLKRVAAPKHWMLDKLTGVFAPRPSTGPHKLRECLPLIVFLRNRLKYALTGDEVKKICMQHFLKIDGKVRVDITYPAGFIDVISIEKTGEHFRLVYNTKGCFAVHRITVEEAKYKLCKVRKITVGTKGIPHLVTHDARTIRYPDPLIKVNDTVQIDLGTGKITSFIKFDTGNVCMVIAGANLGRVGVITNRERHPGSCDVVHVKDANGNSFATRISNIFVIGNGNKPWISLPRGKGIRLTIAEERDKRLAAKQSSG

SEQ ID NO: 1197 - protein, 283 aa, synthetic construct
DMNGKSLHGKAIKVEQAKKPSFQSGGRRRPPASSRNRSPSGSLRSARGSRGGTRGWLPSQEGHLDDGGYTPDLKMSYSRGLIPVKRGPSSRSGGPPPKKSAPSAVARSNSWMGSQGPMSQRRENYGVPPRRATISSWRNDRMSTRHDGYATNDGNHPSCQETRDYAPPSRGYAYRDNGHSNRDEHSSRGYRNHRSSRETRDYAPPSRGHAYRDYGHSRRDESYSRGYRNRRSSRETREYAPPSRGHGYRDYGHSRRHESYSRGYRNHPSSRETRDYAPPHRDY

SEQ ID NO: 1198 - protein, 45 aa, synthetic construct
KDQRNPPSLGRVLPDPREACGSSSYVASIVDGGESRSEKGDSSRY

SEQ ID NO: 1199 - protein, 51 aa, synthetic construct
MSAGSATHPGAGGRRSKWDQPAPAPLLFLPPAAPGGEVTSSGGSPGGTTAA

SEQ ID NO: 1200 - protein, 142 aa, synthetic construct
QVQPPASTGQSPMGGPFIPAAPVKTALPAGPQPQPQPQPPLPSQPQAQKRRFTEELPDERESGLLGYQHGPIHMTNLGTGFSSQNEIEGAGSKPASSSGKERERDRQLMPPPAFPVTGIKTESDERNGSGTLTGSHDYPAKK

SEQ ID NO: 1201 - protein, 48 aa, synthetic construct
YAADSSDEEEEHGGHKNASSFPQGWSLGYQYPSSQPRAKQQMPFWMAP

SEQ ID NO: 1202 - protein, 76 aa, synthetic construct
MSSRPGREDVGAAGARRPREPPEQELQRRREQKRRRHDAQQLQQLKHLESFYEKPPPGLIKEDETKPEDCIPDVPG

SEQ ID NO: 1203 - protein, 75 aa, synthetic construct
DNKRHEKDVRIQQLKQLLEDSTSDEDRSSSSSSEGKEKHKKKKKKEKHKKRKKEKKKKKKRKHKSSKSNEGSDSE

SEQ ID NO: 1204 - protein, 125 aa, synthetic construct
MAVADLALIPDVDIDSDGVFKYVLIRVHSAPRSGAPAAESKEIVRGYKWAEYHADIYDKVSGDMQKQGCDCECLGGGRISHQSQDKKIHVYGYSMAYGPAQHAISTEKIKAKYPDYEVTWANDGY

SEQ ID NO: 1205 - protein, 245 aa, synthetic construct
MQREMSMDESKQVETKTDAKNGEERGRDASKKALGPRRDSDLGKEPKRGGLKKSFSRDRDEAGGKSGEKPKEEKIIRGIDKGRVRAAVDKKEAGKDGRGEERAVATKKEEEKKGSDRNTGLSRDKDKKREEMKEVAKKEDDEKVKGERRNTDTRKEGEKMKRAGGNTDMKKEDEKVKRGTGNTDTKKDDEKVKKNEPLHEKEAKDDSKTKTPEKQTPSGPTKPSEGPAKVEEEAAPSIFDEPLER

SEQ ID NO: 1206 - protein, 102 aa, synthetic construct
DKQRQKRLQEQRQAQEAKGEKKDLLEVPKAGAVAKGSPKPSPQPSPKPSPKNSPKKGGAPAAPPPPPPPLAPPLIMENLKNSLSPATQRKMGDKVLPAQEKN

SEQ ID NO: 1207 - protein, 128 aa, synthetic construct
MSGRGKQGGKARAKAKTRSSRAGLQFPVGRVHRLLRKGNYAERVGAGAPVYLAAVLEYLTAEILELAGNAARDNKKTRIIPRHLQLAIRNDEELNKLLGKVTIAQGGVLPNIQAVLLPKKTESHHKAK

SEQ ID NO: 1208 - protein, 198 aa, synthetic construct
EEEKKREVLNNPVKMKKIKELLQMSLEKKEKKKKKEKKKKHKKHKHRSSSSDRSSSEDEHSAGRSQKKMANSSPVLSKVPGYGLQVRNSDRNQGLQGPLTAEQKRGHGMKNHSRSRSSSHSPPRHASKKSTREAGSRDRRSRSLGRRSRSPRPSKLHNSKVNRRETGQTRSPSPKKEVYQRRHAPGYTRKLSAEELER

SEQ ID NO: 1209 - protein, 78 aa, synthetic construct
MVRPVRHKKPVNYSQFDHSDSDDDFVSATVPLNKKSRTAPKELKQDKPKPNLNNLRKEEIPVQEKTPKKRLPEGTFSI

SEQ ID NO: 1210 - protein, 205 aa, synthetic construct
MATPLGWSKAGSGSVCLALDQLRDVIESQEELIHQLRNVMVLQDENFVSKEEFQAVEKKLVEEKAAHAKTKVLLAKEEEKLQFALGEVEVLSKQLEKEKLAFEKALSSVKSKVLQESSKKDQLITKCNEIESHIIKQEDILNGKENEIKELQQVISQQKQIFRNHMSDFRIQKQQESYMAQVLDQKHKKASGTRQARSHQHPREK

SEQ ID NO: 1211 - protein, 72 aa, synthetic construct
KKQTMGFEVPGVSSEENGHSFHTPQKGPPIEDAIASSDVLETASKSANPPHTIQASEEQSSTPAPVKKSGKL

SEQ ID NO: 1212 - protein, 92 aa, synthetic construct
IPKSTRSKAKKSVSAKTKKLVLSRDSKSPKTAKTNKRAKKPRATTPKTVRSGRKAKGAKGKQQQKSPVKARASKSKLTQHHEVNVRKATSKK

SEQ ID NO: 1213 - protein, 90 aa, synthetic construct
YLKRPPESPPIVEEWNSRAGGNQRNRGNRLQDNRQFRGRDNRWGWPSDNRSNQWHGRSWGNNYPQHRQEPYYPQQYGHYGYNQRPPYGYY

SEQ ID NO: 1214 - protein, 41 aa, synthetic construct
SGTKEQIKGGTGDEKKAKEKIEKKGEKKEKKQQSIAGSADS

SEQ ID NO: 1215 - protein, 67 aa, synthetic construct
QRGHSYHGPQIKVDHSREKENAPEGPTQKGLREAREQNKCKTKMKGNTKDSEFPIDMQPNPNLNVSK

SEQ ID NO: 1216 - protein, 162 aa, synthetic construct
DVGGVQGKRKAASKAAAQQRKILLEGSDGDSANDTEPDFAPGEDSEDDSDFCESEDNDEDFSMRKSKVKEIKKKEVKVKSPVEKKEKKSKSKCNALVTSVDSAPAAVKSESQSLPKKVSLSSDTTRKPLEIRSPSAESKKPKWVPPAASGGSRSSSSPLVVV

SEQ ID NO: 1217 - skipped

SEQ ID NO: 1218 - protein, 1657 aa, synthetic construct
MPKRKVSSAEGAAKEEPKRRSARLSAKPPAKVEAKPKKAAAKDKSSDKKVQTKGKRGAKGKQAEVANQETKEDLPAENGETKTEESPASDEAGEKEAKSDSGSETPGTSESATPESNISGSSCGSPNSADTSSDFKDLWTKLKECHDREVQGLQVKVTKLKQERILDAQRLEEFFTKNQQLREQQKVLHETIKVLEDRLRAGLCDRCAVTEEHMRKKQQEFENIRQQNLKLITELMNERNTLQEENKKLSEQLQQKIENDQQHQAAELECEEDVIPDSPITAFSFSGVNRLRRKENPHVRYIEQTHTKLEHSVCANEMRKVSKSSTHPQHNPNENEILVADTYDQSQSPMAKAHGTSSYTPDKSSFNLATVVAETLGLGVQEESETQGPMSPLGDELYHCLEGNHKKQPFESGSETPGTSESATPEGSYEQLAPQPCVGETLHSSLPRDSELFVPEEGSSEKESEDAPKTSPPTPGKHGLEQTGEEKVMVTVPDKNPPCPCCGTRVNSVLNLIEHLKVSHGKRGVCFRCAKCGKENSNYHSVVCHFKKCRGPETEKAPAGEWICEVCNRDFTTKIGLGQHKRLAHPAVRNQERIVASQPKETSNRGAHKRCWTKEEEELLIRLEAQFEGNKNINKLIAEHITTKTAKQISDKRRLLSRKPAEEPREEPGTCHHTRRAAASLRTEPEMSHHAQAEDRDNGPGRRPLPGRAAAGGRTMDEIRRHPDKGNGQQRPTKQKSEEQLQAYYKKTLEERLSAGALNTFPRAFKQVMEGRDIKLVINQTAQDCFGCLESISQIRTATRDKKDTVTREKHPKKPFQKWMKKRAIKKGNYLRFQRLFYLDRGKLAKIILDDIECLSCDIPLSEIYSVFKTRWETTGSFKSLGDFKTYGKADNTAFRELITAKEIEKNVQEMSKGSAPGPDGITLGDVVKMDPEFSRTMEIFNLWLTTGKIPDMVRGCRTVLIPKSSKPDRLKDINNWRPITIGSILLRLFSRIVTARLSKACPLNPRQRGFIRAAGCSENLKLLQTIIWSAKREHRPLGVVFVDIAKAFDTVSHQHIIHALQQREVDPHIVGLVSNMYENISTYITTKRNTHTDKIQIRVGVKQGDPMSPLLFNLAMDPLLCKLEESGKGYHRGQSSITAMAFADDLVLLSDSWENMNTNISILETFCNLTGLKTQGQKCHGFYIKPTKDSYTINDCAAWTINGTPLNMIDPGESEKYLGLQFDPWIGIARSGLSTKLDFWLQRIDQAPLKPLQKTDILKTYTIPRLIYIADHSEVKSALLETLDQKIRTAVKEWLHLPPCTCDAILYSSTRDGGLGITKLAGLIPSVQARRLHRIAQSSDDTMKCFMEKEKMEQLHKKLWIQAGGDRENIPSIWEAPPSSEPPNNVSTNSEWEAPTQKDKFPKPCNWRKNEFKKWTKLASQGRGIVNFERDKISNHWIQYYRRIPHRKLLTALQLRANVYPTREFLARGRQDQYIKACRHCDADNESCAHIIGNCPVTQDARIKRHNYICELLLEEAKKKDWVVFKEPHIRDSNKELYKPDLIFVKDGRALVVDVTVRYEAAKSSLEEAAAEKVRKYKHLETEVRHLTNAKDVTFVGFPLGARGKWHQDNFKLLTELGLSKSRQVKMAETFSTVALFSSVDIVHMFASRARKSMVM

SEQ ID NO: 1219 - skipped

SEQ ID NO: 1220 - protein, 1322 aa, synthetic construct
MPKRKVSSAEGAAKEEPKRRSARLSAKPPAKVEAKPKKAAAKDKSSDKKVQTKGKRGAKGKQAEVANQETKEDLPAENGETKTEESPASDEAGEKEAKSDSGSETPGTSESATPESLFVPEEGSSEKESEDAPKTSPPTPGKHGLEQTGEEKVMVTVPDKNPPCPCCGTRVNSVLNLIEHLKVSHGKRGVCFRCAKCGKENSNYHSVVCHFKKCRGPETEKAPAGEWICEVCNRDFTTKIGLGQHKRLAHPAVRNQERIVASQPKETSNRGAHKRCWTKEEEELLIRLEAQFEGNKNINKLIAEHITTKTAKQISDKRRLLSRKPAEEPRMEPGTCHHTRRAAASLRTEPEMSHHAQAEDRDNGPGRRPLPGRAAAGGRTMDEIRRHPDKGNGQQRPTKQKSEEQLQAYYKKTLEERLSAGALNTFPRAFKQVMEGRDIKLVINQTAQDCFGCLESISQIRTATRDKKDTVTREKHPKKPFQKWMKKRAIKKGNYLRFQRLFYLDRGKLAKIILDDIECLSCDIPLSEIYSVFKTRWETTGSFKSLGDFKTYGKADNTAFRELITAKEIEKNVQEMSKGSAPGPDGITLGDVVKMDPEFSRTMEIFNLWLTTGKIPDMVRGCRTVLIPKSSKPDRLKDINNWRPITIGSILLRLFSRIVTARLSKACPLNPRQRGFIRAAGCSENLKLLQTIIWSAKREHRPLGVVFVDIAKAFDTVSHQHIIHALQQREVDPHIVGLVSNMYENISTYITTKRNTHTDKIQIRVGVKQGDPMSPLLFNLAMDPLLCKLEESGKGYHRGQSSITAMAFADDLVLLSDSWENMNTNISILETFCNLTGLKTQGQKCHGFYIKPTKKSYTINDCAAWTINGTPLNMIDPGESEKYLGLQFDPWIGIARSGLSTKLDFWLQRIDQAPLKPLQKTDILKTYTIPRLIYIADHSEVKSALLETLDQKIRTAVKEWLHLPPCTCDAILYSSTRDGGLGITKLAGLIPSVQARRLHRIAQSSDDTMKCFMEKEKMEQLHKKLWIQAGGDRENIPSIWEAPPSSEPPNNVSTNSEWEAPTQKDKFPKPCNWRKNEFKKWTKLASQGRGIVNFERDKISNHWIQYYRRIPHRKLLTALQLRANVYPTREFLARGRQDQYIKACRHCDADNESCAHIIGNCPVTQDARIKRHNYICELLLEEAKKKDWVVFKEPHIRDSNKELYKPDLIFVKDGRALVVDVTVRYEAAKSSLEEAAAEKVRKYKHLETEVRHLTNAKDVTFVGFPLGARGKWHQDNFKLLTELGLSKSRQVKMAETFSTVALFSSVDIVHMFASRARKSMVM

SEQ ID NO: 1221 - protein, 1559 aa, synthetic construct
MAPKKKRKVNISGSSCGSPNSADTSSDFKDLWTKLKECHDREVQGLQVKVTKLKQERILDAQRLEEFFTKNQQLREQQKVLHETIKVLEDRLRAGLCDRCAVTEEHMRKKQQEFENIRQQNLKLITELMNERNTLQEENKKLSEQLQQKIENDQQHQAAELECEEDVIPDSPITAFSFSGVNRLRRKENPHVRYIEQTHTKLEHSVCANEMRKVSKSSTHPQHNPNENEILVADTYDQSQSPMAKAHGTSSYTPDKSSFNLATVVAETLGLGVQEESETQGPMSPLGDELYHCLEGNHKKQPFESGSETPGTSESATPEGSYEQLAPQPCVGETLHSSLPRDSELFVPEEGSSEKESEDAPKTSPPTPGKHGLEQTGEEKVMVTVPDKNPPCPCCGTRVNSVLNLIEHLKVSHGKRGVCFRCAKCGKENSNYHSVVCHFKKCRGPETEKAPAGEWICEVCNRDFTTKIGLGQHKRLAHPAVRNQERIVASQPKETSNRGAHKRCWTKEEEELLIRLEAQFEGNKNINKLIAEHITTKTAKQISDKRRLLSRKPAEEPREEPGTCHHTRRAAASLRTEPEMSHHAQAEDRDNGPGRRPLPGRAAAGGRTMDEIRRHPDKGNGQQRPTKQKSEEQLQAYYKKTLEERLSAGALNTFPRAFKQVMEGRDIKLVINQTAQDCFGCLESISQIRTATRDKKDTVTREKHPKKPFQKWMKKRAIKKGNYLRFQRLFYLDRGKLAKIILDDIECLSCDIPLSEIYSVFKTRWETTGSFKSLGDFKTYGKADNTAFRELITAKEIEKNVQEMSKGSAPGPDGITLGDVVKMDPEFSRTMEIFNLWLTTGKIPDMVRGCRTVLIPKSSKPDRLKDINNWRPITIGSILLRLFSRIVTARLSKACPLNPRQRGFIRAAGCSENLKLLQTIIWSAKREHRPLGVVFVDIAKAFDTVSHQHIIHALQQREVDPHIVGLVSNMYENISTYITTKRNTHTDKIQIRVGVKQGDPMSPLLFNLAMDPLLCKLEESGKGYHRGQSSITAMAFADDLVLLSDSWENMNTNISILETFCNLTGLKTQGQKCHGFYIKPTKDSYTINDCAAWTINGTPLNMIDPGESEKYLGLQFDPWIGIARSGLSTKLDFWLQRIDQAPLKPLQKTDILKTYTIPRLIYIADHSEVKSALLETLDQKIRTAVKEWLHLPPCTCDAILYSSTRDGGLGITKLAGLIPSVQARRLHRIAQSSDDTMKCFMEKEKMEQLHKKLWIQAGGDRENIPSIWEAPPSSEPPNNVSTNSEWEAPTQKDKFPKPCNWRKNEFKKWTKLASQGRGIVNFERDKISNHWIQYYRRIPHRKLLTALQLRANVYPTREFLARGRQDQYIKACRHCDADIESCAHIIGNCPVTQDARIKRHNYICELLLEEAKKKDWVVFKEPHIRDSNKELYKPDLIFVKDARALVVDVTVRYEAAKSSLEEAAAEKVRKYKHLETEVRHLTNAKDVTFVGFPLGARGKWHQDNFKLLTELGLSKSRQVKMAETFSTVALFSSVDIVHMFASRARKSMVMRKKRRQRRR

SEQ ID NO: 1222 - protein, 1674 aa, synthetic construct
MAPKKKRKVPKRKVSSAEGAAKEEPKRRSARLSAKPPAKVEAKPKKAAAKDKSSDKKVQTKGKRGAKGKQAEVANQETKEDLPAENGETKTEESPASDEAGEKEAKSDSGSETPGTSESATPESNISGSSCGSPNSADTSSDFKDLWTKLKECHDREVQGLQVKVTKLKQERILDAQRLEEFFTKNQQLREQQKVLHETIKVLEDRLRAGLCDRCAVTEEHMRKKQQEFENIRQQNLKLITELMNERNTLQEENKKLSEQLQQKIENDQQHQAAELECEEDVIPDSPITAFSFSGVNRLRRKENPHVRYIEQTHTKLEHSVCANEMRKVSKSSTHPQHNPNENEILVADTYDQSQSPMAKAHGTSSYTPDKSSFNLATVVAETLGLGVQEESETQGPMSPLGDELYHCLEGNHKKQPFESGSETPGTSESATPEGSYEQLAPQPCVGETLHSSLPRDSELFVPEEGSSEKESEDAPKTSPPTPGKHGLEQTGEEKVMVTVPDKNPPCPCCGTRVNSVLNLIEHLKVSHGKRGVCFRCAKCGKENSNYHSVVCHFKKCRGPETEKAPAGEWICEVCNRDFTTKIGLGQHKRLAHPAVRNQERIVASQPKETSNRGAHKRCWTKEEEELLIRLEAQFEGNKNINKLIAEHITTKTAKQISDKRRLLSRKPAEEPREEPGTCHHTRRAAASLRTEPEMSHHAQAEDRDNGPGRRPLPGRAAAGGRTMDEIRRHPDKGNGQQRPTKQKSEEQLQAYYKKTLEERLSAGALNTFPRAFKQVMEGRDIKLVINQTAQDCFGCLESISQIRTATRDKKDTVTREKHPKKPFQKWMKKRAIKKGNYLRFQRLFYLDRGKLAKIILDDIECLSCDIPLSEIYSVFKTRWETTGSFKSLGDFKTYGKADNTAFRELITAKEIEKNVQEMSKGSAPGPDGITLGDVVKMDPEFSRTMEIFNLWLTTGKIPDMVRGCRTVLIPKSSKPDRLKDINNWRPITIGSILLRLFSRIVTARLSKACPLNPRQRGFIRAAGCSENLKLLQTIIWSAKREHRPLGVVFVDIAKAFDTVSHQHIIHALQQREVDPHIVGLVSNMYENISTYITTKRNTHTDKIQIRVGVKQGDPMSPLLFNLAMDPLLCKLEESGKGYHRGQSSITAMAFADDLVLLSDSWENMNTNISILETFCNLTGLKTQGQKCHGFYIKPTKDSYTINDCAAWTINGTPLNMIDPGESEKYLGLQFDPWIGIARSGLSTKLDFWLQRIDQAPLKPLQKTDILKTYTIPRLIYIADHSEVKTALLETLDQKIRTAVKEWLHLPPCTCDAILYSSTRDGGLGITKLAGLIPSVQARRLHRIAQSSDDTMKCFMEKEKMEQLHKKLWIQAGGDRENIPSIWEAPPSSEPPNNVSTNSEWEAPTQKDKFPKPCNWRKNEFKKWTKLASQGRGIVNFERDKISNHWIQYYRRIPHRKLLTALQLRANVYPTREFLARGRQDQYIKACRHCDADIESCAHIIGNCPVTQDARIKRHNYICELLLEEAKKKDWVVFKEPHIRDSNKELYKPDLIFVKDARALVVDVTVRYEAAKSSLEEAAAEKVRKYKHLETEVRHLTNAKDVTFVGFPLGARGKWHQDNFKLLTELGLSKSRQVKMAETFSTVALFSSVDIVHMFASRARKSMVMRKKRRQRRR

SEQ ID NO: 1223 - protein, 1514 aa, synthetic construct
MPKRKVSSAEGAAKEEPKRRSARLSAKPPAKVEAKPKKAAAKDKSSDKKVQTKGKRGAKGKQAEVANQETKEDLPAENGETKTEESPASDEAGEKEAKSDSGSETPGTSESATPESASCPKPGPPVSAGAMSLESGLTTHSVLAIERGPNSLANSGSDFGGGGLGLPLRLLRVSVGTQTSRSDWVDLVSWSHPGPTSKSQQVDLVSLFPKHRVDLLSKNDQVDLVAQFLPSKFPPNLAENDLALLVNLEFYRSDLHVYECVHFAAHWEGLSGLPEVYEQLAPQPCVGETLHSSLPRDSELFVPEEGSSEKESEDAPKTSPPTPGKHGLEQTGEEKVMVTVPDKNPPCPCCGTRVNSVLNLIEHLKVSHGKRGVCFRCAKCGKENSNYHSVVCHFKKCRGPETEKAPAGEWICEVCNRDFTTKIGLGQHKRLAHPAVRNQERIVASQPKETSNRGAHKRCWTKEEEELLIRLEAQFEGNKNINKLIAEHITTKTAKQISDKRRLLSRKPAEEPREEPGTCHHTRRAAASLRTEPEMSHHAQAEDRDNGPGRRPLPGRAAAGGRTMDEIRRHPDKGNGQQRPTKQKSEEQLQAYYKKTLEERLSAGALNTFPRAFKQVMEGRDIKLVINQTAQDCFGCLESISQIRTATRDKKDTVTREKHPKKPFQKWMKKRAIKKGNYLRFQRLFYLDRGKLAKIILDDIECLSCDIPLSEIYSVFKTRWETTGSFKSLGDFKTYGKADNTAFRELITAKEIEKNVQEMSKGSAPGPDGITLGDVVKMDPEFSRTMEIFNLWLTTGKIPDMVRGCRTVLIPKSSKPDRLKDINNWRPITIGSILLRLFSRIVTARLSKACPLNPRQRGFIRAAGCSENLKLLQTIIWSAKREHRPLGVVFVDIAKAFDTVSHQHIIHALQQREVDPHIVGLVSNMYENISTYITTKRNTHTDKIQIRVGVKQGDPMSPLLFNLAMDPLLCKLEESGKGYHRGQSSITAMAFADDLVLLSDSWENMNTNISILETFCNLTGLKTQGQKCHGFYIKPTKDSYTINDCAAWTINGTPLNMIDPGESEKYLGLQFDPWIGIARSGLSTKLDFWLQRIDQAPLKPLQKTDILKTYTIPRLIYIADHSEVKSALLETLDQKIRTAVKEWLHLPPCTCDAILYSSTRDGGLGITKLAGLIPSVQARRLHRIAQSSDDTMKCFMEKEKMEQLHKKLWIQAGGDRENIPSIWEAPPSSEPPNNVSTNSEWEAPTQKDKFPKPCNWRKNEFKKWTKLASQGRGIVNFERDKISNHWIQYYRRIPHRKLLTALQLRANVYPTREFLARGRQDQYIKACRHCDADIESCAHIIGNCPVTQDARIKRHNYICELLLEEAKKKDWVVFKEPHIRDSNKELYKPDLIFVKDARALVVDVTVRYEAAKSSLEEAAAEKVRKYKHLETEVRHLTNAKDVTFVGFPLGARGKWHQDNFKLLTELGLSKSRQVKMAETFSTVALFSSVDIVHMFASRARKSMVMRKKRRQRRR

SEQ ID NO: 1224 - protein, 1396 aa, synthetic construct
MKKKSKKASCPKPGPPVSAGAMSLESGLTTHSVLAIERGPNSLANSGSDFGGGGLGLPLRLLRVSVGTQTSRSDWVDLVSWSHPGPTSKSQQVDLVSLFPKHRVDLLSKNDQVDLVAQFLPSKFPPNLAENDLALLVNLEFYRSDLHVYECVHKAAHWEGLSGLPEVYEQLAPQPCVGETLHSSLPRDSELFVPEEGSSEKESEDAPKTSPPTPGKHGLEQTGEEKVMVTVPDKNPPCPCCGTRVNSVLNLIEHLKVSHGKRGVCFRCAKCGKENSNYHSVVCHFKKCRGPETEKAPAGEWICEVCNRDFTTKIGLGQHKRLAHPAVRNQERIVASQPKETSNRGAHKRCWTKEEEELLIRLEAQFEGNKNINKLIAEHITTKTAKQISDKRRLLSRKPAEEPRMEPGTCHHTRRAAASLRTEPEMSHHAQAEDRDNGPGRRPLPGRAAAGGRTMDEIRRHPDKGNGQQRPTKQKSEEQLQAYYKKTLEERLSAGALNTFPRAFKQVMEGRDIKLVINQTAQDCFGCLESISQIRTATRDKKDTVTREKHPKKPFQKWMKKRAIKKGNYLRFQRLFYLDRGKLAKIILDDIECLSCDIPLSEIYSVFKTRWETTGSFKSLGDFKTYGKADNTAFRELITAKEIEKNVQEMSKGSAPGPDGITLGDVVKMDPEFSRTMEIFNLWLTTGKIPDMVRGCRTVLIPKSSKPDRLKDINNWRPITIGSILLRLFSRIVTARLSKACPLNPRQRGFIRAAGCSENLKLLQTIIWSAKREHRPLGVVFVDIAKAFDTVSHQHIIHALQQREVDPHIVGLVSNMYENISTYITTKRNTHTDKIQIRVGVKQGDPMSPLLFNLAMDPLLCKLEESGKGYHRGQSSITAMAFADDLVLLSDSWENMNTNISILETFCNLTGLKTQGQKCHGFYIKPTKKSYTINDCAAWTINGTPLNMIDPGESEKYLGLQFDPWIGIARSGLSTKLDFWLQRIDQAPLKPLQKTDILKTYTIPRLIYIADHSEVKSALLETLDQKIRTAVKEWLHLPPCTCDAILYSSTRDGGLGITKLAGLIPSVQARRLHRIAQSSDDTMKCFMEKEKMEQLHKKLWIQAGGDRENIPSIWEAPPSSEPPNNVSTNSEWEAPTQKDKFPKPCNWRKNEFKKWTKLASQGRGIVNFERDKISNHWIQYYRRIPHRKLLTALQLRANVYPTREFLARGRQDQYIKACRHCDADNESCAHIIGNCPVTQDARIKRHNYICELLLEEAKKKDWVVFKEPHIRDSNKELYKPDLIFVKDGRALVVDVTVRYEAAKSSLEEAAAEKVRKYKHLETEVRHLTNAKDVTFVGFPLGARGKWHQDNFKLLTELGLSKSRQVKMAETFSTVALFSSVDIVHMFASRARKSMVM

SEQ ID NO: 1225 - protein, 1550 aa, synthetic construct
MAPKKKRKVNISGSSCGSPNSADTSSDFKDLWTKLKECHDREVQGLQVKVTKLKQERILDAQRLEEFFTKNQQLREQQKVLHETIKVLEDRLRAGLCDRCAVTEEHMRKKQQEFENIRQQNLKLITELMNERNTLQEENKKLSEQLQQKIENDQQHQAAELECEEDVIPDSPITAFSFSGVNRLRRKENPHVRYIEQTHTKLEHSVCANEMRKVSKSSTHPQHNPNENEILVADTYDQSQSPMAKAHGTSSYTPDKSSFNLATVVAETLGLGVQEESETQGPMSPLGDELYHCLEGNHKKQPFESGSETPGTSESATPEGSYEQLAPQPCVGETLHSSLPRDSELFVPEEGSSEKESEDAPKTSPPTPGKHGLEQTGEEKVMVTVPDKNPPCPCCGTRVNSVLNLIEHLKVSHGKRGVCFRCAKCGKENSNYHSVVCHFKKCRGPETEKAPAGEWICEVCNRDFTTKIGLGQHKRLAHPAVRNQERIVASQPKETSNRGAHKRCWTKEEEELLIRLEAQFEGNKNINKLIAEHITTKTAKQISDKRRLLSRKPAEEPREEPGTCHHTRRAAASLRTEPEMSHHAQAEDRDNGPGRRPLPGRAAAGGRTMDEIRRHPDKGNGQQRPTKQKSEEQLQAYYKKTLEERLSAGALNTFPRAFKQVMEGRDIKLVINQTAQDCFGCLESISQIRTATRDKKDTVTREKHPKKPFQKWMKKRAIKKGNYLRFQRLFYLDRGKLAKIILDDIECLSCDIPLSEIYSVFKTRWETTGSFKSLGDFKTYGKADNTAFRELITAKEIEKNVQEMSKGSAPGPDGITLGDVVKMDPEFSRTMEIFNLWLTTGKIPDMVRGCRTVLIPKSTQPDRLKDINNWRPITIGSILLRLFSRIITARMTKACPLNPRQRGFIRAAGCSENLKLLQTIIRSAKSEHRPLGVVFVDIAKAFDTVSHQHILHVLQQRGVDPHIIGLVSNMYKDISTFVTTKKDTHTDKIQIRVGVKQGDPLSPLLFNLAMDPLLCKLEESGNGFHRGGHTITAMAFADDLVLLSDSWENMEKNIEILEAFCDLTGLKTQGQKCHGFYIKPTKDSYTVNNCAAWTIYGTPLNMINPGDSEKYLGLQFDPWIGIARSGLSTKLDFWLQRIDQAPLKPLQKTDILKTYTIPRLIYIADHSEVKSALLETLDQKIRTAVKEWLHLPPCTCDAILYSSTRDGGLGITKLAGLIPSVQARRLHRIAQSSDDTMKCFMEKEKMEQLHKKLWIQAGGDRENIPSIWEAPPSSEPPNNVSTNSEWEAPTQKDKFPKPCNWRKNEFKKWTKLASQGRGIVNFERDKISNHWIQYYRRIPHRKLLTALQLRANVYPTREFLARGRQDQYIKACRHCDADNESCAHIIGNCPVTQDARIKRHNYICELLLEEAKKKDWVVFKEPHIRDSNKELYKPDLIFVKDARALVVDVTVRYEAAKSSLEEAAAEKVRKYKHLETEVRHLTNAKDVTFVGFPLGARGKWHQDNFKLLTELGLSKSRQVKMAETFSTVALFSSVDIVHMFASRARKSMVM

SEQ ID NO: 1226 - protein, 1665 aa, synthetic construct
MAPKKKRKVPKRKVSSAEGAAKEEPKRRSARLSAKPPAKVEAKPKKAAAKDKSSDKKVQTKGKRGAKGKQAEVANQETKEDLPAENGETKTEESPASDEAGEKEAKSDSGSETPGTSESATPESNISGSSCGSPNSADTSSDFKDLWTKLKECHDREVQGLQVKVTKLKQERILDAQRLEEFFTKNQQLREQQKVLHETIKVLEDRLRAGLCDRCAVTEEHMRKKQQEFENIRQQNLKLITELMNERNTLQEENKKLSEQLQQKIENDQQHQAAELECEEDVIPDSPITAFSFSGVNRLRRKENPHVRYIEQTHTKLEHSVCANEMRKVSKSSTHPQHNPNENEILVADTYDQSQSPMAKAHGTSSYTPDKSSFNLATVVAETLGLGVQEESETQGPMSPLGDELYHCLEGNHKKQPFESGSETPGTSESATPEGSYEQLAPQPCVGETLHSSLPRDSELFVPEEGSSEKESEDAPKTSPPTPGKHGLEQTGEEKVMVTVPDKNPPCPCCGTRVNSVLNLIEHLKVSHGKRGVCFRCAKCGKENSNYHSVVCHFKKCRGPETEKAPAGEWICEVCNRDFTTKIGLGQHKRLAHPAVRNQERIVASQPKETSNRGAHKRCWTKEEEELLIRLEAQFEGNKNINKLIAEHITTKTAKQISDKRRLLSRKPAEEPREEPGTCHHTRRAAASLRTEPEMSHHAQAEDRDNGPGRRPLPGRAAAGGRTMDEIRRHPDKGNGQQRPTKQKSEEQLQAYYKKTLEERLSAGALNTFPRAFKQVMEGRDIKLVINQTAQDCFGCLESISQIRTATRDKKDTVTREKHPKKPFQKWMKKRAIKKGNYLRFQRLFYLDRGKLAKIILDDIECLSCDIPLSEIYSVFKTRWETTGSFKSLGDFKTYGKADNTAFRELITAKEIEKNVQEMSKGSAPGPDGITLGDVVKMDPEFSRTMEIFNLWLTTGKIPDMVRGCRTVLIPKSTQPDRLKDINNWRPITIGSILLRLFSRIITARMTKACPLNPRQRGFIRAAGCSENLKLLQTIIRSAKSEHRPLGVVFVDIAKAFDTVSHQHILHVLQQRGVDPHIIGLVSNMYKDISTFVTTKKDTHTDKIQIRVGVKQGDPLSPLLFNLAMDPLLCKLEESGNGFHRGGHTITAMAFADDLVLLSDSWENMEKNIEILEAFCDLTGLKTQGQKCHGFYIKPTKDSYTVNNCAAWTIYGTPLNMINPGDSEKYLGLQFDPWIGIARSGLSTKLDFWLQRIDQAPLKPLQKTDILKTYTIPRLIYIADHSEVKSALLETLDQKIRTAVKEWLHLPPCTCDAILYSSTRDGGLGITKLAGLIPSVQARRLHRIAQSSDDTMKCFMEKEKMEQLHKKLWIQAGGDRENIPSIWEAPPSSEPPNNVSTNSEWEAPTQKDKFPKPCNWRKNEFKKWTKLASQGRGIVNFERDKISNHWIQYYRRIPHRKLLTALQLRANVYPTREFLARGRQDQYIKACRHCDADIESCAHIIGNCPVTQDARIKRHNYICELLLEEAKKKDWVVFKEPHIRDSNKELYKPDLIFVKDARALVVDVTVRYEAAKSSLEEAAAEKVRKYKHLETEVRHLTNAKDVTFVGFPLGARGKWHQDNFKLLTELGLSKSRQVKMAETFSTVALFSSVDIVHMFASRARKSMVM

SEQ ID NO: 1227 - protein, 1322 aa, synthetic construct
MPKRKVSSAEGAAKEEPKRRSARLSAKPPAKVEAKPKKAAAKDKSSDKKVQTKGKRGAKGKQAEVANQETKEDLPAENGETKTEESPASDEAGEKEAKSDSGSETPGTSESATPESLFVPEEGSSEKESEDAPKTSPPTPGKHGLEQTGEEKVMVTVPDKNPPCPCCGTRVNSVLNLIEHLKVSHGKRGVCFRCAKCGKENSNYHSVVCHFKKCRGPETEKAPAGEWICEVCNRDFTTKIGLGQHKRLAHPAVRNQERIVASQPKETSNRGAHKRCWTKEEEELLIRLEAQFEGNKNINKLIAEHITTKTAKQISDKRRLLSRKPAEEPREEPGTCHHTRRAAASLRTEPEMSHHAQAEDRDNGPGRRPLPGRAAAGGRTMDEIRRHPDKGNGQQRPTKQKSEEQLQAYYKKTLEERLSAGALNTFPRAFKQVMEGRDIKLVINQTAQDCFGCLESISQIRTATRDKKDTVTREKHPKKPFQKWMKKRAIKKGNYLRFQRLFYLDRGKLAKIILDDIECLSCDIPLSEIYSVFKTRWETTGSFKSLGDFKTYGKADNTAFRELITAKEIEKNVQEMSKGSAPGPDGITLGDVVKMDPEFSRTMEIFNLWLTTGKIPDMVRGCRTVLIPKSTQPDRLKDINNWRPITIGSILLRLFSRIITARMTKACPLNPRQRGFIRAAGCSENLKLLQTIIRSAKSEHRPLGVVFVDIAKAFDTVSHQHILHVLQQRGVDPHIIGLVSNMYKDISTFVTTKKDTHTDKIQIRVGVKQGDPLSPLLFNLAMDPLLCKLEESGNGFHRGGHTITAMAFADDLVLLSDSWENMEKNIEILEAFCDLTGLKTQGQKCHGFYIKPTKDSYTVNNCAAWTIYGTPLNMINPGDSEKYLGLQFDPWIGIARSGLSTKLDFWLQRIDQAPLKPLQKTDILKTYTIPRLIYIADHSEVKSALLETLDQKIRTAVKEWLHLPPCTCDAILYSSTRDGGLGITKLAGLIPSVQARRLHRIAQSSDDTMKCFMEKEKMEQLHKKLWIQAGGDRENIPSIWEAPPSSEPPNNVSTNSEWEAPTQKDKFPKPCNWRKNEFKKWTKLASQGRGIVNFERDKISNHWIQYYRRIPHRKLLTALQLRANVYPTREFLARGRQDQYIKACRHCDADIESCAHIIGNCPVTQDARIKRHNYICELLLEEAKKKDWVVFKEPHIRDSNKELYKPDLIFVKDARALVVDVTVRYEAAKSSLEEAAAEKVRKYKHLETEVRHLTNAKDVTFVGFPLGARGKWHQDNFKLLTELGLSKSRQVKMAETFSTVALFSSVDIVHMFASRARKSMVM

SEQ ID NO: 1228 - protein, 1642 aa, synthetic construct
MAPKKKRKVNISGSSCGSPNSADTSSDFKDLWTKLKECHDREVQGLQVKVTKLKQERILDAQRLEEFFTKNQQLREQQKVLHETIKVLEDRLRAGLCDRCAVTEEHMRKKQQEFENIRQQNLKLITELMNERNTLQEENKKLSEQLQQKIENDQQHQAAELECEEDVIPDSPITAFSFSGVNRLRRKENPHVRYIEQTHTKLEHSVCANEMRKVSKSSTHPQHNPNENEILVADTYDQSQSPMAKAHGTSSYTPDKSSFNLATVVAETLGLGVQEESETQGPMSPLGDELYHCLEGNHKKQPFESGSETPGTSESATPEGSPKRKVSSAEGAAKEEPKRRSARLSAKPPAKVEAKPKKAAAKDKSSDKKVQTKGKRGAKGKQAEVANQETKEDLPAENGETKTEESPASDEAGEKEAKSDSGSETPGTSESATPESLFVPEEGSSEKESEDAPKTSPPTPGKHGLEQTGEEKVMVTVPDKNPPCPCCGTRVNSVLNLIEHLKVSHGKRGVCFRCAKCGKENSNYHSVVCHFKKCRGPETEKAPAGEWICEVCNRDFTTKIGLGQHKRLAHPAVRNQERIVASQPKETSNRGAHKRCWTKEEEELLIRLEAQFEGNKNINKLIAEHITTKTAKQISDKRRLLSRKPAEEPREEPGTCHHTRRAAASLRTEPEMSHHAQAEDRDNGPGRRPLPGRAAAGGRTMDEIRRHPDKGNGQQRPTKQKSEEQLQAYYKKTLEERLSAGALNTFPRAFKQVMEGRDIKLVINQTAQDCFGCLESISQIRTATRDKKDTVTREKHPKKPFQKWMKKRAIKKGNYLRFQRLFYLDRGKLAKIILDDIECLSCDIPLSEIYSVFKTRWETTGSFKSLGDFKTYGKADNTAFRELITAKEIEKNVQEMSKGSAPGPDGITLGDVVKMDPEFSRTMEIFNLWLTTGKIPDMVRGCRTVLIPKSTQPDRLKDINNWRPITIGSILLRLFSRIITARMTKACPLNPRQRGFIRAAGCSENLKLLQTIIRSAKSEHRPLGVVFVDIAKAFDTVSHQHILHVLQQRGVDPHIIGLVSNMYKDISTFVTTKKDTHTDKIQIRVGVKQGDPLSPLLFNLAMDPLLCKLEESGNGFHRGGHTITAMAFADDLVLLSDSWENMEKNIEILEAFCDLTGLKTQGQKCHGFYIKPTKDSYTVNNCAAWTIYGTPLNMINPGDSEKYLGLQFDPWIGIARSGLSTKLDFWLQRIDQAPLKPLQKTDILKTYTIPRLIYIADHSEVKTALLETLDQKIRTAVKEWLHLPPCTCDAILYSSTRDGGLGITKLAGLIPSVQARRLHRIAQSSDDTMKCFMEKEKMEQLHKKLWIQAGGDRENIPSIWEAPPSSEPPNNVSTNSEWEAPTQKDKFPKPCNWRKNEFKKWTKLASQGRGIVNFERDKISNHWIQYYRRIPHRKLLTALQLRANVYPTREFLARGRQDQYIKACRHCDADIESCAHIIGNCPVTQDARIKRHNYICELLLEEAKKKDWVVFKEPHIRDSNKELYKPDLIFVKDARALVVDVTVRYEAAKSSLEEAAAEKVRKYKHLETEVRHLTNAKDVTFVGFPLGARGKWHQDNFKLLTELGLSKSRQVKMAETFSTVALFSSVDIVHMFASRARKSMVM

SEQ ID NO: 1229 - protein, 1541 aa, synthetic construct
MASCPKPGPPVSAGAMSLESGLTTHSVLAIERGPNSLANSGSDFGGGGLGLPLRLLRVSVGTQTSRSDWVDLVSWSHPGPTSKSQQVDLVSLFPKHRVDLLSKNDQVDLVAQFLPSKFPPNLAENDLALLVNLEFYRSDLHVYECVHKAAHWEGLSGLPEVYEQLAPQPCVGETLHSSLPRDSELFVPEEGSSEKESEDAPKTSPPTPGKHGLEQTGEEKVMVTVPDKNPPCPCCGTRVNSVLNLIEHLKVSHGKRGVCFRCAKCGKENSNYHSVVCHFKKCRGPETEKAPAGEWICEVCNRDFTTKIGLGQHKRLAHPAVRNQERIVASQPKETSNRGAHKRCWTKEEEELLIRLEAQFEGNKNINKLIAEHITTKTAKQISDKRRLLSRKPAEEPREEPGTCHHTRRAAASLRTEPEMSHHAQAEDRDNGPGRRPLPGRAAAGGRTMDEIRRHPDKGNGQQRPTKQKSEEQLQAYYKKTLEERLSAGALNTFPRAFKQVMEGRDIKLVINQTAQDCFGCLESISQIRTATRDKKDTVTREKHPKKPFQKWMKKRAIKKGNYLRFQRLFYLDRGKLAKIILDDIECLSCDIPLSEIYSVFKTRWETTGSFKSLGDFKTYGKADNTAFRELITAKEIEKNVQEMSKGSAPGPDGITLGDVVKMDPEFSRTMEIFNLWLTTGKIPDMVRGCRTVLIDTSNLMEQILSSDNLNRAYLQVVRNKGAEGVDGMKYTELKEHLAKNGETIKGQLRTAAYKPQPARRVEIPKPDGGVRNLGVPTVTDRFIQQAIAQVLTPIYEEQFHDHSYGFRPNRCAQQAILTALNIMNDGNDWIVDIDLEKFFDTVNHDKLMTLIGRTIADGDVISIVRKYLVSGIMIDDEYEDSIVGTPQGGNLSPLLANIMLNELDKEMEAAGLNFVRYADDCIIMVGSEMSANRVMRNISRFIEEKLGLKVNMTKSKVDRPSGLKYLGFGFYFDPRAHQFKAKPHAKSVAKFKKRMKELTCRSWGVSNSYKVEKLNQLIRGWINYFKIGSMKTLCKELDSRIRYRLRMCIWKQWKTPQNQEKNLVKLGIDRNTARRVAYTGKRIAYVCNKGAVNVAISNKRLASFQFDPWIGIARSGLSTKLDFWLQRIDQAPLKPLQKTDILKTYTIPRLIYIADHSEVKSALLETLDQKIRTAVKEWLHLPPCTCDAILYSSTRDGGLGITKLAGLIPSVQARRLHRIAQSSDDTMKCFMEKEKMEQLHKKLWIQAGGDRENIPSIWEAPPSSEPPNNVSTNSEWEAPTQKDKFPKPCNWRKNEFKKWTKLASQGRGIVNFERDKISNHWIQYYRRIPHRKLLTALQLRANVYPTREFLARGRQDQYIKACRHCDADIESCAHIIGNCPVTQDARIKRHNYICELLLEEAKKKDWVVFKEPHIRDSNKELYKPDLIFVKDARALVVDVTVRYEAAKSSLEEAAAEKVRKYKHLETEVRHLTNAKDVTFVGFPLGARGKWHQDNFKLLTELGLSKSRQVKMAETFSTVALFSSVDIVHMFASRARKSMVM

SEQ ID NO: 1230 - protein, 1701 aa, synthetic construct
MAPKKKRKVNISGSSCGSPNSADTSSDFKDLWTKLKECHDREVQGLQVKVTKLKQERILDAQRLEEFFTKNQQLREQQKVLHETIKVLEDRLRAGLCDRCAVTEEHMRKKQQEFENIRQQNLKLITELMNERNTLQEENKKLSEQLQQKIENDQQHQAAELECEEDVIPDSPITAFSFSGVNRLRRKENPHVRYIEQTHTKLEHSVCANEMRKVSKSSTHPQHNPNENEILVADTYDQSQSPMAKAHGTSSYTPDKSSFNLATVVAETLGLGVQEESETQGPMSPLGDELYHCLEGNHKKQPFESGSETPGTSESATPEGSYEQLAPQPCVGETLHSSLPRDSELFVPEEGSSEKESEDAPKTSPPTPGKHGLEQTGEEKVMVTVPDKNPPCPCCGTRVNSVLNLIEHLKVSHGKRGVCFRCAKCGKENSNYHSVVCHFKKCRGPETEKAPAGEWICEVCNRDFTTKIGLGQHKRLAHPAVRNQERIVASQPKETSNRGAHKRCWTKEEEELLIRLEAQFEGNKNINKLIAEHITTKTAKQISDKRRLLSRKPAEEPREEPGTCHHTRRAAASLRTEPEMSHHAQAEDRDNGPGRRPLPGRAAAGGRTMDEIRRHPDKGNGQQRPTKQKSEEQLQAYYKKTLEERLSAGALNTFPRAFKQVMEGRDIKLVINQTAQDCFGCLESISQIRTATRDKKDTVTREKHPKKPFQKWMKKRAIKKGNYLRFQRLFYLDRGKLAKIILDDIECLSCDIPLSEIYSVFKTRWETTGSFKSLGDFKTYGKADNTAFRELITAKEIEKNVQEMSKGSAPGPDGITLGDVVKMDPEFSRTMEIFNLWLTTGKIPDMVRGCRTVLIDTSNLMEQILSSDNLNRAYLQVVRNKGAEGVDGMKYTELKEHLAKNGETIKGQLRTAAYKPQPARRVEIPKPDGGVRNLGVPTVTDRFIQQAIAQVLTPIYEEQFHDHSYGFRPNRCAQQAILTALNIMNDGNDWIVDIDLEKFFDTVNHDKLMTLIGRTIADGDVISIVRKYLVSGIMIDDEYEDSIVGTPQGGNLSPLLANIMLNELDKEMEAAGLNFVRYADDCIIMVGSEMSANRVMRNISRFIEEKLGLKVNMTKSKVDRPSGLKYLGFGFYFDPRAHQFKAKPHAKSVAKFKKRMKELTCRSWGVSNSYKVEKLNQLIRGWINYFKIGSMKTLCKELDSRIRYRLRMCIWKQWKTPQNQEKNLVKLGIDRNTARRVAYTGKRIAYVCNKGAVNVAISNKRLASFQFDPWIGIARSGLSTKLDFWLQRIDQAPLKPLQKTDILKTYTIPRLIYIADHSEVKSALLETLDQKIRTAVKEWLHLPPCTCDAILYSSTRDGGLGITKLAGLIPSVQARRLHRIAQSSDDTMKCFMEKEKMEQLHKKLWIQAGGDRENIPSIWEAPPSSEPPNNVSTNSEWEAPTQKDKFPKPCNWRKNEFKKWTKLASQGRGIVNFERDKISNHWIQYYRRIPHRKLLTALQLRANVYPTREFLARGRQDQYIKACRHCDADIESCAHIIGNCPVTQDARIKRHNYICELLLEEAKKKDWVVFKEPHIRDSNKELYKPDLIFVKDARALVVDVTVRYEAAKSSLEEAAAEKVRKYKHLETEVRHLTNAKDVTFVGFPLGARGKWHQDNFKLLTELGLSKSRQVKMAETFSTVALFSSVDIVHMFASRARKSMVM

SEQ ID NO: 1231 - protein, 1473 aa, synthetic construct
MPKRKVSSAEGAAKEEPKRRSARLSAKPPAKVEAKPKKAAAKDKSSDKKVQTKGKRGAKGKQAEVANQETKEDLPAENGETKTEESPASDEAGEKEAKSDSGSETPGTSESATPESLFVPEEGSSEKESEDAPKTSPPTPGKHGLEQTGEEKVMVTVPDKNPPCPCCGTRVNSVLNLIEHLKVSHGKRGVCFRCAKCGKENSNYHSVVCHFKKCRGPETEKAPAGEWICEVCNRDFTTKIGLGQHKRLAHPAVRNQERIVASQPKETSNRGAHKRCWTKEEEELLIRLEAQFEGNKNINKLIAEHITTKTAKQISDKRRLLSRKPAEEPREEPGTCHHTRRAAASLRTEPEMSHHAQAEDRDNGPGRRPLPGRAAAGGRTMDEIRRHPDKGNGQQRPTKQKSEEQLQAYYKKTLEERLSAGALNTFPRAFKQVMEGRDIKLVINQTAQDCFGCLESISQIRTATRDKKDTVTREKHPKKPFQKWMKKRAIKKGNYLRFQRLFYLDRGKLAKIILDDIECLSCDIPLSEIYSVFKTRWETTGSFKSLGDFKTYGKADNTAFRELITAKEIEKNVQEMSKGSAPGPDGITLGDVVKMDPEFSRTMEIFNLWLTTGKIPDMVRGCRTVLIDTSNLMEQILSSDNLNRAYLQVVRNKGAEGVDGMKYTELKEHLAKNGETIKGQLRTAAYKPQPARRVEIPKPDGGVRNLGVPTVTDRFIQQAIAQVLTPIYEEQFHDHSYGFRPNRCAQQAILTALNIMNDGNDWIVDIDLEKFFDTVNHDKLMTLIGRTIADGDVISIVRKYLVSGIMIDDEYEDSIVGTPQGGNLSPLLANIMLNELDKEMEAAGLNFVRYADDCIIMVGSEMSANRVMRNISRFIEEKLGLKVNMTKSKVDRPSGLKYLGFGFYFDPRAHQFKAKPHAKSVAKFKKRMKELTCRSWGVSNSYKVEKLNQLIRGWINYFKIGSMKTLCKELDSRIRYRLRMCIWKQWKTPQNQEKNLVKLGIDRNTARRVAYTGKRIAYVCNKGAVNVAISNKRLASFQFDPWIGIARSGLSTKLDFWLQRIDQAPLKPLQKTDILKTYTIPRLIYIADHSEVKTALLETLDQKIRTAVKEWLHLPPCTCDAILYSSTRDGGLGITKLAGLIPSVQARRLHRIAQSSDDTMKCFMEKEKMEQLHKKLWIQAGGDRENIPSIWEAPPSSEPPNNVSTNSEWEAPTQKDKFPKPCNWRKNEFKKWTKLASQGRGIVNFERDKISNHWIQYYRRIPHRKLLTALQLRANVYPTREFLARGRQDQYIKACRHCDADIESCAHIIGNCPVTQDARIKRHNYICELLLEEAKKKDWVVFKEPHIRDSNKELYKPDLIFVKDARALVVDVTVRYEAAKSSLEEAAAEKVRKYKHLETEVRHLTNAKDVTFVGFPLGARGKWHQDNFKLLTELGLSKSRQVKMAETFSTVALFSSVDIVHMFASRARKSMVM

SEQ ID NO: 1232 - protein, 1399 aa, synthetic construct
MASCPKPGPPVSAGAMSLESGLTTHSVLAIERGPNSLANSGSDFGGGGLGLPLRLLRVSVGTQTSRSDWVDLVSWSHPGPTSKSQQVDLVSLFPKHRVDLLSKNDQVDLVAQFLPSKFPPNLAENDLALLVNLEFYRSDLHVYECVHKAAHWEGLSGLPEVYEQLAPQPCVGETLHSSLPRDSELFVPEEGSSEKESEDAPKTSPPTPGKHGLEQTGEEKVMVTVPDKNPPCPCCGTRVNSVLNLIEHLKVSHGKRGVCFRCAKCGKENSNYHSVVCHFKKCRGPETEKAPAGEWICEVCNRDFTTKIGLGQHKRLAHPAVRNQERIVASQPKETSNRGAHKRCWTKEEEELLIRLEAQFEGNKNINKLIAEHITTKTAKQISDKRRLLSRKPAEEPREEPGTCHHTRRAAASLRTEPEMSHHAQAEDRDNGPGRRPLPGRAAAGGRTMDEIRRHPDKGNGQQRPTKQKSEEQLQAYYKKTLEERLSAGALNTFPRAFKQVMEGRDIKLVINQTAQDCFGCLESISQIRTATRDKKDTVTREKHPKKPFQKWMKKRAIKKGNYLRFQRLFYLDRGKLAKIILDDIECLSCDIPLSEIYSVFKTRWETTGSFKSLGDFKTYGKADNTAFRELITAKEIEKNVQEMSKGSAPGPDGITLGDVVKMDPEFSRTMEIFNLWLTTGKIPDMVRGCRTVLIPKSSKPDRLKDINNWRPITIGSILLRLFSRIVTARLSKACPLNPRQRGFIRAAGCSENLKLLQTIIWSAKREHRPLGVVFVDIAKAFDTVSHQHIIHALQQREVDPHIVGLVSNMYENISTYITTKRNTHTDKIQIRVGVKQGDPMSPLLFNLAMDPLLCKLEESGKGYHRGQSSITAMAFADDLVLLSDSWENMNTNISILETFCNLTGLKTQGQKCHGFYIKPTKDSYTINDCAAWTINGTPLNMIDPGESEKYLGLQFDPWIGIARSGLSTKLDFWLQRIDQAPLKPLQKTDILKTYTIPRLIYIADHSEVKSALLETLDQKIRTAVKEWLHLPPCTCDAILYSSTRDGGLGITKLAGLIPSVQARRLHRIAQSSDDTMKCFMEKEKMEQLHKKLWIQAGGDRENIPSIWEAPPSSEPPNNVSTNSEWEAPTQKDKFPKPCNWRKNEFKKWTKLASQGRGIVNFERDKISNHWIQYYRRIPHRKLLTALQLRANVYPTREFLARGRQDQYIKACRHCDADIESCAHIIGNCPVTQDARIKRHNYICELLLEEAKKKDWVVFKEPHIRDSNKELYKPDLIFVKDARALVVDVTVRYEAAKSSLEEAAAEKVRKYKHLETEVRHLTNAKDVTFVGFPLGARGKWHQDNFKLLTELGLSKSRQVKMAETFSTVALFSSVDIVHMFASRARKSMVMRKKRRQRRR

SEQ ID NO: 1233 - protein, 1665 aa, synthetic construct
MAPKKKRKVNISGSSCGSPNSADTSSDFKDLWTKLKECHDREVQGLQVKVTKLKQERILDAQRLEEFFTKNQQLREQQKVLHETIKVLEDRLRAGLCDRCAVTEEHMRKKQQEFENIRQQNLKLITELMNERNTLQEENKKLSEQLQQKIENDQQHQAAELECEEDVIPDSPITAFSFSGVNRLRRKENPHVRYIEQTHTKLEHSVCANEMRKVSKSSTHPQHNPNENEILVADTYDQSQSPMAKAHGTSSYTPDKSSFNLATVVAETLGLGVQEESETQGPMSPLGDELYHCLEGNHKKQPFESGSETPGTSESATPEGSPKRKVSSAEGAAKEEPKRRSARLSAKPPAKVEAKPKKAAAKDKSSDKKVQTKGKRGAKGKQAEVANQETKEDLPAENGETKTEESPASDEAGEKEAKSDSGSETPGTSESATPESYEQLAPQPCVGETLHSSLPRDSELFVPEEGSSEKESEDAPKTSPPTPGKHGLEQTGEEKVMVTVPDKNPPCPCCGTRVNSVLNLIEHLKVSHGKRGVCFRCAKCGKENSNYHSVVCHFKKCRGPETEKAPAGEWICEVCNRDFTTKIGLGQHKRLAHPAVRNQERIVASQPKETSNRGAHKRCWTKEEEELLIRLEAQFEGNKNINKLIAEHITTKTAKQISDKRRLLSRKPAEEPREEPGTCHHTRRAAASLRTEPEMSHHAQAEDRDNGPGRRPLPGRAAAGGRTMDEIRRHPDKGNGQQRPTKQKSEEQLQAYYKKTLEERLSAGALNTFPRAFKQVMEGRDIKLVINQTAQDCFGCLESISQIRTATRDKKDTVTREKHPKKPFQKWMKKRAIKKGNYLRFQRLFYLDRGKLAKIILDDIECLSCDIPLSEIYSVFKTRWETTGSFKSLGDFKTYGKADNTAFRELITAKEIEKNVQEMSKGSAPGPDGITLGDVVKMDPEFSRTMEIFNLWLTTGKLPDMVRGCRTVLIPKSSKPDRLKDINNWRPITIGSILLRLFSRIVTARLSKACPLNPRQRGFIRAAGCSENLKLLQTIIWSAKREHRPLGVVFVDIAKAFDTVSHQHIIHALQQREVDPHIVGLVSNMYENISTYITTKRNTHTDKIQIRVGVKQGDPMSPLLFNLAMDPLLCKLEESGKGYHRGQSSITAMAFADDLVLLSDSWENMNTNISILETFCNLTGLKTQGQKCHGFYIKPTKDSYTINDCAAWTINGTPLNMIDPGESEKYLGLQFDPWIGIARSGLSTKLDFWLQRIDQAPLKPLQKTDILKTYTIPRLIYIADHSEVKSALLETLDQKIRTAVKEWLHLPPCTCDAILYSSTRDGGLGITKLAGLIPSVQARRLHRIAQSSDDTMKCFMEKEKMEQLHKKLWIQAGGDRENIPSIWEAPPSSEPPNNVSTNSEWEAPTQKDKFPKPCNWRKNEFKKWTKLASQGRGIVNFERDKISNHWIQYYRRIPHRKLLTALQLRANVYPTREFLARGRQDQYIKACRHCDADNESCAHIIGNCPVTQDARIKRHNYICELLLEEAKKKDWVVFKEPHIRDSNKELYKPDLIFVKDGRALVVDVTVRYEAAKSSLEEAAAEKVRKYKHLETEVRHLTNAKDVTFVGFPLGARGKWHQDNFKLLTELGLSKSRQVKMAETFSTVALFSSVDIVHMFASRARKSMVM

SEQ ID NO: 1234 - protein, 1482 aa, synthetic construct
MAPKKKRKVWKPGDECFALYWEDNKFYRAEVEALHSSGMTAVVKFIDYGNYEEVLLSNIKPIQTEAWEESGSETPGTSESATPEGSVTVKFKYKGEEKEVDISKIKKVWRVGKMISFTYDDNGKTGRGAVSEKDAPKELLQMLEKSGSETPGTSESATPESPKRKVSSAEGAAKEEPKRRSARLSAKPPAKVEAKPKKAAAKDKSSDKKVQTKGKRGAKGKQAEVANQETKEDLPAENGETKTEESPASDEAGEKEAKSDSGSETPGTSESATPESLFVPEEGSSEKESEDAPKTSPPTPGKHGLEQTGEEKVMVTVPDKNPPCPCCGTRVNSVLNLIEHLKVSHGKRGVCFRCAKCGKENSNYHSVVCHFKKCRGPETEKAPAGEWICEVCNRDFTTKIGLGQHKRLAHPAVRNQERIVASQPKETSNRGAHKRCWTKEEEELLIRLEAQFEGNKNINKLIAEHITTKTAKQISDKRRLLSRKPAEEPREEPGTCHHTRRAAASLRTEPEMSHHAQAEDRDNGPGRRPLPGRAAAGGRTMDEIRRHPDKGNGQQRPTKQKSEEQLQAYYKKTLEERLSAGALNTFPRAFKQVMEGRDIKLVINQTAQDCFGCLESISQIRTATRDKKDTVTREKHPKKPFQKWMKKRAIKKGNYLRFQRLFYLDRGKLAKIILDDIECLSCDIPLSEIYSVFKTRWETTGSFKSLGDFKTYGKADNTAFRELITAKEIEKNVQEMSKGSAPGPDGITLGDVVKMDPEFSRTMEIFNLWLTTGKIPDMVRGCRTVLIPKSSKPDRLKDINNWRPITIGSILLRLFSRIVTARLSKACPLNPRQRGFIRAAGCSENLKLLQTIIWSAKREHRPLGVVFVDIAKAFDTVSHQHIIHALQQREVDPHIVGLVSNMYENISTYITTKRNTHTDKIQIRVGVKQGDPMSPLLFNLAMDPLLCKLEESGKGYHRGQSSITAMAFADDLVLLSDSWENMNTNISILETFCNLTGLKTQGQKCHGFYIKPTKDSYTINDCAAWTINGTPLNMIDPGESEKYLGLQFDPWIGIARSGLSTKLDFWLQRIDQAPLKPLQKTDILKTYTIPRLIYIADHSEVKSALLETLDQKIRTAVKEWLHLPPCTCDAILYSSTRDGGLGITKLAGLIPSVQARRLHRIAQSSDDTMKCFMEKEKMEQLHKKLWIQAGGDRENIPSIWEAPPSSEPPNNVSTNSEWEAPTQKDKFPKPCNWRKNEFKKWTKLASQGRGIVNFERDKISNHWIQYYRRIPHRKLLTALQLRANVYPTREFLARGRQDQYIKACRHCDADNESCAHIIGNCPVTQDARIKRHNYICELLLEEAKKKDWVVFKEPHIRDSNKELYKPDLIFVKDGRALVVDVTVRYEAAKSSLEEAAAEKVRKYKHLETEVRHLTNAKDVTFVGFPLGARGKWHQDNFKLLTELGLSKSRQVKMAETFSTVALFSSVDIVHMFASRARKSMVM

SEQ ID NO: 1235 - protein, 1411 aa, synthetic construct
MAPAAKRVKLDSGGSVTVKFKYKGEEKEVDISKIKKVWRVGKMISFTYDDNGKTGRGAVSEKDAPKELLQMLEKSGSETPGTSESATPESPKRKVSSAEGAAKEEPKRRSARLSAKPPAKVEAKPKKAAAKDKSSDKKVQTKGKRGAKGKQAEVANQETKEDLPAENGETKTEESPASDEAGEKEAKSDSGSETPGTSESATPESLFVPEEGSSEKESEDAPKTSPPTPGKHGLEQTGEEKVMVTVPDKNPPCPCCGTRVNSVLNLIEHLKVSHGKRGVCFRCAKCGKENSNYHSVVCHFKKCRGPETEKAPAGEWICEVCNRDFTTKIGLGQHKRLAHPAVRNQERIVASQPKETSNRGAHKRCWTKEEEELLIRLEAQFEGNKNINKLIAEHITTKTAKQISDKRRLLSRKPAEEPREEPGTCHHTRRAAASLRTEPEMSHHAQAEDRDNGPGRRPLPGRAAAGGRTMDEIRRHPDKGNGQQRPTKQKSEEQLQAYYKKTLEERLSAGALNTFPRAFKQVMEGRDIKLVINQTAQDCFGCLESISQIRTATRDKKDTVTREKHPKKPFQKWMKKRAIKKGNYLRFQRLFYLDRGKLAKIILDDIECLSCDIPLSEIYSVFKTRWETTGSFKSLGDFKTYGKADNTAFRELITAKEIEKNVQEMSKGSAPGPDGITLGDVVKMDPEFSRTMEIFNLWLTTGKIPDMVRGCRTVLIPKSSKPDRLKDINNWRPITIGSILLRLFSRIVTARLSKACPLNPRQRGFIRAAGCSENLKLLQTIIWSAKREHRPLGVVFVDIAKAFDTVSHQHIIHALQQREVDPHIVGLVSNMYENISTYITTKRNTHTDKIQIRVGVKQGDPMSPLLFNLAMDPLLCKLEESGKGYHRGQSSITAMAFADDLVLLSDSWENMNTNISILETFCNLTGLKTQGQKCHGFYIKPTKDSYTINDCAAWTINGTPLNMIDPGESEKYLGLQFDPWIGIARSGLSTKLDFWLQRIDQAPLKPLQKTDILKTYTIPRLIYIADHSEVKSALLETLDQKIRTAVKEWLHLPPCTCDAILYSSTRDGGLGITKLAGLIPSVQARRLHRIAQSSDDTMKCFMEKEKMEQLHKKLWIQAGGDRENIPSIWEAPPSSEPPNNVSTNSEWEAPTQKDKFPKPCNWRKNEFKKWTKLASQGRGIVNFERDKISNHWIQYYRRIPHRKLLTALQLRANVYPTREFLARGRQDQYIKACRHCDADNESCAHIIGNCPVTQDARIKRHNYICELLLEEAKKKDWVVFKEPHIRDSNKELYKPDLIFVKDGRALVVDVTVRYEAAKSSLEEAAAEKVRKYKHLETEVRHLTNAKDVTFVGFPLGARGKWHQDNFKLLTELGLSKSRQVKMAETFSTVALFSSVDIVHMFASRARKSMVM

SEQ ID NO: 1236 - protein, 1405 aa, synthetic construct; identical to SEQ ID NO: 633

SEQ ID NO: 1237-1239 - skipped (3 entries)

SEQ ID NO: 1240 - protein, 1665 aa, synthetic construct
MAPKKKRKVNISGSSCGSPNSADTSSDFKDLWTKLKECHDREVQGLQVKVTKLKQERILDAQRLEEFFTKNQQLREQQKVLHETIKVLEDRLRAGLCDRCAVTEEHMRKKQQEFENIRQQNLKLITELMNERNTLQEENKKLSEQLQQKIENDQQHQAAELECEEDVIPDSPITAFSFSGVNRLRRKENPHVRYIEQTHTKLEHSVCANEMRKVSKSSTHPQHNPNENEILVADTYDQSQSPMAKAHGTSSYTPDKSSFNLATVVAETLGLGVQEESETQGPMSPLGDELYHCLEGNHKKQPFESGSETPGTSESATPEGSPKRKVSSAEGAAKEEPKRRSARLSAKPPAKVEAKPKKAAAKDKSSDKKVQTKGKRGAKGKQAEVANQETKEDLPAENGETKTEESPASDEAGEKEAKSDSGSETPGTSESATPESYEQLAPQPCVGETLHSSLPRDSELFVPEEGSSEKESEDAPKTSPPTPGKHGLEQTGEEKVMVTVPDKNPPCPCCGTRVNSVLNLIEHLKVSHGKRGVCFRCAKCGKENSNYHSVVCHYKKCRGPETEKAPAGEWICEVCNRDFTTKIGLGQHKRLAHPAVRNQERIVASQPKETSNRGAHKRCWTKEEEELLIRLEAQFEGNKNINKLIAEHITTKTAKQISDKRRLLSRKPAEEPREEPGTCHHTRRAAASLRTEPEMSHHAQAEDRDNGPGRRPLPGRAAAGGRTMDEIRRHPDKGNGQQRPTKQKSEEQLQAYYKKTLEERLSAGALNTFPRAFKQVMEGRDIKLVINQTAQDCFGCLESISQIRTATRDKKDTVTREKHPKKPFQKWMKKRAIKKGNYLRFQRLFYLDRGKLAKIILDDIECLSCDIPLSEIYSVFKTRWETTGSFKSLGDFKTYGKADNTAFRELITAKEIEKNVQEMSKGSAPGPDGITLGDVVKMDPEFSRTMEIFNLWLTTGKIPDMVRGCRTVLIPKSSKPDRLKDINNWRPITIGSILLRLFSRIVTARLSKACPLNPRQRGFIRAAGCSENLKLLQTIIWSAKREHRPLGVVFVDIAKAFDTVSHQHIIHALQQREVDPHIVGLVSNMYENISTYITTKRNTHTDKIQIRVGVKQGDPMSPLLFNLAMDPLLCKLEESGKGYHRGQSSITAMAFADDLVLLSDSWENMNTNISILETFCNLTGLKTQGQKCHGFYIKPTKKSYTINDCAAWTINGTPLNMIDPGESEKYLGLQFDPWIGIARSGLSTKLDFWLQRIDQAPLKPLQKTDILKTYTIPRLIYIADHSEVKSALLETLDQKIRTAVKEWLHLPPCTCDAILYSSTRDGGLGITKLAGLIPSVQARRLHRIAQSSDDTMKCFMEKEKMEQLHKKLWIQAGGDRENIPSIWEAPPSSEPPNNVSTNSEWEAPTQKDKFPKPCNWRKNEFKKWTKLASQGRGIVNFERDKISNHWIQYYRRIPHRKLLTALQLRANVYPTREFLARGRQDQYIKACRHCDADNESCAHIIGNCPVTQDARIKRHNYICELLLEEAKKKDWVVFKEPHIRDSNKELYKPDLIFVKDGRALVVDVTVRYEAAKSSLEEAAAEKVRKYKHLETEVRHLTNAKDVTFVGFPLGARGKWHQDNFKLLTELGLSKSRQVKMAETFSTVALFSSVDIVHMFASRARKSMVM

SEQ ID NO: 1241-1242 - skipped (2 entries)

SEQ ID NO: 1243 - protein, 1854 aa, synthetic construct
MAPKKKRKVNISGSSCGSPNSADTSSDFKDLWTKLKECHDREVQGLQVKVTKLKQERILDAQRLEEFFTKNQQLREQQKVLHETIKVLEDRLRAGLCDRCAVTEEHMRKKQQEFENIRQQNLKLITELMNERNTLQEENKKLSEQLQQKIENDQQHQAAELECEEDVIPDSPITAFSFSGVNRLRRKENPHVRYIEQTHTKLEHSVCANEMRKVSKSSTHPQHNPNENEILVADTYDQSQSPMAKAHGTSSYTPDKSSFNLATVVAETLGLGVQEESETQGPMSPLGDELYHCLEGNHKKQPFESGSETPGTSESATPEGSPKRKVSSAEGAAKEEPKRRSARLSAKPPAKVEAKPKKAAAKDKSSDKKVQTKGKRGAKGKQAEVANQETKEDLPAENGETKTEESPASDEAGEKEAKSDSGSETPGTSESATPESYEQLAPQPCVGETLHSSLPRDSELFVPEEGSSEKESEDAPKTSPPTPGKHGLEQTGEEKVMVTVPDKNPPCPCCGTRVNSVLNLIEHLKVSHGKRGVCFRCAKCGKENSNYHSVVCHFKKCRGPETEKAPAGEWICEVCNRDFTTKIGLGQHKRLAHPAVRNQERIVASQPKETSNRGAHKRCWTKEEEELLIRLEAQFEGNKNINKLIAEHITTKTAKQISDKRRLLSRKPAEEPREEPGTCHHTRRAAASLRTEPEMSHHAQAEDRDNGPGRRPLPGRAAAGGRTMDEIRRHPDKGNGQQRPTKQKSEEQLQAYYKKTLEERLSAGALNTFPRAFKQVMEGRDIKLVINQTAQDCFGCLESISQIRTATRDKKDTVTREKHPKKPFQKWMKKRAIKKGNYLRFQRLFYLDRGKLAKIILDDIECLSCDIPLSEIYSVFKTRWETTGSFKSLGDFKTYGKADNTAFRELITAKEIEKNVQEMSKGSAPGPDGITLGDVVKMDPEFSRTMEIFNLWLTTGKIPDMVRGCRTVLIPKSSKPDRLKDINNWRPITIGSILLRLFSRIVTARLSKACPLNPRQRGFIRAAGCSENLKLLQTIIWSAKREHRPLGVVFVDIAKAFDTVSHQHIIHALQQREVDPHIVGLVSNMYENISTYITTKRNTHTDKIQIRVGVKQGDPMSPLLFNLAMDPLLCKLEESGKGYHRGQSSITAMAFADDLVLLSDSWENMNTNISILETFCNLTGLKTQGQKCHGFYIKPTKKSYTINDCAAWTINGTPLNMIDPGESEKYLGLQFDPWIGIARSGLSTKLDFWLQRIDQAPLKPLQKTDILKTYTIPRLIYIADHSEVKSALLETLDQKIRTAVKEWLHLPPCTCDAILYSSTRDGGLGITKLAGLIPSVQARRLHRIAQSSDDTMKCFMEKEKMEQLHKKLWIQAGGDRENIPSIWEAPPSSEPPNNVSTNSEWEAPTQKDKFPKPCNWRKNEFKKWTKLASQGRGIVNFERDKISNHWIQYYRRIPHRKLLTALQLRANVYPTREFLARGRQDQYIKACRHCDADNESCAHIIGNCPVTQDARIKRHNYICELLLEEAKKKDWVVFKEPHIRDSNKELYKPDLIFVKDGRALVVDVTVRYEAAKSSLEEAAAEKVRKYKHLETEVRHLTNAKDVTFVGFPLGARGKWHQDNFKLLTELGLSKSRQVKMAETFSTVALFSSVDIVHMFASRARKSMVMSGSETPGTSESATPEGSLLKEGSSNQRVFDWIEANLSEQQIVSNTLVRALMTAVCYSAIIFETPLRVDVAVLKARAKLLQKYLCDEQKELQALYALQALVVTLEQPPNLLRMFFDALYDEDVVKEDAFYSWESSKDPAEQQGKGVALKSVTAFFKWLREAEEESDHNSGGSKRTADGSEFESPKKKRKV

SEQ ID NO: 1244 - protein, 1847 aa, synthetic construct
MAKRTADGSEFESPKKKRKVSGGSLLKEGSSNQRVFDWIEANLSEQQIVSNTLVRALMTAVCYSAIIFETPLRVDVAVLKARAKLLQKYLCDEQKELQALYALQALVVTLEQPPNLLRMFFDALYDEDVVKEDAFYSWESSKDPAEQQGKGVALKSVTAFFKWLREAEEESDHNSGSETPGTSESATPEGSNISGSSCGSPNSADTSSDFKDLWTKLKECHDREVQGLQVKVTKLKQERILDAQRLEEFFTKNQQLREQQKVLHETIKVLEDRLRAGLCDRCAVTEEHMRKKQQEFENIRQQNLKLITELMNERNTLQEENKKLSEQLQQKIENDQQHQAAELECEEDVIPDSPITAFSFSGVNRLRRKENPHVRYIEQTHTKLEHSVCANEMRKVSKSSTHPQHNPNENEILVADTYDQSQSPMAKAHGTSSYTPDKSSFNLATVVAETLGLGVQEESETQGPMSPLGDELYHCLEGNHKKQPFESGSETPGTSESATPEGSPKRKVSSAEGAAKEEPKRRSARLSAKPPAKVEAKPKKAAAKDKSSDKKVQTKGKRGAKGKQAEVANQETKEDLPAENGETKTEESPASDEAGEKEAKSDSGSETPGTSESATPESYEQLAPQPCVGETLHSSLPRDSELFVPEEGSSEKESEDAPKTSPPTPGKHGLEQTGEEKVMVTVPDKNPPCPCCGTRVNSVLNLIEHLKVSHGKRGVCFRCAKCGKENSNYHSVVCHFKKCRGPETEKAPAGEWICEVCNRDFTTKIGLGQHKRLAHPAVRNQERIVASQPKETSNRGAHKRCWTKEEEELLIRLEAQFEGNKNINKLIAEHITTKTAKQISDKRRLLSRKPAEEPREEPGTCHHTRRAAASLRTEPEMSHHAQAEDRDNGPGRRPLPGRAAAGGRTMDEIRRHPDKGNGQQRPTKQKSEEQLQAYYKKTLEERLSAGALNTFPRAFKQVMEGRDIKLVINQTAQDCFGCLESISQIRTATRDKKDTVTREKHPKKPFQKWMKKRAIKKGNYLRFQRLFYLDRGKLAKIILDDIECLSCDIPLSEIYSVFKTRWETTGSFKSLGDFKTYGKADNTAFRELITAKEIEKNVQEMSKGSAPGPDGITLGDVVKMDPEFSRTMEIFNLWLTTGKIPDMVRGCRTVLIPKSSKPDRLKDINNWRPITIGSILLRLFSRIVTARLSKACPLNPRQRGFIRAAGCSENLKLLQTIIWSAKREHRPLGVVFVDIAKAFDTVSHQHIIHALQQREVDPHIVGLVSNMYENISTYITTKRNTHTDKIQIRVGVKQGDPMSPLLFNLAMDPLLCKLEESGKGYHRGQSSITAMAFADDLVLLSDSWENMNTNISILETFCNLTGLKTQGQKCHGFYIKPTKKSYTINDCAAWTINGTPLNMIDPGESEKYLGLQFDPWIGIARSGLSTKLDFWLQRIDQAPLKPLQKTDILKTYTIPRLIYIADHSEVKSALLETLDQKIRTAVKEWLHLPPCTCDAILYSSTRDGGLGITKLAGLIPSVQARRLHRIAQSSDDTMKCFMEKEKMEQLHKKLWIQAGGDRENIPSIWEAPPSSEPPNNVSTNSEWEAPTQKDKFPKPCNWRKNEFKKWTKLASQGRGIVNFERDKISNHWIQYYRRIPHRKLLTALQLRANVYPTREFLARGRQDQYIKACRHCDADNESCAHIIGNCPVTQDARIKRHNYICELLLEEAKKKDWVVFKEPHIRDSNKELYKPDLIFVKDGRALVVDVTVRYEAAKSSLEEAAAEKVRKYKHLETEVRHLTNAKDVTFVGFPLGARGKWHQDNFKLLTELGLSKSRQVKMAETFSTVALFSSVDIVHMFASRARKSMVM

SEQ ID NO: 1245 - protein, 1974 aa, synthetic construct
MAKRTADGSEFESPKKKRKVSGGSERKTSQREPVTLALRLRPYKAATQQLRSIIRGLKENTTITFLETPAMVVQTARANHVSKITFNSSCLYISDRNEFQRKTINNQVPLVGSFMHLSSNKDLTKLYIQDLSPMYAHISMVATDFNMEFSSACVHNQDVVRENGESFVRADLSHSVVTELIRWVAPYTRAKRTNKKQSAPANTVQMLVHANPPTLKLIICGSGANNELEFVANEHVSFHDVKPVHLMLNTKNFHNALTQCAVTKLSCAIRVLSDHDNIVHLQSKNNSFTVESFVTEEPYSRSGSETPGTSESATPEGSNISGSSCGSPNSADTSSDFKDLWTKLKECHDREVQGLQVKVTKLKQERILDAQRLEEFFTKNQQLREQQKVLHETIKVLEDRLRAGLCDRCAVTEEHMRKKQQEFENIRQQNLKLITELMNERNTLQEENKKLSEQLQQKIENDQQHQAAELECEEDVIPDSPITAFSFSGVNRLRRKENPHVRYIEQTHTKLEHSVCANEMRKVSKSSTHPQHNPNENEILVADTYDQSQSPMAKAHGTSSYTPDKSSFNLATVVAETLGLGVQEESETQGPMSPLGDELYHCLEGNHKKQPFESGSETPGTSESATPEGSPKRKVSSAEGAAKEEPKRRSARLSAKPPAKVEAKPKKAAAKDKSSDKKVQTKGKRGAKGKQAEVANQETKEDLPAENGETKTEESPASDEAGEKEAKSDSGSETPGTSESATPESYEQLAPQPCVGETLHSSLPRDSELFVPEEGSSEKESEDAPKTSPPTPGKHGLEQTGEEKVMVTVPDKNPPCPCCGTRVNSVLNLIEHLKVSHGKRGVCFRCAKCGKENSNYHSVVCHFKKCRGPETEKAPAGEWICEVCNRDFTTKIGLGQHKRLAHPAVRNQERIVASQPKETSNRGAHKRCWTKEEEELLIRLEAQFEGNKNINKLIAEHITTKTAKQISDKRRLLSRKPAEEPREEPGTCHHTRRAAASLRTEPEMSHHAQAEDRDNGPGRRPLPGRAAAGGRTMDEIRRHPDKGNGQQRPTKQKSEEQLQAYYKKTLEERLSAGALNTFPRAFKQVMEGRDIKLVINQTAQDCFGCLESISQIRTATRDKKDTVTREKHPKKPFQKWMKKRAIKKGNYLRFQRLFYLDRGKLAKIILDDIECLSCDIPLSEIYSVFKTRWETTGSFKSLGDFKTYGKADNTAFRELITAKEIEKNVQEMSKGSAPGPDGITLGDVVKMDPEFSRTMEIFNLWLTTGKIPDMVRGCRTVLIPKSSKPDRLKDINNWRPITIGSILLRLFSRIVTARLSKACPLNPRQRGFIRAAGCSENLKLLQTIIWSAKREHRPLGVVFVDIAKAFDTVSHQHIIHALQQREVDPHIVGLVSNMYENISTYITTKRNTHTDKIQIRVGVKQGDPMSPLLFNLAMDPLLCKLEESGKGYHRGQSSITAMAFADDLVLLSDSWENMNTNISILETFCNLTGLKTQGQKCHGFYIKPTKKSYTINDCAAWTINGTPLNMIDPGESEKYLGLQFDPWIGIARSGLSTKLDFWLQRIDQAPLKPLQKTDILKTYTIPRLIYIADHSEVKSALLETLDQKIRTAVKEWLHLPPCTCDAILYSSTRDGGLGITKLAGLIPSVQARRLHRIAQSSDDTMKCFMEKEKMEQLHKKLWIQAGGDRENIPSIWEAPPSSEPPNNVSTNSEWEAPTQKDKFPKPCNWRKNEFKKWTKLASQGRGIVNFERDKISNHWIQYYRRIPHRKLLTALQLRANVYPTREFLARGRQDQYIKACRHCDADNESCAHIIGNCPVTQDARIKRHNYICELLLEEAKKKDWVVFKEPHIRDSNKELYKPDLIFVKDGRALVVDVTVRYEAAKSSLEEAAAEKVRKYKHLETEVRHLTNAKDVTFVGFPLGARGKWHQDNFKLLTELGLSKSRQVKMAETFSTVALFSSVDIVHMFASRARKSMVM

SEQ ID NO: 1246 - protein, 1985 aa, synthetic construct
MAKRTADGSEFESPKKKRKVSGGSEPPTLAFRLKAYKAAIQQLRCVVRSLKDNTTVTFLPTPALVVQTVRSQFVGKIVFNSSCLYVTDRTFTPKTINNHVPLVGNLMYMSSNRELTKFIVQDSSDLSARVCMSAPDFNMDFSSACVHSQDIVVRENGNSVARVDFDFNVVAELIKWIGPHIRPKRNSKKQIMPTGTVQITLMPNPPTVKFSLAPNTEVEFTAGNRVAFHEVKNLRATVQARNLYQAFNHCAVTKLTCTLRIMTDHETVVYVGSKNNVFTIENFLSEEPFTRNEVSYERGVLNSNYQANSGSSSGSETPGTSESATPEGSNISGSSCGSPNSADTSSDFKDLWTKLKECHDREVQGLQVKVTKLKQERILDAQRLEEFFTKNQQLREQQKVLHETIKVLEDRLRAGLCDRCAVTEEHMRKKQQEFENIRQQNLKLITELMNERNTLQEENKKLSEQLQQKIENDQQHQAAELECEEDVIPDSPITAFSFSGVNRLRRKENPHVRYIEQTHTKLEHSVCANEMRKVSKSSTHPQHNPNENEILVADTYDQSQSPMAKAHGTSSYTPDKSSFNLATVVAETLGLGVQEESETQGPMSPLGDELYHCLEGNHKKQPFESGSETPGTSESATPEGSPKRKVSSAEGAAKEEPKRRSARLSAKPPAKVEAKPKKAAAKDKSSDKKVQTKGKRGAKGKQAEVANQETKEDLPAENGETKTEESPASDEAGEKEAKSDSGSETPGTSESATPESYEQLAPQPCVGETLHSSLPRDSELFVPEEGSSEKESEDAPKTSPPTPGKHGLEQTGEEKVMVTVPDKNPPCPCCGTRVNSVLNLIEHLKVSHGKRGVCFRCAKCGKENSNYHSVVCHFKKCRGPETEKAPAGEWICEVCNRDFTTKIGLGQHKRLAHPAVRNQERIVASQPKETSNRGAHKRCWTKEEEELLIRLEAQFEGNKNINKLIAEHITTKTAKQISDKRRLLSRKPAEEPREEPGTCHHTRRAAASLRTEPEMSHHAQAEDRDNGPGRRPLPGRAAAGGRTMDEIRRHPDKGNGQQRPTKQKSEEQLQAYYKKTLEERLSAGALNTFPRAFKQVMEGRDIKLVINQTAQDCFGCLESISQIRTATRDKKDTVTREKHPKKPFQKWMKKRAIKKGNYLRFQRLFYLDRGKLAKIILDDIECLSCDIPLSEIYSVFKTRWETTGSFKSLGDFKTYGKADNTAFRELITAKEIEKNVQEMSKGSAPGPDGITLGDVVKMDPEFSRTMEIFNLWLTTGKIPDMVRGCRTVLIPKSSKPDRLKDINNWRPITIGSILLRLFSRIVTARLSKACPLNPRQRGFIRAAGCSENLKLLQTIIWSAKREHRPLGVVFVDIAKAFDTVSHQHIIHALQQREVDPHIVGLVSNMYENISTYITTKRNTHTDKIQIRVGVKQGDPMSPLLFNLAMDPLLCKLEESGKGYHRGQSSITAMAFADDLVLLSDSWENMNTNISILETFCNLTGLKTQGQKCHGFYIKPTKKSYTINDCAAWTINGTPLNMIDPGESEKYLGLQFDPWIGIARSGLSTKLDFWLQRIDQAPLKPLQKTDILKTYTIPRLIYIADHSEVKSALLETLDQKIRTAVKEWLHLPPCTCDAILYSSTRDGGLGITKLAGLIPSVQARRLHRIAQSSDDTMKCFMEKEKMEQLHKKLWIQAGGDRENIPSIWEAPPSSEPPNNVSTNSEWEAPTQKDKFPKPCNWRKNEFKKWTKLASQGRGIVNFERDKISNHWIQYYRRIPHRKLLTALQLRANVYPTREFLARGRQDQYIKACRHCDADNESCAHIIGNCPVTQDARIKRHNYICELLLEEAKKKDWVVFKEPHIRDSNKELYKPDLIFVKDGRALVVDVTVRYEAAKSSLEEAAAEKVRKYKHLETEVRHLTNAKDVTFVGFPLGARGKWHQDNFKLLTELGLSKSRQVKMAETFSTVALFSSVDIVHMFASRARKSMVM

SEQ ID NO: 1247 - skipped

SEQ ID NO: 1248 - protein, 2074 aa, synthetic construct
MAKRTADGSEFESPKKKRKVSGGSSNKSKNQKPKPQRGPRGRVRGQSRSGPVVFPSGAVLVGGRYIPPPKKAIRGPRRGLVQAPKSSERTSPRKRRSGSETPGTSESATPESDRKTRLSEPPTLALRLKPYKTAIQQLRSVIRALKENTTVTFLPTPSLILQTVRSHCVSKITFNSSCLYITDKSFQPKTINNSTPLLGNFMYLTSSKDLTKFYVQDISDLSAKISMCAPDFNMEFSSACVHGQDIVRESENSAVHVDLDFGVVADLLKWIGPHTRVKRNVKKAPCPTGTVQILVHAGPPAIKFILTNGSELEFTANNRVSFHGVKNMRINVQLKNFYQTLLNCAVTKLPCTLRIVTEHDTLLYVASRNGLFAVENFLTEEPFQRGDPFDKNYVGNSGKSRSGSETPGTSESATPEGSNISGSSCGSPNSADTSSDFKDLWTKLKECHDREVQGLQVKVTKLKQERILDAQRLEEFFTKNQQLREQQKVLHETIKVLEDRLRAGLCDRCAVTEEHMRKKQQEFENIRQQNLKLITELMNERNTLQEENKKLSEQLQQKIENDQQHQAAELECEEDVIPDSPITAFSFSGVNRLRRKENPHVRYIEQTHTKLEHSVCANEMRKVSKSSTHPQHNPNENEILVADTYDQSQSPMAKAHGTSSYTPDKSSFNLATVVAETLGLGVQEESETQGPMSPLGDELYHCLEGNHKKQPFESGSETPGTSESATPEGSPKRKVSSAEGAAKEEPKRRSARLSAKPPAKVEAKPKKAAAKDKSSDKKVQTKGKRGAKGKQAEVANQETKEDLPAENGETKTEESPASDEAGEKEAKSDSGSETPGTSESATPESYEQLAPQPCVGETLHSSLPRDSELFVPEEGSSEKESEDAPKTSPPTPGKHGLEQTGEEKVMVTVPDKNPPCPCCGTRVNSVLNLIEHLKVSHGKRGVCFRCAKCGKENSNYHSVVCHFKKCRGPETEKAPAGEWICEVCNRDFTTKIGLGQHKRLAHPAVRNQERIVASQPKETSNRGAHKRCWTKEEEELLIRLEAQFEGNKNINKLIAEHITTKTAKQISDKRRLLSRKPAEEPREEPGTCHHTRRAAASLRTEPEMSHHAQAEDRDNGPGRRPLPGRAAAGGRTMDEIRRHPDKGNGQQRPTKQKSEEQLQAYYKKTLEERLSAGALNTFPRAFKQVMEGRDIKLVINQTAQDCFGCLESISQIRTATRDKKDTVTREKHPKKPFQKWMKKRAIKKGNYLRFQRLFYLDRGKLAKIILDDIECLSCDIPLSEIYSVFKTRWETTGSFKSLGDFKTYGKADNTAFRELITAKEIEKNVQEMSKGSAPGPDGITLGDVVKMDPEFSRTMEIFNLWLTTGKIPDMVRGCRTVLIPKSSKPDRLKDINNWRPITIGSILLRLFSRIVTARLSKACPLNPRQRGFIRAAGCSENLKLLQTIIWSAKREHRPLGVVFVDIAKAFDTVSHQHIIHALQQREVDPHIVGLVSNMYENISTYITTKRNTHTDKIQIRVGVKQGDPMSPLLFNLAMDPLLCKLEESGKGYHRGQSSITAMAFADDLVLLSDSWENMNTNISILETFCNLTGLKTQGQKCHGFYIKPTKKSYTINDCAAWTINGTPLNMIDPGESEKYLGLQFDPWIGIARSGLSTKLDFWLQRIDQAPLKPLQKTDILKTYTIPRLIYIADHSEVKSALLETLDQKIRTAVKEWLHLPPCTCDAILYSSTRDGGLGITKLAGLIPSVQARRLHRIAQSSDDTMKCFMEKEKMEQLHKKLWIQAGGDRENIPSIWEAPPSSEPPNNVSTNSEWEAPTQKDKFPKPCNWRKNEFKKWTKLASQGRGIVNFERDKISNHWIQYYRRIPHRKLLTALQLRANVYPTREFLARGRQDQYIKACRHCDADNESCAHIIGNCPVTQDARIKRHNYICELLLEEAKKKDWVVFKEPHIRDSNKELYKPDLIFVKDGRALVVDVTVRYEAAKSSLEEAAAEKVRKYKHLETEVRHLTNAKDVTFVGFPLGARGKWHQDNFKLLTELGLSKSRQVKMAETFSTVALFSSVDIVHMFASRARKSMVM

SEQ ID NO: 1249 - protein, 1390 aa, synthetic construct
MASCPKPGPPVSAGAMSLESGLTTHSVLAIERGPNSLANSGSDFGGGGLGLPLRLLRVSVGTQTSRSDWVDLVSWSHPGPTSKSQQVDLVSLFPKHRVDLLSKNDQVDLVAQFLPSKFPPNLAENDLALLVNLEFYRSDLHVYECVHFAAHWEGLSGLPEVYEQLAPQPCVGETLHSSLPRDSELFVPEEGSSEKESEDAPKTSPPTPGKHGLEQTGEEKVMVTVPDKNPPCPCCGTRVNSVLNLIEHLKVSHGKRGVCFRCAKCGKENSNYHSVVCHFPKCRGPETEKAPAGEWICEVCNRDFTTKIGLGQHKRLAHPAVRNQERIVASQPKETSNRGAHKRCWTKEEEELLIRLEAQFEGNKNINKLIAEHITTKTAKQISDKRRLLSRKPAEEPREEPGTCHHTRRAAASLRTEPEMSHHAQAEDRDNGPGRRPLPGRAAAGGRTMDEIRRHPDKGNGQQRPTKQKSEEQLQAYYKKTLEERLSAGALNTFPRAFKQVMEGRDIKLVINQTAQDCFGCLESISQIRTATRDKKDTVTREKHPKKPFQKWMKDRAIKKGNYLRFQRLFYLDRGKLAKIILDDIECLSCDIPLSEIYSVFKTRWETTGSFKSLGDFKTYGKADNTAFRELITAKEIEKNVQEMSKGSAPGPDGITLGDVVKMDPEFSRTMEIFNLWLTTGKIPDMVRGCRTVLIPKSSKPDRLKDINNWRPITIGSILLRLFSRIVTARLSKACPLNPRQRGFIRAAGCSENLKLLQTIIWSAKREHRPLGVVFVDIAKAFDTVSHQHIIHALQQREVDPHIVGLVSNMYENISTYITTKRNTHTDKIQIRVGVKQGDPMSPLLFNLAMDPLLCKLEESGKGYHRGQSSITAMAFADDLVLLSDSWENMNTNISILETFCNLTGLKTQGQKCHGFYIKPTKDSYTINDCAAWTINGTPLNMIDPGESEKYLGLQFDPWIGIARSGLSTKLDFWLQRIDQAPLKPLQKTDILKTYTIPRLIYIADHSEVKTALLETLDQKIRTAVKEWLHLPPCTCDAILYSSTRDGGLGITKLAGLIPSVQARRLHRIAQSSDDTMKCFMEKEKMEQLHKKLWIQAGGDRENIPSIWEAPPSSEPPNNVSTNSEWEAPTQKDKFPKPCNWRKNEFKKWTKLASQGRGIVNFERDKISNHWIQYYRRIPHRKLLTALQLRANVYPTREFLARGRQDQYIKACRHCDADIESCAHIIGNCPVTQDARIKRHNYICELLLEEAKKKDWVVFKEPHIRDSNKELYKPDLIFVKDARALVVDVTVRYEAAKSSLEEAAAEKVRKAKHLETEVRHLTNAKDVTFVGFPLGAAGKWHQDNFKLLTELGLSKSRQVKMAETFSTVALFSSVDIVHMFASRARKSMVM

SEQ ID NO: 1250 - skipped

SEQ ID NO: 1251 - protein, 1665 aa, synthetic construct
MAPKKKRKVNISGSSCGSPNSADTSSDFKDLWTKLKECHDREVQGLQVKVTKLKQERILDAQRLEEFFTKNQQLREQQKVLHETIKVLEDRLRAGLCDRCAVTEEHMRKKQQEFENIRQQNLKLITELMNERNTLQEENKKLSEQLQQKIENDQQHQAAELECEEDVIPDSPITAFSFSGVNRLRRKENPHVRYIEQTHTKLEHSVCANEMRKVSKSSTHPQHNPNENEILVADTYDQSQSPMAKAHGTSSYTPDKSSFNLATVVAETLGLGVQEESETQGPMSPLGDELYHCLEGNHKKQPFESGSETPGTSESATPEGSPKRKVSSAEGAAKEEPKRRSARLSAKPPAKVEAKPKKAAAKDKSSDKKVQTKGKRGAKGKQAEVANQETKEDLPAENGETKTEESPASDEAGEKEAKSDSGSETPGTSESATPESYEQLAPQPCVGETLHSSLPRDSELFVPEEGSSEKESEDAPKTSPPTPGKHGLEQTGEEKVMVTVPDKNPPCPCCGTRVNSVLNLIEHLKVSHGKRRVCFRCAKCGKENSNYHSVVCHFKKCRGPETEKAPAGEWICEVCNRDFTTKIGLGQHKRLAHPAVRNQERIVASQPKETSNRGAHKRCWTKEEEELLIRLEAQFEGHKNINKLIAEHITTKTAKQISDKRRLLSRKPAEEPRMEPGTCHHTRRAAASLRTEPEMSHQAQAEDRDNGPGRRPLPGRPAAGGRTMDEIRRHPDKGNGQQRPTKQKSEEQLQAYYKKTLEERLSAGALNTFPRAFKQVMEGRDIKLVINQTAQDCFGCLESISQIRTATRDKKDTGTREKHPKRPFQKWMKKRAIKKGNYLRFQRLFYLDRGKLAKIILDDIECLSCDIPLSEIYSVFKTRWETTGSFKSLGDFKTYGKADNTAFRELITAKEIEKNVQEMSKGSAPGPDGITLGDVVKMDPEFSRTMEIFNLWLTTGKIPDMVRGCRTVLIPKSSKPDRLKDINNWRPITIGSILLRLFSRIVTARLSKACPLNPRQRGFIRAAGCSENLKLLQTIIWSAKREHRPLGVVFVDIAKAFDTVSHQHIIHALQQREVDPHIVGLVSNMYENISTYITTKRNTHTDKIQIRVGVKQGDPMSPLLFNLAMDPLLCKLEESGKGYHRGQSSITAMAFADDLVLLSDSWENMNTNISILETFCNLTGLKTQGQKCHGFYIKPTKKSYTINDCAAWTINGTPLNMIDPGESEKYLGLQFDPWIGIARSGLSTKLDFWLQRIDQAPLKPLQKLDILKTYTIPRLIYIADHSEVKSALLETLDQKIRTAVKEWLHLPPCTCDAILYSSTRDGGLGITKLAGLIPSVQARRLHRIAQSSDDTMKCFMEKERMEQLHKKLWIQAGGDRENIPSIWEAPPSSEPPNNVSTNSEWEAPTQKDKFPKPCNWRKNEFKKWTKLASQGRGIVNFERDKISNHWIQYYRGIPHRKLLTALQLRANVYPTREFLARGRQDQYIKACRHCDADNESCAHIIGNCPVTQDARIKRHNYICELLLEEAKKKDWVVFKEPHIRDSNKELYKPDLIFVKDGRALVVDVTVRYEAAKSSLEEAAAEKVRKYKHLETEVRHLTNAKDVTFVGFPLGARGKWHQDNFKLLTELGLSKSRQVKMAETFSTVALFSSVDIVHMFASRARKSMVM

SEQ ID NO: 1252 - protein, 1665 aa, synthetic construct
MAPKKKRKVNISGSSCGSPNSADTSSDFKDLWTKLKECHDREVQGLQVKVTKLKQERILDAQRLEEFFTKNQQLREQQKVLHETIKVLEDRLRAGLCDRCAVTEEHMRKKQQEFENIRQQNLKLITELMNERNTLQEENKKLSEQLQQKIENDQQHQAAELECEEDVIPDSPITAFSFSGVNRLRRKENPHVRYIEQTHTKLEHSVCANEMRKVSKSSTHPQHNPNENEILVADTYDQSQSPMAKAHGTSSYTPDKSSFNLATVVAETLGLGVQEESETQGPMSPLGDELYHCLEGNHKKQPFESGSETPGTSESATPEGSPKRKVSSAEGAAKEEPKRRSARLSAKPPAKVEAKPKKAAAKDKSSDKKVQTKGKRGAKGKQAEVANQETKEDLPAENGETKTEESPASDEAGEKEAKSDSGSETPGTSESATPESYEQLAPQPCVGETLHSSLPRDSELFVPEEGSSEKESEDAPKTSPPTPGKHGLEQTGEEKVMVTVPDKNPPCPCCGTRVNSVLNLIEHLKVSHGKRRVCFRCAKCGKENSNYHSVVCHFKKCRGPETEKAPAGEWICEVCNRDFTTKIGLGQHKRLAHPAVRNQERIVASQPKETSNRGAHKRCWTKEEEELLIRLEAQFEGHKNINKLIAEHITTKTAKQISDKRRLLSRKPAEEPRMEPGTCHHTRRAAASLRTEPEMSHHAQAEDRDNGPGRRPLPGRPAAGGRTMDEIRRHPDKGNGQQRPTKQKSEEQLQAYYKKTLEERLSAGALNTFPRAFKQVMEGRDIKLVINQTAQDCFGCLESISQIRTATRDKKDTGTREKHPKRPFQKWMKKRAIKKGNYLRFQRLFYLDRGKLAKIILDDIECLSCDIPLSEIYSVFKTRWETTGSFKSLGDFKTYGKADNTAFRELITAKEIEKNVQEMSKGSAPGPDGITLGDVVKMDPEFSRTMEIFNLWLTTGKIPDMVRGCRTVLIPKSSKPDRLKDINNWRPITIGSILLRLFSRIVTARLSKACPLNPRQRGFIRAAGCSENLKLLQTIIWSAKREHRPLGVVFVDIAKAFDTVSHQHIIHALQQREVDPHIVGLVSNMYENISTYITTKRNTHTDKIQIRVGVKQGDPMSPLLFNLAMDPLLCKLEESGKGYHRGQSSITAMAFADDLVLLSDSWENMNTNISILETFCNLTGLKTQGQKCHGFYIKPTKKSYTINDCAAWTINGTPLNMIDPGESEKYLGLQFDPWIGIARSGLSTKLDFWLQRIDQAPLKPLQKLDILKTYTIPRLIYIADHSEVKSALLETLDQKIRTAVKEWLHLPPCTCDAILYSSTRDGGLGITKLAGLIPSVQARRLHRIAQSSDDTMKCFMEKERMEQLHKKLWIQAGGDRENIPSIWEAPPSSEPPNNVSTNSEWEAPTQKDKFPKPCNWRKNEFKKWTKLASQGRGIVNFERDKISNHWIQYYRGIPHRKLLTALQLRANVYPTREFLARGRQDQYIKACRHCDADNESCAHIIGNCPVTQDARIKRHNYICELLLEEAKKKDWVVFKEPHIRDSNKELYKPDLIFVKDGRALVVDVTVRYEAAKSSLEEAAAEKVRKYKHLETEVRHLTNAKDVTFVGFPLGARGKWHQDNFKLLTELGLSKSRQVKMAETFSTVALFSSVDIVHMFASRARKSMVM

SEQ ID NO: 1253 - protein, 1665 aa, synthetic construct
MAPKKKRKVNISGSSCGSPNSADTSSDFKDLWTKLKECHDREVQGLQVKVTKLKQERILDAQRLEEFFTKNQQLREQQKVLHETIKVLEDRLRAGLCDRCAVTEEHMRKKQQEFENIRQQNLKLITELMNERNTLQEENKKLSEQLQQKIENDQQHQAAELECEEDVIPDSPITAFSFSGVNRLRRKENPHVRYIEQTHTKLEHSVCANEMRKVSKSSTHPQHNPNENEILVADTYDQSQSPMAKAHGTSSYTPDKSSFNLATVVAETLGLGVQEESETQGPMSPLGDELYHCLEGNHKKQPFESGSETPGTSESATPEGSPKRKVSSAEGAAKEEPKRRSARLSAKPPAKVEAKPKKAAAKDKSSDKKVQTKGKRGAKGKQAEVANQETKEDLPAENGETKTEESPASDEAGEKEAKSDSGSETPGTSESATPESYEQLAPQPCVGETLHSSLPRDSELFVPEEGSSEKESEDAPKTSPPTPGKHGLEQTGEEKVMVTVPDKNPPCPCCGTRVNSVLNLIEHLKVSHGKRRVCFRCAKCGKENSNYHSVVCHFKKCRGPETEKAPAGEWICEVCNRDFTTKIGLGQHKRLAHPAVRNQERIVASQPKETSNRGAHKRCWTKEEEELLIRLEAQFEGHKNINKLIAEHITTKTAKQISDKRRLLSRKPAEEPRMEPGTCHHTRRAAASLRTEPEMSHHAQAEDRDNGPGRRPLPGRPAAGGRTMDEIRRHPDKGNGQQRPTKQKSEEQLQAYYKKTLEERLSAGALNTFPRAFKQVMEGRDIKLVINQTAQDCFGCLESISQIRTATRDKKDTGTREKHPKRPFQKWMKKRAIKKGNYLRFQRLFYLDRGKLAKIILDDIECLSCDIPLSEIYSVFKTRWETTGSFKSLGDFKTYGKADNTAFRELITAKEIEKNVQEMSKGSAPGPDGITLGDVVKMDPEFSRTMEIFNLWLTTGKIPDMVRGCRTVLIPKSSKPDRLKDINNWRPITIGSILLRLFSRIVTARLSKACPLNPRQRGFIRAAGCSENLKLLQTIIWSAKREHRPLGVVFVDIAKAFDTVSHQHIIHALQQREVDPHIVGLVSNMYENISTYITTKRNTHTDKIQIRVGVKQGDPMSPLLFNLAMDPLLCKLEESGKGYHRGQSSITAMAFADDLVLLSDSWENMNTNISILETFCNLTGLKTQGQKCHGFYIKPTKKSYTINDCAAWTINGTPLNMIDPGESEKYLGLQFDPWIGIARSGLSTKLDFWLQRIDQAPLKPLQKLDILKTYTIPRLIYIADHSEVKSALLETLDQKIRTAVKEWLHLPPCTCDAILYSSTRDGGLGITKLAGLIPSVQARRLHRIAQSSDDTMKCFMEKERMEQLHKKLWIQAGGDRENIPSIWEAPPSSEPPNNVSTNSEWEAPTQKDKFPKPCNWRKNEFKKWTKLASQGRGIVNFERDKISNHWIQYYRRIPHRKLLTALQLRANVYPTREFLARGRQDQYIKACRHCDADNESCAHIIGNCPVTQDARIKRHNYICELLLEEAKKKDWVVFKEPHIRDSNKELYKPDLIFVKDGRALVVDVTVRYEAAKSSLEEAAAEKVRKYKHLETEVRHLTNAKDVTFVGFPLGARGKWHQDNFKLLTELGLSKSRQVKMAETFSTVALFSSVDIVHMFASRARKSMVM

SEQ ID NO: 1254 - protein, 1665 aa, synthetic construct
MAPKKKRKVNISGSSCGSPNSADTSSDFKDLWTKLKECHDREVQGLQVKVTKLKQERILDAQRLEEFFTKNQQLREQQKVLHETIKVLEDRLRAGLCDRCAVTEEHMRKKQQEFENIRQQNLKLITELMNERNTLQEENKKLSEQLQQKIENDQQHQAAELECEEDVIPDSPITAFSFSGVNRLRRKENPHVRYIEQTHTKLEHSVCANEMRKVSKSSTHPQHNPNENEILVADTYDQSQSPMAKAHGTSSYTPDKSSFNLATVVAETLGLGVQEESETQGPMSPLGDELYHCLEGNHKKQPFESGSETPGTSESATPEGSPKRKVSSAEGAAKEEPKRRSARLSAKPPAKVEAKPKKAAAKDKSSDKKVQTKGKRGAKGKQAEVANQETKEDLPAENGETKTEESPASDEAGEKEAKSDSGSETPGTSESATPESYEQLAPQPCVGETLHSSLPRDSELFVPEEGSSEKESEDAPKTSPPTPGKHGLRQTGEEKVMVTVPDKNPPCPCCGTRVNSVLNLIEHLKVSHGKRGVCFRCAKCGKERSNYHSVVCHFKKCRGPETEKAPAGEWICEVCNRDFTTKIGLGQHKRLAHPAVRNQERIVASQPKETSNRGAHKRCWTKEEEELLIRLEAQFEGNKNINKLIAEHITTKTAKQISDKRRLLSRKPAEEPRMEPGTCHHTRRAAASLRTEPEMSHHAQAEDRDNGPGRRPLPGRAAAGGRTMDEIRRHPDKGNGQQRPTKQKSEEQLQAYYKKTLEERLSAGALNTFPRAFKQVMEGRDIKLVINQTAQDCFGCLESISQIRTATRDKKYTVTREKHPKKPFQKWMKKRAIKKGNYLRFQRLFYLDRGKLAKIILDDIECLSCDIPLSEIYSVFKTRWETTGSFKSLGDFKTYGKADNTAFRELITAKEIEKNVQEMSKGSAPGPDGITLGDVVKMDPEFSRTMEIFNLWLTTGKIPDMVRGCRTVLIPKSSDPDRLKDINNWRPITIGSILLRLFSRIVTARLSKACPLNPRQRGFIRAAGCSENLKLLQTIIWSAKREHRPLGVVFVDIAKAFDTVSHQHIIHALQQREVDPHIVGLVSNMYENISTYITTKRNTHTDKIQIRVGVKQGDPMSPLLFNLAMDPLLCKLEESGKGYHRGQSSITAMAFADDLVLLSDSWENMNTNIKILETFCNLTGLKTQGQKCHGFYIKPTKKSYTINDCAAWTINGTPLNMIDPGESEKYLGLQFDPWIGIARSGLSTKLDFWLQRIDQAPLKPLQKLDILKTYTIPRLIYIADHSEVKSARLETLDQKIRTAVKEWLHLPPCTCDAILYSSTRDGGLGITKLAGLIPSVQARRLHRIAQSSDDTMKCFMEKEKMEQLHKKLWIQAGGDRENIPSIWEAPPSSEPPNNVSTNSEWEAPTQKDKFPKPCNWRKNEFKKWTKLASQGRGIVNFERDKISNHWIQYYRRIPHRKLLTALQLRANVYPTREFLARGRQDQYIKACRHCDADNESCAHIIGNCPVTQDARIKRHNYICELLLEEAKKKDWVVFKEPHIRDSNKELYKPDLIFVKDGRALVVDVTVRYEAAKSSLEEAAAEKVRKYKHLETEVRHLTNAKDVTFVGFPLGARGKWHQDNFKLLTELGLSKSRQVKMAETFSTVALFSSVDIVHMFASRARKSMVM

SEQ ID NO: 1255 - protein, 2066 aa, synthetic construct
MAPKKKRKVDRKTRLSEPPTLALRLKPYKTAIQQLRSVIRALKENTTVTFLPTPSLILQTVRSHCVSKITFNSSCLYITDKSFQPKTINNSTPLLGNFMYLTSSKDLTKFYVQDISDLSAKISMCAPDFNMEFSSACVHGQDIVRESENSAVHVDLDFGVVADLLKWIGPHTRVKRNVKKAPCPTGTVQILVHAGPPAIKFILTNGSELEFTANNRVSFHGVKNMRINVQLKNFYQTLLNCAVTKLPCTLRIVTEHDTLLYVASRNGLFAVENFLTEEPFQRGDPFDKNYVGNSGKSRSGSETPGTSESATPEGSNISGSSCGSPNSADTSSDFKDLWTKLKECHDREVQGLQVKVTKLKQERILDAQRLEEFFTKNQQLREQQKVLHETIKVLEDRLRAGLCDRCAVTEEHMRKKQQEFENIRQQNLKLITELMNERNTLQEENKKLSEQLQQKIENDQQHQAAELECEEDVIPDSPITAFSFSGVNRLRRKENPHVRYIEQTHTKLEHSVCANEMRKVSKSSTHPQHNPNENEILVADTYDQSQSPMAKAHGTSSYTPDKSSFNLATVVAETLGLGVQEESETQGPMSPLGDELYHCLEGNHKKQPFESGSETPGTSESATPEGSPKRKVSSAEGAAKEEPKRRSARLSAKPPAKVEAKPKKAAAKDKSSDKKVQTKGKRGAKGKQAEVANQETKEDLPAENGETKTEESPASDEAGEKEAKSDSGSETPGTSESATPESYEQLAPQPCVGETLHSSLPRDSELFVPEEGSSEKESEDAPKTSPPTPGKHGLEQTGEEKVMVTVPDKNPPCPCCGTRVNSVLNLIEHLKVSHGKRGVCFRCAKCGKENSNYHSVVCHFKKCRGPETEKAPAGEWICEVCNRDFTTKIGLGQHKRLAHPAVRNQERIVASQPKETSNRGAHKRCWTKEEEELLIRLEAQFEGNKNINKLIAEHITTKTAKQISDKRRLLSRKPAEEPREEPGTCHHTRRAAASLRTEPEMSHHAQAEDRDNGPGRRPLPGRAAAGGRTMDEIRRHPDKGNGQQRPTKQKSEEQLQAYYKKTLEERLSAGALNTFPRAFKQVMEGRDIKLVINQTAQDCFGCLESISQIRTATRDKKDTVTREKHPKKPFQKWMKKRAIKKGNYLRFQRLFYLDRGKLAKIILDDIECLSCDIPLSEIYSVFKTRWETTGSFKSLGDFKTYGKADNTAFRELITAKEIEKNVQEMSKGSAPGPDGITLGDVVKMDPEFSRTMEIFNLWLTTGKIPDMVRGCRTVLIPKSSKPDRLKDINNWRPITIGSILLRLFSRIVTARLSKACPLNPRQRGFIRAAGCSENLKLLQTIIWSAKREHRPLGVVFVDIAKAFDTVSHQHIIHALQQREVDPHIVGLVSNMYENISTYITTKRNTHTDKIQIRVGVKQGDPMSPLLFNLAMDPLLCKLEESGKGYHRGQSSITAMAFADDLVLLSDSWENMNTNISILETFCNLTGLKTQGQKCHGFYIKPTKKSYTINDCAAWTINGTPLNMIDPGESEKYLGLQFDPWIGIARSGLSTKLDFWLQRIDQAPLKPLQKTDILKTYTIPRLIYIADHSEVKSALLETLDQKIRTAVKEWLHLPPCTCDAILYSSTRDGGLGITKLAGLIPSVQARRLHRIAQSSDDTMKCFMEKEKMEQLHKKLWIQAGGDRENIPSIWEAPPSSEPPNNVSTNSEWEAPTQKDKFPKPCNWRKNEFKKWTKLASQGRGIVNFERDKISNHWIQYYRRIPHRKLLTALQLRANVYPTREFLARGRQDQYIKACRHCDADNESCAHIIGNCPVTQDARIKRHNYICELLLEEAKKKDWVVFKEPHIRDSNKELYKPDLIFVKDGRALVVDVTVRYEAAKSSLEEAAAEKVRKYKHLETEVRHLTNAKDVTFVGFPLGARGKWHQDNFKLLTELGLSKSRQVKMAETFSTVALFSSVDIVHMFASRARKSMVMSGSETPGTSESATPESTNPKPQKKNKRNTNRRPQDVKFPGGGQIVGGVYLLPRRGPRLGVRATRKTSERSQPRSGGSKRTADGSEFESPKKKRKV

SEQ ID NO: 1256 - protein, 2060 aa, synthetic construct
MAKRTADGSEFESPKKKRKVSGGSSTNPKPQKKNKRNTNRRPQDVKFPGGGQIVGGVYLLPRRGPRLGVRATRKTSERSQPRSGSETPGTSESATPESDRKTRLSEPPTLALRLKPYKTAIQQLRSVIRALKENTTVTFLPTPSLILQTVRSHCVSKITFNSSCLYITDKSFQPKTINNSTPLLGNFMYLTSSKDLTKFYVQDISDLSAKISMCAPDFNMEFSSACVHGQDIVRESENSAVHVDLDFGVVADLLKWIGPHTRVKRNVKKAPCPTGTVQILVHAGPPAIKFILTNGSELEFTANNRVSFHGVKNMRINVQLKNFYQTLLNCAVTKLPCTLRIVTEHDTLLYVASRNGLFAVENFLTEEPFQRGDPFDKNYVGNSGKSRSGSETPGTSESATPEGSNISGSSCGSPNSADTSSDFKDLWTKLKECHDREVQGLQVKVTKLKQERILDAQRLEEFFTKNQQLREQQKVLHETIKVLEDRLRAGLCDRCAVTEEHMRKKQQEFENIRQQNLKLITELMNERNTLQEENKKLSEQLQQKIENDQQHQAAELECEEDVIPDSPITAFSFSGVNRLRRKENPHVRYIEQTHTKLEHSVCANEMRKVSKSSTHPQHNPNENEILVADTYDQSQSPMAKAHGTSSYTPDKSSFNLATVVAETLGLGVQEESETQGPMSPLGDELYHCLEGNHKKQPFESGSETPGTSESATPEGSPKRKVSSAEGAAKEEPKRRSARLSAKPPAKVEAKPKKAAAKDKSSDKKVQTKGKRGAKGKQAEVANQETKEDLPAENGETKTEESPASDEAGEKEAKSDSGSETPGTSESATPESYEQLAPQPCVGETLHSSLPRDSELFVPEEGSSEKESEDAPKTSPPTPGKHGLEQTGEEKVMVTVPDKNPPCPCCGTRVNSVLNLIEHLKVSHGKRGVCFRCAKCGKENSNYHSVVCHFKKCRGPETEKAPAGEWICEVCNRDFTTKIGLGQHKRLAHPAVRNQERIVASQPKETSNRGAHKRCWTKEEEELLIRLEAQFEGNKNINKLIAEHITTKTAKQISDKRRLLSRKPAEEPREEPGTCHHTRRAAASLRTEPEMSHHAQAEDRDNGPGRRPLPGRAAAGGRTMDEIRRHPDKGNGQQRPTKQKSEEQLQAYYKKTLEERLSAGALNTFPRAFKQVMEGRDIKLVINQTAQDCFGCLESISQIRTATRDKKDTVTREKHPKKPFQKWMKKRAIKKGNYLRFQRLFYLDRGKLAKIILDDIECLSCDIPLSEIYSVFKTRWETTGSFKSLGDFKTYGKADNTAFRELITAKEIEKNVQEMSKGSAPGPDGITLGDVVKMDPEFSRTMEIFNLWLTTGKIPDMVRGCRTVLIPKSSKPDRLKDINNWRPITIGSILLRLFSRIVTARLSKACPLNPRQRGFIRAAGCSENLKLLQTIIWSAKREHRPLGVVFVDIAKAFDTVSHQHIIHALQQREVDPHIVGLVSNMYENISTYITTKRNTHTDKIQIRVGVKQGDPMSPLLFNLAMDPLLCKLEESGKGYHRGQSSITAMAFADDLVLLSDSWENMNTNISILETFCNLTGLKTQGQKCHGFYIKPTKKSYTINDCAAWTINGTPLNMIDPGESEKYLGLQFDPWIGIARSGLSTKLDFWLQRIDQAPLKPLQKTDILKTYTIPRLIYIADHSEVKSALLETLDQKIRTAVKEWLHLPPCTCDAILYSSTRDGGLGITKLAGLIPSVQARRLHRIAQSSDDTMKCFMEKEKMEQLHKKLWIQAGGDRENIPSIWEAPPSSEPPNNVSTNSEWEAPTQKDKFPKPCNWRKNEFKKWTKLASQGRGIVNFERDKISNHWIQYYRRIPHRKLLTALQLRANVYPTREFLARGRQDQYIKACRHCDADNESCAHIIGNCPVTQDARIKRHNYICELLLEEAKKKDWVVFKEPHIRDSNKELYKPDLIFVKDGRALVVDVTVRYEAAKSSLEEAAAEKVRKYKHLETEVRHLTNAKDVTFVGFPLGARGKWHQDNFKLLTELGLSKSRQVKMAETFSTVALFSSVDIVHMFASRARKSMVM

SEQ ID NO: 1257 - protein, 1971 aa, synthetic construct
MAPKKKRKVDRKTRLSEPPTLALRLKPYKTAIQQLRSVIRALKENTTVTFLPTPSLILQTVRSHCVSKITFNSSCLYITDKSFQPKTINNSTPLLGNFMYLTSSKDLTKFYVQDISDLSAKISMCAPDFNMEFSSACVHGQDIVRESENSAVHVDLDFGVVADLLKWIGPHTRVKRNVKKAPCPTGTVQILVHAGPPAIKFILTNGSELEFTANNRVSFHGVKNMRINVQLKNFYQTLLNCAVTKLPCTLRIVTEHDTLLYVASRNGLFAVENFLTEEPFQRGDPFDKNYVGNSGKSRSGSETPGTSESATPEGSNISGSSCGSPNSADTSSDFKDLWTKLKECHDREVQGLQVKVTKLKQERILDAQRLEEFFTKNQQLREQQKVLHETIKVLEDRLRAGLCDRCAVTEEHMRKKQQEFENIRQQNLKLITELMNERNTLQEENKKLSEQLQQKIENDQQHQAAELECEEDVIPDSPITAFSFSGVNRLRRKENPHVRYIEQTHTKLEHSVCANEMRKVSKSSTHPQHNPNENEILVADTYDQSQSPMAKAHGTSSYTPDKSSFNLATVVAETLGLGVQEESETQGPMSPLGDELYHCLEGNHKKQPFESGSETPGTSESATPEGSPKRKVSSAEGAAKEEPKRRSARLSAKPPAKVEAKPKKAAAKDKSSDKKVQTKGKRGAKGKQAEVANQETKEDLPAENGETKTEESPASDEAGEKEAKSDSGSETPGTSESATPESYEQLAPQPCVGETLHSSLPRDSELFVPEEGSSEKESEDAPKTSPPTPGKHGLEQTGEEKVMVTVPDKNPPCPCCGTRVNSVLNLIEHLKVSHGKRGVCFRCAKCGKENSNYHSVVCHFKKCRGPETEKAPAGEWICEVCNRDFTTKIGLGQHKRLAHPAVRNQERIVASQPKETSNRGAHKRCWTKEEEELLIRLEAQFEGNKNINKLIAEHITTKTAKQISDKRRLLSRKPAEEPREEPGTCHHTRRAAASLRTEPEMSHHAQAEDRDNGPGRRPLPGRAAAGGRTMDEIRRHPDKGNGQQRPTKQKSEEQLQAYYKKTLEERLSAGALNTFPRAFKQVMEGRDIKLVINQTAQDCFGCLESISQIRTATRDKKDTVTREKHPKKPFQKWMKKRAIKKGNYLRFQRLFYLDRGKLAKIILDDIECLSCDIPLSEIYSVFKTRWETTGSFKSLGDFKTYGKADNTAFRELITAKEIEKNVQEMSKGSAPGPDGITLGDVVKMDPEFSRTMEIFNLWLTTGKIPDMVRGCRTVLIPKSSKPDRLKDINNWRPITIGSILLRLFSRIVTARLSKACPLNPRQRGFIRAAGCSENLKLLQTIIWSAKREHRPLGVVFVDIAKAFDTVSHQHIIHALQQREVDPHIVGLVSNMYENISTYITTKRNTHTDKIQIRVGVKQGDPMSPLLFNLAMDPLLCKLEESGKGYHRGQSSITAMAFADDLVLLSDSWENMNTNISILETFCNLTGLKTQGQKCHGFYIKPTKDSYTINDCAAWTINGTPLNMIDPGESEKYLGLQFDPWIGIARSGLSTKLDFWLQRIDQAPLKPLQKTDILKTYTIPRLIYIADHSEVKSALLETLDQKIRTAVKEWLHLPPCTCDAILYSSTRDGGLGITKLAGLIPSVQARRLHRIAQSSDDTMKCFMEKEKMEQLHKKLWIQAGGDRENIPSIWEAPPSSEPPNNVSTNSEWEAPTQKDKFPKPCNWRKNEFKKWTKLASQGRGIVNFERDKISNHWIQYYRRIPHRKLLTALQLRANVYPTREFLARGRQDQYIKACRHCDADNESCAHIIGNCPVTQDARIKRHNYICELLLEEAKKKDWVVFKEPHIRDSNKELYKPDLIFVKDGRALVVDVTVRYEAAKSSLEEAAAEKVRKYKHLETEVRHLTNAKDVTFVGFPLGAAGKWHQDNFKLLTELGLSKSRQVKMAETFSTVALFSSVDIVHMFASRARKSMVM

SEQ ID NO: 1258 - protein, 1665 aa, synthetic construct
MAPKKKRKVNISGSSCGSPNSADTSSDFKDLWTKLKECHDREVQGLQVKVTKLKQERILDAQRLEEFFTKNQQLREQQKVLHETIKVLEDRLRAGLCDRCAVTEEHMRKKQQEFENIRQQNLKLITELMNERNTLQEENKKLSEQLQQKIENDQQHQAAELECEEDVIPDSPITAFSFSGVNRLRRKENPHVRYIEQTHTKLEHSVCANEMRKVSKSSTHPQHNPNENEILVADTYDQSQSPMAKAHGTSSYTPDKSSFNLATVVAETLGLGVQEESETQGPMSPLGDELYHCLEGNHKKQPFESGSETPGTSESATPEGSPKRKVSSAEGAAKEEPKRRSARLSAKPPAKVEAKPKKAAAKDKSSDKKVQTKGKRGAKGKQAEVANQETKEDLPAENGETKTEESPASDEAGEKEAKSDSGSETPGTSESATPESYEQLAPQPCVGETLHSSLPRDSELFVPEEGSSEKESEDAPKTSPPTPGKHGLEQTGEEKVMVTVPDKNPPCPCCGTRVNSVLNLIEHLKVSHGKRGVCFRCAKCGKENSNYHSVVCHFKKCRGPETEKAPAGEWICEVCNRDFTTKIGLGQHKRLAHPAVRNQERIVASQPKETSNRGAHKRCWTKEEEELLIRLEAQFEGNKNINKLIAEHITTKTAKQISDKRRLLSRKPAEEPREEPGTCHHTRRAAASLRTEPEMSHHAQAEDRDNGPGRRPLPGRAAAGGRTMDEIRRHPDKGNGQQRPTKQKSEEQLQAYYKKTLEERLSAGALNTFPRAFKQVMEGRDIKLVINQTAQDCFGCLESISQIRTATRDKKDTVTREKHPKKPFQKWMKKRAIKKGNYLRFQRLFYLDRGKLAKIILDDIECLSCDIPLSEIYSVFKTRWETTGSFKSLGDFKTYGKADNTAFRELITAKEIEKNVQEMSKGSAPGPDGITLGDVVKMDPEFSRTMEIFNLWLTTGKIPDMVRGCRTVLIPKSSKPDRLKDINNWRPITIGSILLRLFSRIVTARLSKACPLNPRQRGFIRAAGCSENLKLLQTIIWSAKREHRPLGVVFVDIAKAFDTVSHQHIIHALQQREVDPHIVGLVSNMYENISTYITTKRNTHTDKIQIRVGVKQGDPMSPLLFNLAMDPLLCKLEESGKGYHRGQSSITAMAFADDLVLLSDSWENMNTNISILETFCNLTGLKTQGQKCHGFYIKPTKDSYTINDCAAWTINGTPLNMIDPGESEKYLGLQFDPWIGIARSGLSTKLDFWLQRIDQAPLKPLQKTDILKTYTIPRLIYIADHSEVKSALLETLDQKIRTAVKEWLHLPPCTCDAILYSSTRDGGLGITKLAGLIPSVQARRLHRIAQSSDDTMKCFMEKEKMEQLHKKLWIQAGGDRENIPSIWEAPPSSEPPNNVSTNSEWEAPTQKDKFPKPCNWRKNEFKKWTKLASQGRGIVNFERDKISNHWIQYYRRIPHRKLLTALQLRANVYPTREFLARGRQDQYIKACRHCDADNESCAHIIGNCPVTQDARIKRHNYICELLLEEAKKKDWVVFKEPHIRDSNKELYKPDLIFVKDGRALVVDVTVRYEAAKSSLEEAAAEKVRKYKHLETEVRHLTNAKDVTFVGFPLGAAGKWHQDNFKLLTELGLSKSRQVKMAETFSTVALFSSVDIVHMFASRARKSMVM

SEQ ID NO: 1259 - protein, 2048 aa, synthetic construct
MAPKKKRKVWKPGDECFALYWEDNKFYRAEVEALHSSGMTAVVKFIDYGNYEEVLLSNIKPIQTEAWEESGSETPGTSESATPEGSDRKTRLSEPPTLALRLKPYKTAIQQLRSVIRALKENTTVTFLPTPSLILQTVRSHCVSKITFNSSCLYITDKSFQPKTINNSTPLLGNFMYLTSSKDLTKFYVQDISDLSAKISMCAPDFNMEFSSACVHGQDIVRESENSAVHVDLDFGVVADLLKWIGPHTRVKRNVKKAPCPTGTVQILVHAGPPAIKFILTNGSELEFTANNRVSFHGVKNMRINVQLKNFYQTLLNCAVTKLPCTLRIVTEHDTLLYVASRNGLFAVENFLTEEPFQRGDPFDKNYVGNSGKSRSGSETPGTSESATPEGSNISGSSCGSPNSADTSSDFKDLWTKLKECHDREVQGLQVKVTKLKQERILDAQRLEEFFTKNQQLREQQKVLHETIKVLEDRLRAGLCDRCAVTEEHMRKKQQEFENIRQQNLKLITELMNERNTLQEENKKLSEQLQQKIENDQQHQAAELECEEDVIPDSPITAFSFSGVNRLRRKENPHVRYIEQTHTKLEHSVCANEMRKVSKSSTHPQHNPNENEILVADTYDQSQSPMAKAHGTSSYTPDKSSFNLATVVAETLGLGVQEESETQGPMSPLGDELYHCLEGNHKKQPFESGSETPGTSESATPEGSPKRKVSSAEGAAKEEPKRRSARLSAKPPAKVEAKPKKAAAKDKSSDKKVQTKGKRGAKGKQAEVANQETKEDLPAENGETKTEESPASDEAGEKEAKSDSGSETPGTSESATPESYEQLAPQPCVGETLHSSLPRDSELFVPEEGSSEKESEDAPKTSPPTPGKHGLEQTGEEKVMVTVPDKNPPCPCCGTRVNSVLNLIEHLKVSHGKRGVCFRCAKCGKENSNYHSVVCHFKKCRGPETEKAPAGEWICEVCNRDFTTKIGLGQHKRLAHPAVRNQERIVASQPKETSNRGAHKRCWTKEEEELLIRLEAQFEGNKNINKLIAEHITTKTAKQISDKRRLLSRKPAEEPREEPGTCHHTRRAAASLRTEPEMSHHAQAEDRDNGPGRRPLPGRAAAGGRTMDEIRRHPDKGNGQQRPTKQKSEEQLQAYYKKTLEERLSAGALNTFPRAFKQVMEGRDIKLVINQTAQDCFGCLESISQIRTATRDKKDTVTREKHPKKPFQKWMKKRAIKKGNYLRFQRLFYLDRGKLAKIILDDIECLSCDIPLSEIYSVFKTRWETTGSFKSLGDFKTYGKADNTAFRELITAKEIEKNVQEMSKGSAPGPDGITLGDVVKMDPEFSRTMEIFNLWLTTGKIPDMVRGCRTVLIPKSSKPDRLKDINNWRPITIGSILLRLFSRIVTARLSKACPLNPRQRGFIRAAGCSENLKLLQTIIWSAKREHRPLGVVFVDIAKAFDTVSHQHIIHALQQREVDPHIVGLVSNMYENISTYITTKRNTHTDKIQIRVGVKQGDPMSPLLFNLAMDPLLCKLEESGKGYHRGQSSITAMAFADDLVLLSDSWENMNTNISILETFCNLTGLKTQGQKCHGFYIKPTKDSYTINDCAAWTINGTPLNMIDPGESEKYLGLQFDPWIGIARSGLSTKLDFWLQRIDQAPLKPLQKTDILKTYTIPRLIYIADHSEVKSALLETLDQKIRTAVKEWLHLPPCTCDAILYSSTRDGGLGITKLAGLIPSVQARRLHRIAQSSDDTMKCFMEKEKMEQLHKKLWIQAGGDRENIPSIWEAPPSSEPPNNVSTNSEWEAPTQKDKFPKPCNWRKNEFKKWTKLASQGRGIVNFERDKISNHWIQYYRRIPHRKLLTALQLRANVYPTREFLARGRQDQYIKACRHCDADNESCAHIIGNCPVTQDARIKRHNYICELLLEEAKKKDWVVFKEPHIRDSNKELYKPDLIFVKDGRALVVDVTVRYEAAKSSLEEAAAEKVRKYKHLETEVRHLTNAKDVTFVGFPLGARGKWHQDNFKLLTELGLSKSRQVKMAETFSTVALFSSVDIVHMFASRARKSMVM

SEQ ID NO: 1260 - skipped

SEQ ID NO: 1261 - protein, 1971 aa, synthetic construct
MAPKKKRKVDRKTRLSEPPTLALRLKPYKTAIQQLRSVIRALKENTTVTFLPTPSLILQTVRSHCVSKITFNSSCLYITDKSFQPKTINNSTPLLGNFMYLTSSKDLTKFYVQDISDLSAKISMCAPDFNMEFSSACVHGQDIVRESENSAVHVDLDFGVVADLLKWIGPHTRVKRNVKKAPCPTGTVQILVHAGPPAIKFILTNGSELEFTANNRVSFHGVKNMRINVQLKNFYQTLLNCAVTKLPCTLRIVTEHDTLLYVASRNGLFAVENFLTEEPFQRGDPFDKNYVGNSGKSRSGSETPGTSESATPEGSNISGSSCGSPNSADTSSDFKDLWTKLKECHDREVQGLQVKVTKLKQERILDAQRLEEFFTKNQQLREQQKVLHETIKVLEDRLRAGLCDRCAVTEEHMRKKQQEFENIRQQNLKLITELMNERNTLQEENKKLSEQLQQKIENDQQHQAAELECEEDVIPDSPITAFSFSGVNRLRRKENPHVRYIEQTHTKLEHSVCANEMRKVSKSSTHPQHNPNENEILVADTYDQSQSPMAKAHGTSSYTPDKSSFNLATVVAETLGLGVQEESETQGPMSPLGDELYHCLEGNHKKQPFESGSETPGTSESATPEGSPKRKVSSAEGAAKEEPKRRSARLSAKPPAKVEAKPKKAAAKDKSSDKKVQTKGKRGAKGKQAEVANQETKEDLPAENGETKTEESPASDEAGEKEAKSDSGSETPGTSESATPESYEQLAPQPCVGETLHSSLPRDSELFVPEEGSSEKESEDAPKTSPPTPGKHGLEQTGEEKVMVTVPDKNPPCPCCGTRVNSVLNLIEHLKVSHGKRGVCFRCAKCGKENSNYHSVVCHFKKCRGPETEKAPAGEWICEVCNRDFTTKIGLGQHKRLAHPAVRNQERIVASQPKETSNRGAHKRCWTKEEEELLIRLEAQFEGNKNINKLIAEHITTKTAKQISDKRRLLSRKPAEEPREEPGTCHHTRRAAASLRTEPEMSHHAQAEDRDNGPGRRPLPGRAAAGGRTMDEIRRHPDKGNGQQRPTKQKSEEQLQAYYKKTLEERLSAGALNTFPRAFKQVMEGRDIKLVINQTAQDCFGCLESISQIRTATRDKKDTVTREKHPKKPFQKWMKKRAIKKGNYLRFQRLFHLDRGKLAKIILDDIECLSCDIPLSEIYSVFKTRWETTGSFKSLGDFKTYGKADNTAFRELITAKEIEKNVQEMSKGSAPGPDGITLGDRVKMDPEFSRTMEIFNLWLTTGKIPDMVRGCRTVLIPKSSKPDRLKDINNWRPITIGSILLRLFSRIVTARLSKACPLNPRQRGFIRAAGCSENLKLLQTIIWSAKREHRPLGVVFVDIAKAFDTVSHQHIIHALQQREVDPHIVGLVSNMYENISTYITTKRNTHTDKIQIRVGVKQGDPMSPLLFNLAMDPLLCKLEESGKGYHRGQSSITAMAFADDLVLLSDSWENMNTNISILETFCNLTGLKTQGQKCHGFYIKPTKKSYTINDCAAWTINGTPLNMIDPGESEKYLGLQFDPWIGIARSGLSTKLDFWLQRIDQAPLKPLQKTDILKTYTIPRLIYIADHSEVKSALLETLDQKIRTAVKEWLHLPPCTCDAILYSSTRDGGLGITKLAGLIPSVQARRLHRIAQSSDDTMKCFMEKEKMEQLHKKLWIQAGGDRENIPSIWEAPPSSEPPNNVSTNSEWEAPTQKDKFPKPCNWRKNEFKKWTKLASQGRGIVNFERDKISNHWIQYYRRIPHRKLLTALQLRANVYPTREFLARGRQDQYIKACRHCDADNESCAHIIGNCPVTQDARIKRHNYICELLLEEAKKKDWVVFKEPHIRDSNKELYKPDLIFVKDGRALVVDVTVRYEAAKSSLEEAAAEKVRKYKHLETEVRHLTNAKDVTFVGFPLGARGKWHQDNFKLLTELGLSKSRQVKMAETFSTVALFSSVDIVHMFASRARKSMVM

SEQ ID NO: 1262 - protein, 1971 aa, synthetic construct
MAPKKKRKVDRKTRLSEPPTLALRLKPYKTAIQQLRSVIRALKENTTVTFLPTPSLILQTVRSHCVSKITFNSSCLYITDKSFQPKTINNSTPLLGNFMYLTSSKDLTKFYVQDISDLSAKISMCAPDFNMEFSSACVHGQDIVRESENSAVHVDLDFGVVADLLKWIGPHTRVKRNVKKAPCPTGTVQILVHAGPPAIKFILTNGSELEFTANNRVSFHGVKNMRINVQLKNFYQTLLNCAVTKLPCTLRIVTEHDTLLYVASRNGLFAVENFLTEEPFQRGDPFDKNYVGNSGKSRSGSETPGTSESATPEGSNISGSSCGSPNSADTSSDFKDLWTKLKECHDREVQGLQVKVTKLKQERILDAQRLEEFFTKNQQLREQQKVLHETIKVLEDRLRAGLCDRCAVTEEHMRKKQQEFENIRQQNLKLITELMNERNTLQEENKKLSEQLQQKIENDQQHQAAELECEEDVIPDSPITAFSFSGVNRLRRKENPHVRYIEQTHTKLEHSVCANEMRKVSKSSTHPQHNPNENEILVADTYDQSQSPMAKAHGTSSYTPDKSSFNLATVVAETLGLGVQEESETQGPMSPLGDELYHCLEGNHKKQPFESGSETPGTSESATPEGSPKRKVSSAEGAAKEEPKRRSARLSAKPPAKVEAKPKKAAAKDKSSDKKVQTKGKRGAKGKQAEVANQETKEDLPAENGETKTEESPASDEAGEKEAKSDSGSETPGTSESATPESYEQLAPQPCVGETLHSSLPRDSELFVPEEGSSEKESEDAPKTSPPTPGKHGLEQTGEEKVMVTVPDKNPPCPCCGTRVNSVLNLIEHLKVSHGKRGVCFRCAKCGKENSNYHSVVCHFKKCRGPETEKAPAGEWICEVCNRDFTTKIGLGQHKRLAHPAVRNQERIVASQPKETSNRGAHKRCWTKEEEELLIRLEAQFEGNKNINKLIAEHITTKTAKQISDKRRLLSRKPAEEPREEPGTCHHTRRAAASLRTEPEMSHHAQAEDRDNGPGRRPLPGRAAAGGRTMDEIRRHPDKGNGQQRPTKQKSEEQLQAYYKKTLEERLSAGALNTFPRAFKQVMEGRDIKLVINQTAQDCFGCLESISQIRTATRDKKDTVTREKHPKKPFQKWMKKRAIKKGNYLRFQRLFHLDRGKLAKIILDDIECLSCDIPLSEIYSVFKTRWETTGSFKSLGDFKTYGKADNTAFRELITAKEIEKNVQEMSKGSAPGPDGITLGDVVKMDPEFSRTMEIFNLWLTTGKIPDMVRGCRTVLIPKSSKPDRLKDINNWRPITIGSILLRLFSRIVTARLSKACPLNPRQRGFIRAAGCSENLKLLQTIIWSAKREHRPLGVVFVDIAKAFDTVSHQHIIHALQQREVDPHIVGLVSNMYENISTYITTKRNTHTDKIQIRVGVKQGDPMSPLLFNLAMDPLLCKLEESGKGYHRGQSSITAMAFADDLVLLSDSWENMNTNISILETFCNLTGLKTQGQKCHGFYIKPTKKSYTINDCAAWTINGTPLNMIDPGESEKYLGLQFDPWIGIARSGLSTKLDFWLQRIDQAPLKPLQKTDILKTYTIPRLIYIADHSEVKSALLETLDQKIRTAVKEWLHLPPCTCDAILYSSTRDGGLGITKLAGLIPSVQARRLHRIAQSSDDTMKCFMEKEKMEQLHKKLWIQAGGDRENIPSIWEAPPSSEPPNNVSTNSEWEAPTQKDKFPKPCNWRKNEFKKWTKLASQGRGIVNFERDKISNHWIQYYRRIPHRKLLTALQLRANVYPTREFLARGRQDQYIKACRHCDADNESCAHIIGNCPVTQDARIKRHNYICELLLEEAKKKDWVVFKEPHIRDSNKELYKPDLIFVKDGRALVVDVTVRYEAAKSSLEEAAAEKVRKYKHLETEVRHLTNAKDVTFVGFPLGARGKWHQDNFKLLTELGLSKSRQVKMAETFSTVALFSSVDIVHMFASRARKSMVM

SEQ ID NO: 1263 - protein, 1971 aa, synthetic construct
MAPKKKRKVDRKTRLSEPPTLALRLKPYKTAIQQLRSVIRALKENTTVTFLPTPSLILQTVRSHCVSKITFNSSCLYITDKSFQPKTINNSTPLLGNFMYLTSSKDLTKFYVQDISDLSAKISMCAPDFNMEFSSACVHGQDIVRESENSAVHVDLDFGVVADLLKWIGPHTRVKRNVKKAPCPTGTVQILVHAGPPAIKFILTNGSELEFTANNRVSFHGVKNMRINVQLKNFYQTLLNCAVTKLPCTLRIVTEHDTLLYVASRNGLFAVENFLTEEPFQRGDPFDKNYVGNSGKSRSGSETPGTSESATPEGSNISGSSCGSPNSADTSSDFKDLWTKLKECHDREVQGLQVKVTKLKQERILDAQRLEEFFTKNQQLREQQKVLHETIKVLEDRLRAGLCDRCAVTEEHMRKKQQEFENIRQQNLKLITELMNERNTLQEENKKLSEQLQQKIENDQQHQAAELECEEDVIPDSPITAFSFSGVNRLRRKENPHVRYIEQTHTKLEHSVCANEMRKVSKSSTHPQHNPNENEILVADTYDQSQSPMAKAHGTSSYTPDKSSFNLATVVAETLGLGVQEESETQGPMSPLGDELYHCLEGNHKKQPFESGSETPGTSESATPEGSPKRKVSSAEGAAKEEPKRRSARLSAKPPAKVEAKPKKAAAKDKSSDKKVQTKGKRGAKGKQAEVANQETKEDLPAENGETKTEESPASDEAGEKEAKSDSGSETPGTSESATPESYEQLAPQPCVGETLHSSLPRDSELFVPEEGSSEKESEDAPKTSPPTPGKHGLEQTGEEKVMVTVPDKNPPCPCCGTRVNSVLNLIEHLKVSHGKRGVCFRCAKCGKENSNYHSVVCHFKKCRGPETEKAPAGEWICEVCNRDFTTKIGLGQHKRLAHPAVRNQERIVASQPKETSNRGAHKRCWTKEEEELLIRLEAQFEGNKNINKLIAEHITTKTAKQISDKRRLLSRKPAEEPREEPGTCHHTRRAAASLRTEPEMSHHAQAEDRDNGPGRRPLPGRAAAGGRTMDEIRRHPDKGNGQQRPTKQKSEEQLQAYYKKTLEERLSAGALNTFPRAFKQVMEGRDIKLVINQTAQDCFGCLESISQIRTATRDKKDTVTREKHPKKPFQKWMKKRAIKKGNYLRFQRLFYLDRGKLAKIILDDIECLSCDIPLSEIYSVFKTRWETTGSFKSLGDFKTYGKADNTAFRELITAKEIEKNVQEMSKGSAPGPDGITLGDVVKMDPEFSRTMEIFNLWLTTGKIPDMVRGCRTVLIPKSSKPDRLKDINNWRPITIGSILLRLFSRIVTARLSKACPLNPRQRGFIRAAGCSENLKLLQTIIWSAKREHRPLGVVFVDIAKAFDTVSHQHIIHALQQREVDPHIVGLVSNMYENISTYITTKRNTHTDKIQIRVGVKQGDPMSPLLFNLAMDPLLCKLEESGKGYHRGQSSITAMAFADDLVLLSDSWENMNTNISILETFCNLTGLKTQGQKCHGFYIKPTKKSYTINDCAAWTINGTPLNMIDPGESEKYLGLQFDPWIGIARSGLSTKLDFWLQRIDQAPLKPLQKTDILKTYTIPRLIYIADHSEVKSALLETLDQKIRTAVKEWLHLPPCTCDAILYSSTRDGGLGITKLAGLIPSVQARRLHRIAQSSDDTMKCFMEKEKMEQLHKKLWIQAGGDRENIPSIWEAPPSSEPPNNVSTNSEWEAPTQKDKFPKPCNWRKNEFKKWTKLASQGRGIVNFERDKISNHWIQYYRRIPHRKLLTALQLRANVYPTREFLARGRQDQYIKACRHCDADNESCAHIIGNCPVTQDARIKRHNYICELLLEEAKKKDWVVFKEPHIRDSNKELYKPDLIFVKDGRALVVDVTVRYEAAKSSLEEAAAEKVRKYKHLETEVRHLTNAKDVTFVGFPLGARGKWHQDNFKLLTELGLSKSRQVKMAETFSTVALFSSVDIVHMFASRARKSMVM

SEQ ID NO: 1264 - protein, 1971 aa, synthetic construct; identical to SEQ ID NO: 782

SEQ ID NO: 1265 - protein, 1971 aa, synthetic construct
MAPKKKRKVDRKTRLSEPPTLALRLKPYKTAIQQLRSVIRALKENTTVTFLPTPSLILQTVRSHCVSKITFNSSCLYITDKSFQPKTINNSTPLLGNFMYLTSSKDLTKFYVQDISDLSAKISMCAPDFNMEFSSACVHGQDIVRESENSAVHVDLDFGVVADLLKWIGPHTRVKRNVKKAPCPTGTVQILVHAGPPAIKFILTNGSELEFTANNRVSFHGVKNMRINVQLKNFYQTLLNCAVTKLPCTLRIVTEHDTLLYVASRNGLFAVENFLTEEPFQRGDPFDKNYVGNSGKSRSGSETPGTSESATPEGSNISGSSCGSPNSADTSSDFKDLWTKLKECHDREVQGLQVKVTKLKQERILDAQRLEEFFTKNQQLREQQKVLHETIKVLEDRLRAGLCDRCAVTEEHMRKKQQEFENIRQQNLKLITELMNERNTLQEENKKLSEQLQQKIENDQQHQAAELECEEDVIPDSPITAFSFSGVNRLRRKENPHVRYIEQTHTKLEHSVCANEMRKVSKSSTHPQHNPNENEILVADTYDQSQSPMAKAHGTSSYTPDKSSFNLATVVAETLGLGVQEESETQGPMSPLGDELYHCLEGNHKKQPFESGSETPGTSESATPEGSPKRKVSSAEGAAKEEPKRRSARLSAKPPAKVEAKPKKAAAKDKSSDKKVQTKGKRGAKGKQAEVANQETKEDLPAENGETKTEESPASDEAGEKEAKSDSGSETPGTSESATPESYEQLAPQPCVGETLHSSLPRDSELFVPEEGSSEKESEDAPKTSPPTPGKHGLEQTGEEKVMVTVPDKNPPCPCCGTRVNSVLNLIEHLKVSHGKRGVCFRCAKCGKENSNYHSVVCHFKKCRGPETEKAPAGEWICEVCNRDFTTKIGLGQHKRLAHPAVRNQERIVASQPKETSNRGAHKRCWTKEEEELLIRLEAQFEGNKNINKLIAEHITTKTAKQISDKRRLLSRKPAEEPREEPGTCHHTRRAAASLRTEPEMSHHAQAEDRDNGPGRRPLPGRAAAGGRTMDEIRRHPDKGNGQQRPTKQKSEEQLQAYYKKTLEERLSAGALNTFPRAFKQVMEGRDIKLVINQTAQDCFGCLESISQIRTATRDKKDTVTREKHPKKPFQKWMKKRAIKKGNYLRFQRLFHLDRGKLAKIILDDIECLSCDIPLSEIYSVFKTRWETTGSFKSLGDFKTYGKADNTAFRELITAKEIEKNVQEMSKGSAPGPDGITLGDVVKMDPEFSRTMEIFNLWLTTGKIPDMVRGCRTVLIPKSSKPDRLKDINNWRPITIGSILLRLFSRIVTARLSKACPLNPRQRGFIRAAGCSENLKLLQTIIWSAKREHRPLGVVFVDIAKAFDTVSHQHIIHALQQREVDPHIVGLVSNMYENISTYITTKRNTHTDKIQIRVGVKQGDPMSPLLFNLAMDPLLCKLEESGKGYHRGQSSITAMAFADDLVLLSDSWENMNTNISILETFCNLTGLKTQGQKCHGFYIKPTKDSYTINDCAAWTINGTPLNMIDPGESEKYLGLQFDPWIGIARSGLSTKLDFWLQRIDQAPLKPLQKTDILKTYTIPRLIYIADHSEVKSALLETLDQKIRTAVKEWLHLPPCTCDAILYSSTRDGGLGITKLAGLIPSVQARRLHRIAQSSDDTMKCFMEKEKMEQLHKKLWIQAGGDRENIPSIWEAPPSSEPPNNVSTNSEWEAPTQKDKFPKPCNWRKNEFKKWTKLASQGRGIVNFERDKISNHWIQYYRRIPHRKLLTALQLRANVYPTREFLARGRQDQYIKACRHCDADNESCAHIIGNCPVTQDARIKRHNYICELLLEEAKKKDWVVFKEPHIRDSNKELYKPDLIFVKDGRALVVDVTVRYEAAKSSLEEAAAEKVRKYKHLETEVRHLTNAKDVTFVGFPLGARGKWHQDNFKLLTELGLSKSRQVKMAETFSTVALFSSVDIVHMFASRARKSMVM

SEQ ID NO: 1266 - protein, 2087 aa, synthetic construct
MAPKKKRKVSASQDSRSRDNGPDGMEPEGVIESNWNEIVDSFDDMNLSESLLRGIYAYGFEKPSAIQQRAILPCIKGYDVIAQAQSGTGKTATFAISILQQIELDLKATQALVLAPTRELAQQIQKVVMALGDYMGASCHACIGGTNVRAEVQKLQMEAPHIIVGTPGRVFDMLNRRYLSPKYIKMFVLDEADEMLSRGFKDQIYDIFQKLNSNTQVVLLSATMPSDVLEVTKKFMRDPIRILVKKEELTLEGIRQFYINVEREEWKLDTLCDLYETLTITQAVIFINTRRKVDWLTEKMHARDFTVSAMHGDMDQKERDVIMREFRSGSSRVLITTDLLARGIDVQQVSLVINYDLPTNRENYIHRIGRGGRFGRKGVAINMVTEEDKRTLRDIETFYNTSIEEMPLNVADLISGSETPGTSESATPEGSNISGSSCGSPNSADTSSDFKDLWTKLKECHDREVQGLQVKVTKLKQERILDAQRLEEFFTKNQQLREQQKVLHETIKVLEDRLRAGLCDRCAVTEEHMRKKQQEFENIRQQNLKLITELMNERNTLQEENKKLSEQLQQKIENDQQHQAAELECEEDVIPDSPITAFSFSGVNRLRRKENPHVRYIEQTHTKLEHSVCANEMRKVSKSSTHPQHNPNENEILVADTYDQSQSPMAKAHGTSSYTPDKSSFNLATVVAETLGLGVQEESETQGPMSPLGDELYHCLEGNHKKQPFESGSETPGTSESATPEGSPKRKVSSAEGAAKEEPKRRSARLSAKPPAKVEAKPKKAAAKDKSSDKKVQTKGKRGAKGKQAEVANQETKEDLPAENGETKTEESPASDEAGEKEAKSDSGSETPGTSESATPESYEQLAPQPCVGETLHSSLPRDSELFVPEEGSSEKESEDAPKTSPPTPGKHGLEQTGEEKVMVTVPDKNPPCPCCGTRVNSVLNLIEHLKVSHGKRRVCFRCAKCGKENSNYHSVVCHFPKCRGPETEKAPAGEWICEVCNRDFTTKIGLGQHKRLAHPAVRNQERIVASQPKETSNRGAHKRCWTKEEEELLIRLEAQFEGHKNINKLIAEHITTKTAKQISDKRRLLSRKPAEEPRMEPGTCHHTRRAAASLRTEPEMSHQAQAEDRDNGPGRRPLPGRPAAGGRTMDEIRRHPDKGNGQQRPTKQKSEEQLQAYYKKTLEERLSAGALNTFPRAFKQVMEGRDIKLVINQTAQDCFGCLESISQIRTATRDKKYTGTREKHPKRPFQKWMKKRAIKKGNYLRFQRLFYLDRGKLAKIILDDIECLSCDIPLSEIYSVFKTRWETTGSFKSLGDFKTYGKADNTAFRELITAKEIEKNVQEMSKGSAPGPDGITLGDVVKMDPEFSLTMEIFNLWLTTGKIPDMVRGCRTVLIPKSSKPDRLKDINNWRPITIGSILLRLFSRIVTARLSKACPLNPRQRGFIRAAGCSENLKLLQTIIWSAKREHRPLGVVFVDIAKAFDTVSHQHIIHALQQREVDPHIVGLVSNMYENISTYITTKRNTHTDKIQIRVGVKQGDPMSPLLFNLAMDPLLCKLEESGKGYHRGQSSITAMAFADDLVLLSDSWEGMNTNISILETFCNLTGLKTQGQKCHGFYIKPTKDSYTINDCAAWTINGTPLNMIDPGESEKYLGLQFDPWIGIARSGLSTKLDEWLQRIDQAPLKPLQKTDILKTYTIPRLIYIADHSEVKAALLETLDRKIRTAVKEWLHLPPCTCDAILYSSTRDGGLGITKLAGLIPSVQARRLHRIAQSSDDTMKCFMEKERMEQLHKKLWIQAGGDRENIPSIWEAPPSSEPPNNVSTNSEWEAPTQKPKFPKPCNWRKNEFKKWTKLASQGRGIVNFERDKISNHWIQYYRGIPHRKLLTALQLRANVYPTREFLARGRQDQYIKACRHCDADIESCAHIIGNCPVTQDARIKRHNKICELLLEEAKKKDWVVFKEPHIRDSNKELYKPDLIFVKDGRALVVDVTVRYEAAKSSLEEAAAEKVRKYKHLETEVRHLTNAKDVTFVGFPLGARGKWHQDNFKLLTELGLSKSRQVKMAETFSTVALFSSVDIVHMFASRARKSMVM

SEQ ID NO: 1267 - protein, 1971 aa, synthetic construct; identical to SEQ ID NO: 782

SEQ ID NO: 1268 - protein, 1970 aa, synthetic construct
MAPKKKRKVDRKTRLSEPPTLALRLKPYKTAIQQLRSVIRALKENTTVTFLPTPSLILQTVRSHCVSKITFNSSCLYITDKSFQPKTINNSTPLLGNFMYLTSSKDLTKFYVQDISDLSAKISMCAPDFNMEFSSACVHGQDIVRESENSAVHVDLDFGVVADLLKWIGPHTRVKRNVKKAPCPTGTVQILVHAGPPAIKFILTNGSELEFTANNRVSFHGVKNMRINVQLKNFYQTLLNCAVTKLPCTLRIVTEHDTLLYVASRNGLFAVENFLTEEPFQRGDPFDKNYVGNSGKSRSGSETPGTSESATPEGSNISGSSCGSPNSADTSSDFKDLWTKLKECHDREVQGLQVKVTKLKQERILDAQRLEEFFTKNQQLREQQKVLHETIKVLEDRLRAGLCDRCAVTEEHMRKKQQEFENIRQQNLKLITELMNERNTLQEENKKLSEQLQQKIENDQQHQAAELECEEDVIPDSPITAFSFSGVNRLRRKENPHVRYIEQTHTKLEHSVCANEMRKVSKSSTHPQHNPNENEILVADTYDQSQSPMAKAHGTSSYTPDKSSFNLATVVAETLGLGVQEESETQGPMSPLGDELYHCLEGNHKKQPFESGSETPGTSESATPEGSPKRKVSSAEGAAKEEPKRRSARLSAKPPAKVEAKPKKAAAKDKSSDKKVQTKGKRGAKGKQAEVANQETKEDLPAENGETKTEESPASDEAGEKEAKSDSGSETPGTSESATPESYEQLAPQPCVGETLHSSLPRDSELFVPEEGSSEKESEDAPKTSPPTPGKHGLEQTGEEKVMVTVPDKNPPCPCCGTRVNSVLNLIEHLKVSHGKRGVCFRCAKCGKENSNYHSVVCHFKKCRGPETEKAPAGEWICEVCNRDFTTKIGLGQHKRLAHPAVRNQERIVASQPKETSNRGAHKRCWTKEEEELLIRLEAQFEGNKNINKLIAEHITTKTAKQISDKRRLLSRKPAEEPREEPGTCHHTRRAAASLRTEPEMSHHAQAEDRDNGPGRRPLPGRAAAGGRTMDEIRRHPDKGNGQQRPTKQKSEEQLQAYYKKTLEERLSAGALNTFPRAFKQVMEGRDIKLVINQTAQDCFGCLESISQIRTATRDKKDTVTREKHPKKPFQKWMKKRAIKKGNYLRFQRLFYLDRGKLAKIILDDIECLSCDIPPSEIYSVFKARWETAGKFTSLGDFKFTEKVDNSAFRDLITAKEVEKNMQEMSKGSAPGPDGITLRDIQKMDPKLSRTTEIFNLWLAAGKIPDGVRECRTVLIPKSTKPERLKDINNWRPITIGSTLLRLFSRILTARLSKACPLNPRQKGFIQAAGCSENLQLLQSIIWSAKREHRPLGVVFVDIAKAFDTVSHKHILHVLQRRGVDPHIIGLVSDMYENIHTSITTKKARTDRIQIRVGVKQGDPMSPLLFNLAMDPLLCELETNGRGHHRGTNCITAMAFADDLVLLSDSWEDMKSNIKILEAFCDLTGLKTQGEKCHGFYIKPTKDSYTVNDCAAWTINGTPLNMILPGESEKYLGLQIDPWTGLAKSDLSTKLDSWLEQIDRVPLKPLQKIELLKTYTIPRLTYVADHSDLKVSFLETLDQKIRTIVKDWLHLPPCTCDAILYSSTRDGGLGITKLAGLIPSVQARRLHRIAQSSDDTMKCFMEKEKMEQLHKKLWIQAGGDRENIPSIWEAPPSSEPPNNVSTNSEWEAPTQKDKFPKPCNWRKNEFKKWTKLASQGRGIVNFERDKISNHWIQYYRRIPHRKLLTALQLRANVYPTREFLARGRQDQYIKACRHCDADNESCAHIIGNCPVTQDARIKRHNYICELLLEEAKKKDWVVFKEPHIRDSNKELYKPDLIFVKDGRALVVDVTVRYEAAKSSLEEAAAEKVRKYKHLETEVRHLTNAKDVTFVGFPLGARGKWHQDNFKLLTELGLSKSRQVKMAETFSTVALFSSVDIVHMFASRARKSMVM

SEQ ID NO: 1269 - protein, 1855 aa, synthetic construct
MAPKKKRKVDRKTRLSEPPTLALRLKPYKTAIQQLRSVIRALKENTTVTFLPTPSLILQTVRSHCVSKITFNSSCLYITDKSFQPKTINNSTPLLGNFMYLTSSKDLTKFYVQDISDLSAKISMCAPDFNMEFSSACVHGQDIVRESENSAVHVDLDFGVVADLLKWIGPHTRVKRNVKKAPCPTGTVQILVHAGPPAIKFILTNGSELEFTANNRVSFHGVKNMRINVQLKNFYQTLLNCAVTKLPCTLRIVTEHDTLLYVASRNGLFAVENFLTEEPFQRGDPFDKNYVGNSGKSRSGSETPGTSESATPEGSNISGSSCGSPNSADTSSDFKDLWTKLKECHDREVQGLQVKVTKLKQERILDAQRLEEFFTKNQQLREQQKVLHETIKVLEDRLRAGLCDRCAVTEEHMRKKQQEFENIRQQNLKLITELMNERNTLQEENKKLSEQLQQKIENDQQHQAAELECEEDVIPDSPITAFSFSGVNRLRRKENPHVRYIEQTHTKLEHSVCANEMRKVSKSSTHPQHNPNENEILVADTYDQSQSPMAKAHGTSSYTPDKSSFNLATVVAETLGLGVQEESETQGPMSPLGDELYHCLEGNHKKQPFESGSETPGTSESATPESYEQLAPQPCVGETLHSSLPRDSELFVPEEGSSEKESEDAPKTSPPTPGKHGLEQTGEEKVMVTVPDKNPPCPCCGTRVNSVLNLIEHLKVSHGKRGVCFRCAKCGKENSNYHSVVCHFKKCRGPETEKAPAGEWICEVCNRDFTTKIGLGQHKRLAHPAVRNQERIVASQPKETSNRGAHKRCWTKEEEELLIRLEAQFEGNKNINKLIAEHITTKTAKQISDKRRLLSRKPAEEPREEPGTCHHTRRAAASLRTEPEMSHHAQAEDRDNGPGRRPLPGRAAAGGRTMDEIRRHPDKGNGQQRPTKQKSEEQLQAYYKKTLEERLSAGALNTFPRAFKQVMEGRDIKLVINQTAQDCFGCLESISQIRTATRDKKDTVTREKHPKKPFQKWMKKRAIKKGNYLRFQRLFYLDRGKLAKIILDDIECLSCDIPLSEIYSVFKTRWETTGSFKSLGDFKTYGKADNTAFRELITAKEIEKNVQEMSKGSAPGPDGITLGDVVKMDPEFSRTMEIFNLWLTTGKIPDMVRGCRTVLIPKSSKPDRLKDINNWRPITIGSILLRLFSRIVTARLSKACPLNPRQRGFIRAAGCSENLKLLQTIIWSAKREHRPLGVVFVDIAKAFDTVSHQHIIHALQQREVDPHIVGLVSNMYENISTYITTKRNTHTDKIQIRVGVKQGDPMSPLLFNLAMDPLLCKLEESGKGYHRGQSSITAMAFADDLVLLSDSWENMNTNISILETFCNLTGLKTQGQKCHGFYIKPTKDSYTINDCAAWTINGTPLNMIDPGESEKYLGLQFDPWIGIARSGLSTKLDFWLQRIDQAPLKPLQKTDILKTYTIPRLIYIADHSEVKSALLETLDQKIRTAVKEWLHLPPCTCDAILYSSTRDGGLGITKLAGLIPSVQARRLHRIAQSSDDTMKCFMEKEKMEQLHKKLWIQAGGDRENIPSIWEAPPSSEPPNNVSTNSEWEAPTQKDKFPKPCNWRKNEFKKWTKLASQGRGIVNFERDKISNHWIQYYRRIPHRKLLTALQLRANVYPTREFLARGRQDQYIKACRHCDADNESCAHIIGNCPVTQDARIKRHNYICELLLEEAKKKDWVVFKEPHIRDSNKELYKPDLIFVKDGRALVVDVTVRYEAAKSSLEEAAAEKVRKYKHLETEVRHLTNAKDVTFVGFPLGARGKWHQDNFKLLTELGLSKSRQVKMAETFSTVALFSSVDIVHMFASRARKSMVM

SEQ ID NO: 1270 - protein, 1971 aa, synthetic construct
MAPKKKRKVSASQDSRSRDNGPDGMEPEGVIESNWNEIVDSFDDMNLSESLLRGIYAYGFEKPSAIQQRAILPCIKGYDVIAQAQSGTGKTATFAISILQQIELDLKATQALVLAPTRELAQQIQKVVMALGDYMGASCHACIGGTNVRAEVQKLQMEAPHIIVGTPGRVFDMLNRRYLSPKYIKMFVLDEADEMLSRGFKDQIYDIFQKLNSNTQVVLLSATMPSDVLEVTKKFMRDPIRILVKKEELTLEGIRQFYINVEREEWKLDTLCDLYETLTITQAVIFINTRRKVDWLTEKMHARDFTVSAMHGDMDQKERDVIMREFRSGSSRVLITTDLLARGIDVQQVSLVINYDLPTNRENYIHRIGRGGRFGRKGVAINMVTEEDKRTLRDIETFYNTSIEEMPLNVADLISGSETPGTSESATPEGSNISGSSCGSPNSADTSSDFKDLWTKLKECHDREVQGLQVKVTKLKQERILDAQRLEEFFTKNQQLREQQKVLHETIKVLEDRLRAGLCDRCAVTEEHMRKKQQEFENIRQQNLKLITELMNERNTLQEENKKLSEQLQQKIENDQQHQAAELECEEDVIPDSPITAFSFSGVNRLRRKENPHVRYIEQTHTKLEHSVCANEMRKVSKSSTHPQHNPNENEILVADTYDQSQSPMAKAHGTSSYTPDKSSFNLATVVAETLGLGVQEESETQGPMSPLGDELYHCLEGNHKKQPFESGSETPGTSESATPESYEQLAPQPCVGETLHSSLPRDSELFVPEEGSSEKESEDAPKTSPPTPGKHGLEQTGEEKVMVTVPDKNPPCPCCGTRVNSVLNLIEHLKVSHGKRGVCFRCAKCGKENSNYHSVVCHFKKCRGPETEKAPAGEWICEVCNRDFTTKIGLGQHKRLAHPAVRNQERIVASQPKETSNRGAHKRCWTKEEEELLIRLEAQFEGNKNINKLIAEHITTKTAKQISDKRRLLSRKPAEEPREEPGTCHHTRRAAASLRTEPEMSHHAQAEDRDNGPGRRPLPGRAAAGGRTMDEIRRHPDKGNGQQRPTKQKSEEQLQAYYKKTLEERLSAGALNTFPRAFKQVMEGRDIKLVINQTAQDCFGCLESISQIRTATRDKKDTVTREKHPKKPFQKWMKKRAIKKGNYLRFQRLFYLDRGKLAKIILDDIECLSCDIPLSEIYSVFKTRWETTGSFKSLGDFKTYGKADNTAFRELITAKEIEKNVQEMSKGSAPGPDGITLGDVVKMDPEFSRTMEIFNLWLTTGKIPDMVRGCRTVLIPKSSKPDRLKDINNWRPITIGSILLRLFSRIVTARLSKACPLNPRQRGFIRAAGCSENLKLLQTIIWSAKREHRPLGVVFVDIAKAFDTVSHQHIIHALQQREVDPHIVGLVSNMYENISTYITTKRNTHTDKIQIRVGVKQGDPMSPLLFNLAMDPLLCKLEESGKGYHRGQSSITAMAFADDLVLLSDSWENMNTNISILETFCNLTGLKTQGQKCHGFYIKPTKDSYTINDCAAWTINGTPLNMIDPGESEKYLGLQFDPWIGIARSGLSTKLDFWLQRIDQAPLKPLQKTDILKTYTIPRLIYIADHSEVKSALLETLDQKIRTAVKEWLHLPPCTCDAILYSSTRDGGLGITKLAGLIPSVQARRLHRIAQSSDDTMKCFMEKEKMEQLHKKLWIQAGGDRENIPSIWEAPPSSEPPNNVSTNSEWEAPTQKDKFPKPCNWRKNEFKKWTKLASQGRGIVNFERDKISNHWIQYYRRIPHRKLLTALQLRANVYPTREFLARGRQDQYIKACRHCDADNESCAHIIGNCPVTQDARIKRHNYICELLLEEAKKKDWVVFKEPHIRDSNKELYKPDLIFVKDGRALVVDVTVRYEAAKSSLEEAAAEKVRKYKHLETEVRHLTNAKDVTFVGFPLGARGKWHQDNFKLLTELGLSKSRQVKMAETFSTVALFSSVDIVHMFASRARKSMVM

SEQ ID NO: 1271 - protein, 2086 aa, synthetic construct
MAPKKKRKVSASQDSRSRDNGPDGMEPEGVIESNWNEIVDSFDDMNLSESLLRGIYAYGFEKPSAIQQRAILPCIKGYDVIAQAQSGTGKTATFAISILQQIELDLKATQALVLAPTRELAQQIQKVVMALGDYMGASCHACIGGTNVRAEVQKLQMEAPHIIVGTPGRVFDMLNRRYLSPKYIKMFVLDEADEMLSRGFKDQIYDIFQKLNSNTQVVLLSATMPSDVLEVTKKFMRDPIRILVKKEELTLEGIRQFYINVEREEWKLDTLCDLYETLTITQAVIFINTRRKVDWLTEKMHARDFTVSAMHGDMDQKERDVIMREFRSGSSRVLITTDLLARGIDVQQVSLVINYDLPTNRENYIHRIGRGGRFGRKGVAINMVTEEDKRTLRDIETFYNTSIEEMPLNVADLISGSETPGTSESATPEGSNISGSSCGSPNSADTSSDFKDLWTKLKECHDREVQGLQVKVTKLKQERILDAQRLEEFFTKNQQLREQQKVLHETIKVLEDRLRAGLCDRCAVTEEHMRKKQQEFENIRQQNLKLITELMNERNTLQEENKKLSEQLQQKIENDQQHQAAELECEEDVIPDSPITAFSFSGVNRLRRKENPHVRYIEQTHTKLEHSVCANEMRKVSKSSTHPQHNPNENEILVADTYDQSQSPMAKAHGTSSYTPDKSSFNLATVVAETLGLGVQEESETQGPMSPLGDELYHCLEGNHKKQPFESGSETPGTSESATPEGSPKRKVSSAEGAAKEEPKRRSARLSAKPPAKVEAKPKKAAAKDKSSDKKVQTKGKRGAKGKQAEVANQETKEDLPAENGETKTEESPASDEAGEKEAKSDSGSETPGTSESATPESYEQLAPQPCVGETLHSSLPRDSELFVPEEGSSEKESEDAPKTSPPTPGKHGLEQTGEEKVMVTVPDKNPPCPCCGTRVNSVLNLIEHLKVSHGKRGVCFRCAKCGKENSNYHSVVCHFKKCRGPETEKAPAGEWICEVCNRDFTTKIGLGQHKRLAHPAVRNQERIVASQPKETSNRGAHKRCWTKEEEELLIRLEAQFEGNKNINKLIAEHITTKTAKQISDKRRLLSRKPAEEPREEPGTCHHTRRAAASLRTEPEMSHHAQAEDRDNGPGRRPLPGRAAAGGRTMDEIRRHPDKGNGQQRPTKQKSEEQLQAYYKKTLEERLSAGALNTFPRAFKQVMEGRDIKLVINQTAQDCFGCLESISQIRTATRDKKDTVTREKHPKKPFQKWMKKRAIKKGNYLRFQRLFYLDRGKLAKIILDDIECLSCDIPPSEIYSVFKARWETAGKFTSLGDFKFTEKVDNSAFRDLITAKEVEKNMQEMSKGSAPGPDGITLRDIQKMDPKLSRTTEIFNLWLAAGKIPDGVRECRTVLIPKSTKPERLKDINNWRPITIGSTLLRLFSRILTARLSKACPLNPRQKGFIQAAGCSENLQLLQSIIWSAKREHRPLGVVFVDIAKAFDTVSHKHILHVLQRRGVDPHIIGLVSDMYENIHTSITTKKARTDRIQIRVGVKQGDPMSPLLFNLAMDPLLCELETNGRGHHRGTNCITAMAFADDLVLLSDSWEDMKSNIKILEAFCDLTGLKTQGEKCHGFYIKPTKDSYTVNDCAAWTINGTPLNMILPGESEKYLGLQIDPWTGLAKSDLSTKLDSWLEQIDRVPLKPLQKIELLKTYTIPRLTYVADHSDLKVSFLETLDQKIRTIVKDWLHLPPCTCDAILYSSTRDGGLGITKLAGLIPSVQARRLHRIAQSSDDTMKCFMEKEKMEQLHKKLWIQAGGDRENIPSIWEAPPSSEPPNNVSTNSEWEAPTQKDKFPKPCNWRKNEFKKWTKLASQGRGIVNFERDKISNHWIQYYRRIPHRKLLTALQLRANVYPTREFLARGRQDQYIKACRHCDADNESCAHIIGNCPVTQDARIKRHNYICELLLEEAKKKDWVVFKEPHIRDSNKELYKPDLIFVKDGRALVVDVTVRYEAAKSSLEEAAAEKVRKYKHLETEVRHLTNAKDVTFVGFPLGARGKWHQDNFKLLTELGLSKSRQVKMAETFSTVALFSSVDIVHMFASRARKSMVM

SEQ ID NO: 1272-1291 - skipped (20 entries)

SEQ ID NO: 1292 - protein, 1391 aa, synthetic construct
MASCPKPGPPVSAGAMSLESGLTTHSVLAIERGPNSLANSGSDFGGGGLGLPLRLLRVSVGTQTSRSDWVDLVSWSHPGPTSKSQQVDLVSLFPKHRVDLLSKNDQVDLVAQFLPSKFPPNLAENDLALLVNLEFYRSDLHVYECVHKAAHWEGLSGLPEVYEQLAPQPCVGETLHSSLPRDSELFVPEEGSSEKESEDAPKTSPPTPGKHGLEQTGEEKVMVTVPDKNPPCPCCGTRVNSVLNLIEHLKVSHGKRGVCFRCAKCGKENSNYHSVVCHFKKCRGPETEKAPAGEWICEVCNRDFTTKIGLGQHKRLAHPAVRNQERIVASQPKETSNRGAHKRCWTKEEEELLIRLEAQFEGNKNINKLIAEHITTKTAKQISDKRRLLSRKPAEEPRMEPGTCHHTRRAAASLRTEPEMSHHAQAEDRDNGPGRRPLPGRAAAGGRTMDEIRRHPDKGNGQQRPTKQKSEEQLRSHYRKSIAEWIRSQKITSLRKIFERVIEGKEDLPSIVDEAAQDCYACLKRDLTEGEGRQIQKIREIRRTHPQKPSKQWTKKRARKRGQFLRFQRLFYLDRGKLAGIILDDVESLKCGIPLDVVHEVFKSRWESPGTFKGLGTFKTIGQADNSAFQAMITMKEIKKNIREMNKNAAPGPDGISLRDLMKIDPQCAKLMELFNLWLLTGYIPDGVKNCRTILIPKSTVPEKLNDVNNWRPITIGSIILRLFSKILTARLTKACPINIRQRGFIKSSGCSENLKLLQLIIRYAKREHRPLGVVFVDLAKAFDTVSHSHILSVLKQKGVDEHIIKLIENSYYNIKTYIDLKNEKSDSIGIRIGVKQGDPMSPILFNLSVDPLLCKLEEMGNGFQCHSQNVTALAFADDLVLLSGSWEGMQNNITIVETFCELTGLKMQGEKCHGFYIKPTKDSYTINDCPVWTINGTPLNMIEPGSSEKYLGLYVDPWIGISKPELLEKVDRWLVKVGKAPLKPFQKVDILKGYLIPRVIYLADQANLKPTYLESIDLAIRTGVKEWLHLPACTCDAILYSNTQDGGLGISRLAALIPSVQVRRLHRIAQTSDEVLKTIVKREGIEREFEKLWLMAGGDKERIPSIWDPKTVMIISETGGDQILSEWEIPNPKLIYPKPCNWRKREFNNWTKLLSQGRGIVNFEKDKISNNWLIHYRGIPQRKLITALQLRANIYPTREFLARGRSETYIKSCRHCQADNETCAHIIGYCPSVQDARIKRHNQICHILAEEAKRKDWLVYQEPLLRDQQNELYKPDLIFVKGNQAIVTDITIRYETTITTLEEAALEKAKKYVHLESQVQDLTNTSVINFTGFPLGSRGKWYQGNYKILNELGLSNSRQEKVARRLSNYALFSSVDIIHMFASKARTEVR

SEQ ID NO: 1293 - protein, 1390 aa, synthetic construct
MASCPKPGPPVSAGAMSLESGLTTHSVLAIERGPNSLANSGSDFGGGGLGLPLRLLRVSVGTQTSRSDWVDLVSWSHPGPTSKSQQVDLVSLFPKHRVDLLSKNDQVDLVAQFLPSKFPPNLAENDLALLVNLEFYRSDLHVYECVHKAAHWEGLSGLPEVYEQLAPQPCVGETLHSSLPRDSELFVPEEGSSEKESEDAPKTSPPTPGKHGLEQTGEEKVMVTVPDKNPPCPCCGTRVNSVLNLIEHLKVSHGKRGVCFRCAKCGKENSNYHSVVCHFKKCRGPETEKAPAGEWICEVCNRDFTTKIGLGQHKRLAHPAVRNQERIVASQPKETSNRGAHKRCWTKEEEELLIRLEAQFEGNKNINKLIAEHITTKTAKQISDKRRLLSRKPAEEPRMEPGTCHHTRRAAASLRTEPEMSHHAQAEDRDNGPGRRPLPGRAAAGGRTMDEIRRHPDKGNGQQRPTKQKSEEQLQAYYKKTLEERLSAGALNTFPRAFKQVMEGRDIKLVINQTAQDCFGCLESISQIRTATRDKKDTVTREKHPKKPFQKWMKKRAIKKGNYLRFQRLFYLDRGKLAKIILDDIECLSCDIPLSEIYSVFKTRWETTGSFKSLGDFKTYGKADNTAFRELITAKEIEKNVQEMSKGSAPGPDGITLGDVVKMDPEFSRTMEIFNLWLTTGKIPDMVRGCRTVLIPKSSDPDRLKDINNWRPITIGSILLRLFSRIVTARLSKACPLNPRQRGFIRAAGCSENLKLLQTIIWSAKREHRPLGVVFVDIAKAFDTVSHQHIIHALQQREVDPHIVGLVSNMYENISTYITTKRNTHTDKIQIRVGVKQGDPMSPLLFNLAMDPLLCKLEESGKGYHRGQSSITAMAFADDLVLLSDSWENMNTNISILETFCNLTGLKTQGQKCHGFYIKPTKKSYTINDCAAWTINGTPLNMIDPGESEKYLGLQFDPWIGIARSGLSTKLDFWLQRIDQAPLKPLQKLDILKTYTIPRLIYIADHSEVKSALLETLDQKIRTAVKEWLHLPPCTCDAILYSSTRDGGLGITKLAGLIPSVQARRLHRIAQSSDDTMKCFMEKEKMEQLHKKLWIQAGGDRENIPSIWEAPPSSEPPNNVSTNSEWEAPTQKDKFPKPCNWRKNEFKKWTKLASQGRGIVNFERDKISNHWIQYYRRIPHRKLLTALQLRANVYPTREFLARGRQDQYIKACRHCDADNESCAHIIGNCPVTQDARIKRHNYICELLLEEAKKKDWVVFKEPHIRDSNKELYKPDLIFVKDGRALVVDVTVRYEAAKSSLEEAAAEKVRKYKHLETEVRHLTNAKDVTFVGFPLGARGKWHQDNFKLLTELGLSKSRQVKMAETFSTVALFSSVDIVHMFASRARKSMVM

SEQ ID NO: 1294 - protein, 1238 aa, synthetic construct
MGWSGRIWFVTVATQTKYSDWAFTVHSITNPELAGDGIADLRGLEFVNSEKGYYVGHSPSRSSLLATLPEVYETPRVMGKVTSPSSVLTEHEGDRTSSPPRTPPPILETGADLPQEGTPVVKVPDDNPACPCCGNRIGRISGLIDHLKRTHGKKKILFQCAKCGRTNLKHHSIACHVPKCKGAKGTSPLRGWACEECNRTFGTKIGLSQHKRLAHPVTRNIERITASRPKEESARGAHRRCWSEEEVELLKKLEKQYEGNKNINKLIAEHLPSKTAKQISDKRRGLIKSPSKKNGKDLTLREQLTEEGEHLIESGSQEGGGLQAYYKKTLEERLSAGALNTFPRAFKQVMEGRDIKLVINQTAQDCFGCLESISQIRTATRDKKDTVTREKHPKKPFQKWMKKRAIKKGNYLRFQRLFYLDRGKLAKIILDDIECLSCDIPLSEIYSVFKTRWETTGSFKSLGDFKTYGKADNTAFRELITAKEIEKNVQEMSKGSAPGPDGITLGDVVKMDPEFSRTMEIFNLWLTTGKIPDMVRGCRTVLIPKSSDPDRLKDINNWRPITIGSILLRLFSRIVTARLSKACPLNPRQRGFIRAAGCSENLKLLQTIIWSAKREHRPLGVVFVDIAKAFDTVSHQHIIHALQQREVDPHIVGLVSNMYENISTYITTKRNTHTDKIQIRVGVKQGDPMSPLLFNLAMDPLLCKLEESGKGYHRGQSSITAMAFADDLVLLSDSWENMNTNISILETFCNLTGLKTQGQKCHGFYIKPTKKSYTINDCAAWTINGTPLNMIDPGESEKYLGLQFDPWIGIARSGLSTKLDFWLQRIDQAPLKPLQKLDILKTYTIPRLIYIADHSEVKSALLETLDQKIRTAVKEWLHLPPCTCDAILYSSTRDGGLGITKLAGLIPSVQARRLHRIAQSSDDTMKCFMEKEKMEQLHKKLWIQAGGDRENIPSIWEAPPSSEPPNNVSTNSEWEAPTQKDKFPKPCNWRKNEFKKWTKLASQGRGIVNFERDKISNHWIQYYRRIPHRKLLTALQLRANVYPTREFLARGRQDQYIKACRHCDADNESCAHIIGNCPVTQDARIKRHNYICELLLEEAKKKDWVVFKEPHIRDSNKELYKPDLIFVKDGRALVVDVTVRYEAAKSSLEEAAAEKVRKYKHLETEVRHLTNAKDVTFVGFPLGARGKWHQDNFKLLTELGLSKSRQVKMAETFSTVALFSSVDIVHMFASRARKSMVM

SEQ ID NO: 1295 - protein, 1243 aa, synthetic construct
MGWSGRIWFVTVATQTKYSDWAFTVHSITNPELAGDGIADLRGLEFVNSEKGYYVGHSPSRSSLLATLPEVYETPRVMGKVTSPRDCEAVLVGEGEGSSEEVTPEPSPPEPETTSVAASPTLPVTNVEQSSESPITVIVPDKNPSCPCCGIRASGVSGLIEHLREVHRRREVCFRCSKCEKENTNYHSIICHFPKCKGKEETSAPAGEWSCEVCGRDFNTKIGLSQHKRLAHPVTRNIERITASRPKEESARGAHRRCWSEEEVELLKKLEKQYEGNKNINKLIAEHLPSKTAKQISDKRRGLIKSPSKGNGQQRPTKQKSEEQLQAYYKKTLEERLSAGALNTFPRAFKQVMEGRDIKLVINQTAQDCFGCLESISQIRTATRDKKDTVTREKHPKKPFQKWMKKRAIKKGNYLRFQRLFYLDRGKLAKIILDDIECLSCDIPLSEIYSVFKTRWETTGSFKSLGDFKTYGKADNTAFRELITAKEIEKNVQEMSKGSAPGPDGITLGDVVKMDPEFSRTMEIFNLWLTTGKIPDMVRGCRTVLIPKSSDPDRLKDINNWRPITIGSILLRLFSRIVTARLSKACPLNPRQRGFIRAAGCSENLKLLQTIIWSAKREHRPLGVVFVDIAKAFDTVSHQHIIHALQQREVDPHIVGLVSNMYENISTYITTKRNTHTDKIQIRVGVKQGDPMSPLLFNLAMDPLLCKLEESGKGYHRGQSSITAMAFADDLVLLSDSWENMNTNISILETFCNLTGLKTQGQKCHGFYIKPTKKSYTINDCAAWTINGTPLNMIDPGESEKYLGLQFDPWIGIARSGLSTKLDFWLQRIDQAPLKPLQKLDILKTYTIPRLIYIADHSEVKSALLETLDQKIRTAVKEWLHLPPCTCDAILYSSTRDGGLGITKLAGLIPSVQARRLHRIAQSSDDTMKCFMEKEKMEQLHKKLWVQAGGDREKVPAIWEARPTIESPNLQEVGVSSEWEAPTLKNKFPKPCNWRKIEFEKWTNLISQGRGIGNFKGDQISNNWLQHYRNIPHRKLLTAVQLRANVYPTREFLARGRQDKYIRTCRHCDAANETCAHIIGNCPITQDARIKRHNYICQVLSEKAIGKDWIVYKEPHIRDSNKELYKPDLIFVKDNRAYVVDVTVRYESDETSLEMAATEKVDKYKHLTKEIRTITNAKDIVFMGFPLGARGKWYQGNFELLKALGLSKSDREKTARSLSSIALMSSVDIVHIFASKSRTCTTL

SEQ ID NO: 1296 - protein, 1302 aa, synthetic construct
MGRPMRISFVSVATQTSPLDLRDNVVSCSIQDHKTGGLLEGRFEIRGLEFVNSDLEGLKCQQSPTLTDLLAVLPEVYEVPNSFSLGDKNTCPTPVEDENEEEEPSPLGAVAGTSPLPSTPVSRSRDDLPTEGTPVVKIPDKNTSCPCCGNRMGKLSGLIEHLKRAHGKKKILFQCARCGRTDVKHHSIACHFPKCKGPVEASPERSWKCEVCNRDFTTKIGLGQHKRLAHPAVRNQERIVASQPKETSNRGAHKRCWTKEEEELLIRLEAQFEGNKNINKLIAEHITTKTAKQISDKRRLLSRKPAEEPRMEPGTCHHTRRAAASLRTEPEMSHHAQAEDRDNGPGRRPLPGRAAAGGRTMDEIRRHPDKGNGQQRPTKQKSEEQLQAYYKKTLEERLSAGALNTFPRAFKQVMEGRDIKLVINQTAQDCFGCLESISQIRTATRDKKDTVTREKHPKKPFQKWMKKRAIKKGNYLRFQRLFYLDRGKLAKIILDDIECLSCDIPLSEIYSVFKTRWETTGSFKSLGDFKTYGKADNTAFRELITAKEIEKNVQEMSKGSAPGPDGITLGDVVKMDPEFSRTMEIFNLWLTTGKIPDMVRGCRTVLIPKSSDPDRLKDINNWRPITIGSILLRLFSRIVTARLSKACPLNPRQRGFIRAAGCSENLKLLQTIIWSAKREHRPLGVVFVDIAKAFDTVSHQHIIHALQQREVDPHIVGLVSNMYENISTYITTKRNTHTDKIQIRVGVKQGDPMSPLLFNLAMDPLLCKLEESGKGYHRGQSSITAMAFADDLVLLSDSWENMNTNISILETFCNLTGLKTQGQKCHGFYIKPTKKSYTINDCAAWTINGTPLNMIDPGESEKYLGLQFDPWIGIARSGLSTKLDFWLQRIDQAPLKPLQKLDILKTYTIPRLIYIADHSEVKSALLETLDQKIRTAVKEWLHLPPCTCDAILYSSTRDGGLGITKLAGLIPSVQARRLHRIAQSSDDTMKCFMEKEKMEQLHKKLWIQAGGDRENIPSIWEAPPSSEPPNNVSTNSEWEAPTQKDKFPKPCNWRKNEFKKWTKLASQGRGIVNFERDKISNHWIQYYRRIPHRKLLTALQLRANVYPTREFLARGRQDQYIKACRHCDADNESCAHIIGNCPVTQDARIKRHNYICELLLEEAKKKDWVVFKEPHIRDSNKELYKPDLIFVKDGRALVVDVTIRYESKLSSLADAAAEKVKKYCHLKNQIQELTNAKNIKFKGFPVGARGKWYSGNYEVLKALGISNSRQDKIARCMSRKALFTSVDIVHMFVSHSRSIVRT

SEQ ID NO: 1297 - protein, 1368 aa, synthetic construct
MGRPMRISFVSVATQTSPLDLRDNVVSCSIQDHKTGGLLEGRFEIRGLEFVNSDLEGLKCQQSPTLTDLLAVLPEVYEVPNSFSLGDKNTCPTPVEDENEEEEPSPLGAVAGTSPLPSTPVSRSRDDLPTEGTPVVKIPDKNTSCPCCGNRMGKLSGLIEHLKRAHGKKKILFQCARCGRTDVKHHSIACHFPKCKGPVEASPERSWKCEVCGRDFNTKIGLGQHKRLAHPAVRNQERVAASHPKENSKRGAHKKCWTEEEEKLLIELIAQFEGHANINKLIAEHITTKTAKQISEKRRLLSKKLMVVEAECEPGPSHRTRRAAAEIRKGAEMNHHNEDAAEDNGAGRGPLTRRAAARGETKEEISQFPDKANDQQEASSSGRGPVTRRAAAGKKTKKSIDHPTDKANGQQVAISTRRGCLNRGVTAGVETIEGSSHLPDKDSDGQGTPSREKEGQLQDHYQEVIGAWLSDGRINTFPEAFKGLLGKREIQATINQSILDCFGGIDSKSQVNKMTRDKKDKKPGRPPQKWMKKRAIKRGSYLRFQRLFHLDRGKLAKIVLDNIECLTCDIPPSEIYSVFKARWETAGKFTSLGDFKFTEKVDNSAFRDLITAKEVEKNMQEMSKGSAPGPDGITLRDIQKMDPKLSRTTEIFNLWLAAGKIPDGVRECRTVLIPKSTKPERLKDINNWRPITIGSTLLRLFSRILTARLSKACPLNPRQKGFIQAAGCSENLQLLQSIIWSAKREHRPLGVVFVDIAKAFDTVSHKHILHVLQRRGVDPHIIGLVSDMYENIHTSITTKKARTDRIQIRVGVKQGDPMSPLLFNLAMDPLLCELETNGRGHHRGTNCITAMAFADDLVLLSDSWEDMKSNIKILEAFCDLTGLKTQGEKCHGFYIKPTKDSYTVNDCAAWTINGTPLNMILPGESEKYLGLQIDPWTGLAKSDLSTKLDSWLEQIDRVPLKPLQKIELLKTYTIPRLTYVADHSDLKVSFLETLDQKIRTIVKDWLHLPACTCDAILYSSTKDGGLGITKLAKLIPSVQARRLHRIAQSSDETMKQFLHRDKMEAMYQKLWVQAGGDREKVPAIWEARPTIESPNLQEVGVSSEWEAPTLKNKFPKPCNWRKIEFEKWTNLISQGRGIGNFKGDQISNNWLQHYRNIPHRKLLTAVQLRANVYPTREFLARGRQDKYIRTCRHCDAANETCAHIIGNCPITQDARIKRHNYICQVLSEKAIGKDWIVYKEPHIRDSNKELYKPDLIFVKDNRAYVVDVTIRYETTITTLEEAALEKAKKYVHLESQVQDLTNTSVINFTGFPLGSRGKWYQGNYKILNELGLSNSRQEKVARRLSNYALFSSVDIIHMFASKARTEVR

SEQ ID NO: 1298 - protein, 1303 aa, synthetic construct
MGWSGRIWFVTVATQTKYSDWAFTVHSITNPELAGDGIADLRGLEFVNSEKGYYVGHSPSRSSLLATLPEVYETPRVMGKVTSPSSVLTEHEGSSEEVTPEPSPPEPETTSVAASPTLPVTNVEQSSESPITVIVPDKNPSCPCCGIRASGVSGLIEHLREVHRRREVCFRCSKCEKENTNYHSIICHFPKCKGKEETSAPAGEWSCEVCGRDFNTKIGLGQHKRLAHPAVRNQERVAASHPKENSKRGAHKKCWTEEEEKLLIELIAQFEGHANINKLIAEHITTKTAKQISEKRRLLSKKLMVVEAECEPGPSHRTRRAAAEIRKGAEMNHHNEDAAEDNGAGRGPLTRRAAARGETKEEISQFPDKGNGQQRPTKQKSEEQLQAYYKKTLEERLSAGALNTFPRAFKQVMEGRDIKLVINQTAQDCFGCLESISQIRTATRDKKDTVTREKHPKKPFQKWMKKRAIKKGNYLRFQRLFYLDRGKLAKIILDDIECLSCDIPLSEIYSVFKTRWETTGSFKSLGDFKTYGKADNTAFRELITAKEIEKNVQEMSKGSAPGPDGITLGDVVKMDPEFSRTMEIFNLWLTTGKIPDMVRGCRTVLIPKSSDPDRLKDINNWRPITIGSILLRLFSRIVTARLSKACPLNPRQRGFIRAAGCSENLKLLQTIIWSAKREHRPLGVVFVDIAKAFDTVSHQHIIHALQQREVDPHIVGLVSNMYENISTYITTKRNTHTDKIQIRVGVKQGDPMSPLLFNLAMDPLLCKLEESGKGYHRGQSSITAMAFADDLVLLSDSWENMNTNISILETFCNLTGLKTQGQKCHGFYIKPTKKSYTINDCAAWTINGTPLNMIDPGESEKYLGLQFDPWIGIARSGLSTKLDFWLQRIDQAPLKPLQKLDILKTYTIPRLIYIADHSEVKSALLETLDQKIRTAVKEWLHLPPCTCDAILYSSTRDGGLGITKLAGLIPSVQARRLHRIAQSSDDTMKCFMEKEKMEQLHKKLWVQAGGDREKVPAIWEARPTIESPNLQEVGVSSEWEAPTLKNKFPKPCNWRKIEFEKWTNLISQGRGIGNFKGDQISNNWLQHYRNIPHRKLLTAVQLRANVYPTREFLARGRQDKYIRTCRHCDAANETCAHIIGNCPITQDARIKRHNYICQVLSEKAIGKDWIVYKEPHIRDSNKELYKPDLIFVKDNRAYVVDVTVRYESDETSLEMAATEKVDKYKHLTKEIRTITNAKDIVFMGFPLGARGKWYQGNFELLKALGLSKSDREKTARSLSSIALMSSVDIVHIFASKSRTCTTL

SEQ ID NO: 1299 - protein, 1306 aa, synthetic construct
MSKPDPLNVNMSTPFLGTQMRLLRVSTGTQTSMSDWADWAQRLCGTATRSALCKVVPVSLLSRHQTELLAMGHGSQMPLNAPLNTPDLTESELACLVLDWEFYRTDLSASSFNLVQFSANRESLSGLPEVYEQPTPFQPEGEKICPPRDCEAVLVGEGEGSSEEVTPEPSPPEPETTSVAASPTLPVTNVEQSSESPITVIVPDKNPSCPCCGIRASGVSGLIEHLREVHRRREVCFRCSKCEKENTNYHSIICHFPKCKGKEETSAPAGEWSCEVCGRDFNTKIGLSQHKRLAHPVTRNIERITASRPKEESARGAHRRCWSEEEVELLKKLEKQYEGNKNINKLIAEHLPSKTAKQISDKRRGLIKSPSKGNGQQRPTKQKSEEQLQAYYKKTLEERLSAGALNTFPRAFKQVMEGRDIKLVINQTAQDCFGCLESISQIRTATRDKKDTVTREKHPKKPFQKWMKKRAIKKGNYLRFQRLFYLDRGKLAKIILDDIECLSCDIPLSEIYSVFKTRWETTGSFKSLGDFKTYGKADNTAFRELITAKEIEKNVQEMSKGSAPGPDGITLGDVVKMDPEFSRTMEIFNLWLTTGKIPDMVRGCRTVLIPKSSDPDRLKDINNWRPITIGSILLRLFSRIVTARLSKACPLNPRQRGFIRAAGCSENLKLLQTIIWSAKREHRPLGVVFVDIAKAFDTVSHQHIIHALQQREVDPHIVGLVSNMYENISTYITTKRNTHTDKIQIRVGVKQGDPMSPLLFNLAMDPLLCKLEESGKGYHRGQSSITAMAFADDLVLLSDSWENMNTNISILETFCNLTGLKTQGQKCHGFYIKPTKKSYTINDCAAWTINGTPLNMIDPGESEKYLGLQFDPWIGIARSGLSTKLDFWLQRIDQAPLKPLQKLDILKTYTIPRLIYIADHSEVKSALLETLDQKIRTAVKEWLHLPPCTCDAILYSSTRDGGLGITKLAGLIPSVQARRLHRIAQSSDDTMKCFMEKEKMEQLHKKLWVQAGGDREKVPAIWEARPTIESPNLQEVGVSSEWEAPTLKNKFPKPCNWRKIEFEKWTNLISQGRGIGNFKGDQISNNWLQHYRNIPHRKLLTAVQLRANVYPTREFLARGRQDKYIRTCRHCDAANETCAHIIGNCPITQDARIKRHNYICQVLSEKAIGKDWIVYKEPHIRDSNKELYKPDLIFVKDNRAYVVDVTVRYESDETSLEMAATEKVDKYKHLTKEIRTITNAKDIVFMGFPLGARGKWYQGNFELLKALGLSKSDREKTARSLSSIALMSSVDIVHIFASKSRTCTTL

SEQ ID NO: 1300 - protein, 1339 aa, synthetic construct
MASCPKPGPPVSAGAMSLESGLTTHSVLAIERGPNSLANSGSDFGGGGLGLPLRLLRVSVGTQTSRSDWVDLVSWSHPGPTSKSQQVDLVSLFPKHRVDLLSKNDQVDLVAQFLPSKFPPNLAENDLALLVNLEFYRSDLHVYECVHKAAHWEGLSGLPEVYEQLAPQPCVGETLHSSLPRDCEAVLVGEGEGSSEEVTPEPSPPEPETTSVAASPTLPVTNVEQSSESPITVIVPDKNPSCPCCGIRASGVSGLIEHLREVHRRREVCFRCSKCEKENTNYHSIICHFPKCKGKEETSAPAGEWSCEVCGRDFNTKIGLSQHKRLAHPVTRNIERITASRPKEESARGAHRRCWSEEEVELLKKLEKQYEGNKNINKLIAEHLPSKTAKQISDKRRGLIKSPSKGNGQQRPTKQKSEEQLQAYYKKTLEERLSAGALNTFPRAFKQVMEGRDIKLVINQTAQDCFGCLESISQIRTATRDKKDTVTREKHPKKPFQKWMKKRAIKKGNYLRFQRLFYLDRGKLAKIILDDIECLSCDIPLSEIYSVFKTRWETTGSFKSLGDFKTYGKADNTAFRELITAKEIEKNVQEMSKGSAPGPDGITLGDVVKMDPEFSRTMEIFNLWLTTGKIPDMVRGCRTVLIPKSSDPDRLKDINNWRPITIGSILLRLFSRIVTARLSKACPLNPRQRGFIRAAGCSENLKLLQTIIWSAKREHRPLGVVFVDIAKAFDTVSHQHIIHALQQREVDPHIVGLVSNMYENISTYITTKRNTHTDKIQIRVGVKQGDPMSPLLFNLAMDPLLCKLEESGKGYHRGQSSITAMAFADDLVLLSDSWENMNTNISILETFCNLTGLKTQGQKCHGFYIKPTKKSYTINDCAAWTINGTPLNMIDPGESEKYLGLQFDPWIGIARSGLSTKLDFWLQRIDQAPLKPLQKLDILKTYTIPRLIYIADHSEVKSALLETLDQKIRTAVKEWLHLPPCTCDAILYSSTRDGGLGITKLAGLIPSVQARRLHRIAQSSDDTMKCFMEKEKMEQLHKKLWVQAGGDREKVPAIWEARPTIESPNLQEVGVSSEWEAPTLKNKFPKPCNWRKIEFEKWTNLISQGRGIGNFKGDQISNNWLQHYRNIPHRKLLTAVQLRANVYPTREFLARGRQDKYIRTCRHCDAANETCAHIIGNCPITQDARIKRHNYICQVLSEKAIGKDWIVYKEPHIRDSNKELYKPDLIFVKDNRAYVVDVTVRYESDETSLEMAATEKVDKYKHLTKEIRTITNAKDIVFMGFPLGARGKWYQGNFELLKALGLSKSDREKTARSLSSIALMSSVDIVHIFASKSRTCTTL

SEQ ID NO: 1301 - protein, 1307 aa, synthetic construct
MGWSGRIWFVTVATQTKYSDWAFTVHSITNPELAGDGIADLRGLEFVNSEKGYYVGHSPSRSSLLATLPEVYETPRVMGKVTSPRDCEAVLVGEGEGSSEEVTPEPSPPEPETTSVAASPTLPVTNVEQSSESPITVIVPDKNPSCPCCGIRASGVSGLIEHLREVHRRREVCFRCSKCEKENTNYHSIICHFPKCKGKEETSAPAGEWSCEVCGRDFNTKIGLGQHKRLAHPAVRNQERVAASHPKENSKRGAHKKCWTEEEEKLLIELIAQFEGHANINKLIAEHITTKTAKQISEKRRLLSKKLMVVEAECEPGPSHRTRRAAAEIRKGAEMNHHNEDAAEDNGAGRGPLTRRAAARGETKEEISQFPDKGNGQQRPTKQKSEEQLQAYYKKTLEERLSAGALNTFPRAFKQVMEGRDIKLVINQTAQDCFGCLESISQIRTATRDKKDTVTREKHPKKPFQKWMKKRAIKKGNYLRFQRLFYLDRGKLAKIILDDIECLSCDIPLSEIYSVFKTRWETTGSFKSLGDFKTYGKADNTAFRELITAKEIEKNVQEMSKGSAPGPDGITLGDVVKMDPEFSRTMEIFNLWLTTGKIPDMVRGCRTVLIPKSSDPDRLKDINNWRPITIGSILLRLFSRIVTARLSKACPLNPRQRGFIRAAGCSENLKLLQTIIWSAKREHRPLGVVFVDIAKAFDTVSHQHIIHALQQREVDPHIVGLVSNMYENISTYITTKRNTHTDKIQIRVGVKQGDPMSPLLFNLAMDPLLCKLEESGKGYHRGQSSITAMAFADDLVLLSDSWENMNTNISILETFCNLTGLKTQGQKCHGFYIKPTKKSYTINDCAAWTINGTPLNMIDPGESEKYLGLQFDPWIGIARSGLSTKLDFWLQRIDQAPLKPLQKLDILKTYTIPRLIYIADHSEVKSALLETLDQKIRTAVKEWLHLPPCTCDAILYSSTRDGGLGITKLAGLIPSVQARRLHRIAQSSDDTMKCFMEKEKMEQLHKKLWVQAGGDREKVPAIWEARPTIESPNLQEVGVSSEWEAPTLKNKFPKPCNWRKIEFEKWTNLISQGRGIGNFKGDQISNNWLQHYRNIPHRKLLTAVQLRANVYPTREFLARGRQDKYIRTCRHCDAANETCAHIIGNCPITQDARIKRHNYICQVLSEKAIGKDWIVYKEPHIRDSNKELYKPDLIFVKDNRAYVVDVTVRYESDETSLEMAATEKVDKYKHLTKEIRTITNAKDIVFMGFPLGARGKWYQGNFELLKALGLSKSDREKTARSLSSIALMSSVDIVHIFASKSRTCTTL

SEQ ID NO: 1302 - protein, 1403 aa, synthetic construct
MASCPKPGPPVSAGAMSLESGLTTHSVLAIERGPNSLANSGSDFGGGGLGLPLRLLRVSVGTQTSRSDWVDLVSWSHPGPTSKSQQVDLVSLFPKHRVDLLSKNDQVDLVAQFLPSKFPPNLAENDLALLVNLEFYRSDLHVYECVHKAAHWEGLSGLPEVYEQLAPQPCVGETLHSSLPRDCEAVLVGEGEGSSEEVTPEPSPPEPETTSVAASPTLPVTNVEQSSESPITVIVPDKNPSCPCCGIRASGVSGLIEHLREVHRRREVCFRCSKCEKENTNYHSIICHFPKCKGKEETSAPAGEWSCEVCGRDFNTKIGLGQHKRLAHPAVRNQERVAASHPKENSKRGAHKKCWTEEEEKLLIELIAQFEGHANINKLIAEHITTKTAKQISEKRRLLSKKLMVVEAECEPGPSHRTRRAAAEIRKGAEMNHHNEDAAEDNGAGRGPLTRRAAARGETKEEISQFPDKGNGQQRPTKQKSEEQLQAYYKKTLEERLSAGALNTFPRAFKQVMEGRDIKLVINQTAQDCFGCLESISQIRTATRDKKDTVTREKHPKKPFQKWMKKRAIKKGNYLRFQRLFYLDRGKLAKIILDDIECLSCDIPLSEIYSVFKTRWETTGSFKSLGDFKTYGKADNTAFRELITAKEIEKNVQEMSKGSAPGPDGITLGDVVKMDPEFSRTMEIFNLWLTTGKIPDMVRGCRTVLIPKSSDPDRLKDINNWRPITIGSILLRLFSRIVTARLSKACPLNPRQRGFIRAAGCSENLKLLQTIIWSAKREHRPLGVVFVDIAKAFDTVSHQHIIHALQQREVDPHIVGLVSNMYENISTYITTKRNTHTDKIQIRVGVKQGDPMSPLLFNLAMDPLLCKLEESGKGYHRGQSSITAMAFADDLVLLSDSWENMNTNISILETFCNLTGLKTQGQKCHGFYIKPTKKSYTINDCAAWTINGTPLNMIDPGESEKYLGLQFDPWIGIARSGLSTKLDFWLQRIDQAPLKPLQKLDILKTYTIPRLIYIADHSEVKSALLETLDQKIRTAVKEWLHLPPCTCDAILYSSTRDGGLGITKLAGLIPSVQARRLHRIAQSSDDTMKCFMEKEKMEQLHKKLWVQAGGDREKVPAIWEARPTIESPNLQEVGVSSEWEAPTLKNKFPKPCNWRKIEFEKWTNLISQGRGIGNFKGDQISNNWLQHYRNIPHRKLLTAVQLRANVYPTREFLARGRQDKYIRTCRHCDAANETCAHIIGNCPITQDARIKRHNYICQVLSEKAIGKDWIVYKEPHIRDSNKELYKPDLIFVKDNRAYVVDVTVRYESDETSLEMAATEKVDKYKHLTKEIRTITNAKDIVFMGFPLGARGKWYQGNFELLKALGLSKSDREKTARSLSSIALMSSVDIVHIFASKSRTCTTL

SEQ ID NO: 1303 - protein, 1241 aa, synthetic construct
MGWSGRIWFVTVATQTKYSDWAFTVHSITNPELAGDGIADLRGLEFVNSEKGYYVGHSPSRSSLLATLPEVYETPRVMGKVTSPRDCEAVLVGEGEGSSEEVTPEPSPPEPETTSVAASPTLPVTNVEQSSESPITVIVPDKNPSCPCCGIRASGVSGLIEHLREVHRRREVCFRCSKCEKENTNYHSIICHFPKCKGKEETSAPAGEWSCEVCGRDFNTKIGLSQHKRLAHPVTRNIERITASRPKEESARGAHRRCWSEEEVELLKKLEKQYEGNKNINKLIAEHLPSKTAKQISDKRRGLIKSPSKGNGQQRPTKQKSEEQLQAYYKKTLEERLSAGALNTFPRAFKQVMEGRDIKLVINQTAQDCFGCLESISQIRTATRDKKDTVTREKHPKKPFQKWMKKRAIKKGNYLRFQRLFYLDRGKLAKIILDDIECLSCDIPLSEIYSVFKTRWETTGSFKSLGDFKTYGKADNTAFRELITAKEIEKNVQEMSKGSAPGPDGITLGDVVKMDPEFSRTMEIFNLWLTTGKIPDMVRGCRTVLIPKSSDPDRLKDINNWRPITIGSILLRLFSRIVTARLSKACPLNPRQRGFIRAAGCSENLKLLQTIIWSAKREHRPLGVVFVDIAKAFDTVSHQHIIHALQQREVDPHIVGLVSNMYENISTYITTKRNTHTDKIQIRVGVKQGDPMSPLLFNLAMDPLLCKLEESGKGYHRGQSSITAMAFADDLVLLSDSWENMNTNISILETFCNLTGLKTQGQKCHGFYIKPTKKSYTINDCAAWTINGTPLNMIDPGESEKYLGLQFDPWIGIARSGLSTKLDFWLQRIDQAPLKPLQKLDILKTYTIPRLIYIADHSEVKSALLETLDQKIRTAVKEWLHLPPCTCDAILYSSTRDGGLGITKLAGLIPSVQARRLHRIAQSSDDTMKCFMEKEKMEQLHKKLWIQAGGDRENIPSIWEAPPSSEPPNNVSTNSEWEAPTQKDKFPKPCNWRKNEFKKWTKLASQGRGIVNFERDKISNHWIQYYRRIPHRKLLTALQLRANVYPTREFLARGRQDQYIKACRHCDADNESCAHIIGNCPVTQDARIKRHNYICELLLEEAKKKDWVVFKEPHIRDSNKELYKPDLIFVKDGRALVVDVTVRYEAAKSSLEEAAAEKVRKYKHLETEVRHLTNAKDVTFVGFPLGARGKWHQDNFKLLTELGLSKSRQVKMAETFSTVALFSSVDIVHMFASRARKSMVM

SEQ ID NO: 1304 - protein, 1360 aa, synthetic construct
MASCPKPGPPVSAGAMSLESGLTTHSVLAIERGPNSLANSGSDFGGGGLGLPLRLLRVSVGTQTSRSDWVDLVSWSHPGPTSKSQQVDLVSLFPKHRVDLLSKNDQVDLVAQFLPSKFPPNLAENDLALLVNLEFYRSDLHVYECVHKAAHWEGLSGLPEVYEQLAPQPCVGETLHSSLPRDSELFVPEEGSSEKESEDAPKTSPPEPETTSVAASPTLPVTNVEQSSESPITVIVPDKNPSCPCCGIRASGVSGLIEHLREVHRRREVCFRCSKCEKENTNYHSIICHFPKCKGKEETSAPAGEWSCEECEKTFDTKIGLGQHKRLVHPVTRNLERITAARPKTGTMRGAHRRCWTEDEMELLRKLDKQYEGQKNINKLIAEHIPTKTTKQISDKRRDLRKSPVKKGKDQGQTKHLELEGEHLVEGEHLVCIGSEMEGGLRSRYRKTVSEWVTSGKLSILHGMFEQVIEGEEDPALVADKAMKDCFTCLASKSLELKTSQGRPRQVAQTARPSEPPKGWMKKRARKRGQFLRFQRLFYLDRGKLAGIILDDVESLKCAIPQDEIHNVFKSRWESPGTFKGLGAFRSKGLADNSAFEAMITAKEISKNIREMNKNSAPGPDGLSLRDIMKIDPHCVQLMELFNLWLVTGTVPDVVKECRTVLISKSSLPERQMDINNWRPITIGSIILRLFSRILTARLAKACPINSRQKGFIRSAGCAENLKLLQLLIKSAKKEHRPLGVVFIDLAKAFDTVSHHHLMAVLKQKGVDHHIITLITNMYQNIRTRITVKNEHSDPIGIQIGVKQGDPMSPLLFNLSVDPLLCKLEEEGSGYHHDSKGVTSMAFADDLVLLSGSWEGMQSNIKILEAFCELTGLRTQGEKCHGFYIQPTKDSYTINDCPPWQINGTPLNMIEPGSSEKYLGLRIDPWTGISKPELLRKIRDWLQRIGEAPLKPFQKVDILKGYTIPRLIYLADQADVKATYLEELDLTIRTTVKEWLHLPPSTCDAILYSSTRDGGLGITRLSGLIPSIQARRLHRIAQSSDDVIRSIVKQEGIEKDFEKLWLTAGGDREKIPSIWDPSAIRVTSEELGEDEFASEWEIPTPKTIFPKPCDWRKQEFINWTKLQSQGRGIANFEKDKISNNWLERYRGIPHRKLLTALQLRANVYPTREFLARGRQESHIKSCRHCQAENESSAHIIGYCPAVQDARIKRHNQLCDLLITEVKKKDWIVFQEPILKDEQNEIYKPDLVFVKGDQAMVIDVTVRYEAAKSSLEEAAAEKVRKYKHLETEVRHLTNAKDVTFVGFPLGARGKWHQDNFKLLTELGLSKSRQVKMAETFSTVALFSSVDIVHMFASRARKSMVM

SEQ ID NO: 1305 - protein, 1370 aa, synthetic construct
MSKPDPLNVNMSTPFLGTQMRLLRVSTGTQTSMSDWADWAQRLCGTATRSALCKVVPVSLLSRHQTELLAMGHGSQMPLNAPLNTPDLTESELACLVLDWEFYRTDLSASSFNLVQFSANRESLSGLPEVYEQPTPFQPEGEKICPPRDCEAVLVGEGEGSSEEVTPEPSPPEPETTSVAASPTLPVTNVEQSSESPITVIVPDKNPSCPCCGIRASGVSGLIEHLREVHRRREVCFRCSKCEKENTNYHSIICHFPKCKGKEETSAPAGEWSCEVCGRDFNTKIGLGQHKRLAHPAVRNQERVAASHPKENSKRGAHKKCWTEEEEKLLIELIAQFEGHANINKLIAEHITTKTAKQISEKRRLLSKKLMVVEAECEPGPSHRTRRAAAEIRKGAEMNHHNEDAAEDNGAGRGPLTRRAAARGETKEEISQFPDKGNGQQRPTKQKSEEQLQAYYKKTLEERLSAGALNTFPRAFKQVMEGRDIKLVINQTAQDCFGCLESISQIRTATRDKKDTVTREKHPKKPFQKWMKKRAIKKGNYLRFQRLFYLDRGKLAKIILDDIECLSCDIPLSEIYSVFKTRWETTGSFKSLGDFKTYGKADNTAFRELITAKEIEKNVQEMSKGSAPGPDGITLGDVVKMDPEFSRTMEIFNLWLTTGKIPDMVRGCRTVLIPKSSDPDRLKDINNWRPITIGSILLRLFSRIVTARLSKACPLNPRQRGFIRAAGCSENLKLLQTIIWSAKREHRPLGVVFVDIAKAFDTVSHQHIIHALQQREVDPHIVGLVSNMYENISTYITTKRNTHTDKIQIRVGVKQGDPMSPLLFNLAMDPLLCKLEESGKGYHRGQSSITAMAFADDLVLLSDSWENMNTNISILETFCNLTGLKTQGQKCHGFYIKPTKKSYTINDCAAWTINGTPLNMIDPGESEKYLGLQFDPWIGIARSGLSTKLDFWLQRIDQAPLKPLQKLDILKTYTIPRLIYIADHSEVKSALLETLDQKIRTAVKEWLHLPPCTCDAILYSSTRDGGLGITKLAGLIPSVQARRLHRIAQSSDDTMKCFMEKEKMEQLHKKLWVQAGGDREKVPAIWEARPTIESPNLQEVGVSSEWEAPTLKNKFPKPCNWRKIEFEKWTNLISQGRGIGNFKGDQISNNWLQHYRNIPHRKLLTAVQLRANVYPTREFLARGRQDKYIRTCRHCDAANETCAHIIGNCPITQDARIKRHNYICQVLSEKAIGKDWIVYKEPHIRDSNKELYKPDLIFVKDNRAYVVDVTVRYESDETSLEMAATEKVDKYKHLTKEIRTITNAKDIVFMGFPLGARGKWYQGNFELLKALGLSKSDREKTARSLSSIALMSSVDIVHIFASKSRTCTTL

SEQ ID NO: 1306 - protein, 1304 aa, synthetic construct
MSKPDPLNVNMSTPFLGTQMRLLRVSTGTQTSMSDWADWAQRLCGTATRSALCKVVPVSLLSRHQTELLAMGHGSQMPLNAPLNTPDLTESELACLVLDWEFYRTDLSASSFNLVQFSANRESLSGLPEVYEQPTPFQPEGEKICPPRDCEAVLVGEGEGSSEEVTPEPSPPEPETTSVAASPTLPVTNVEQSSESPITVIVPDKNPSCPCCGIRASGVSGLIEHLREVHRRREVCFRCSKCEKENTNYHSIICHFPKCKGKEETSAPAGEWSCEVCGRDFNTKIGLSQHKRLAHPVTRNIERITASRPKEESARGAHRRCWSEEEVELLKKLEKQYEGNKNINKLIAEHLPSKTAKQISDKRRGLIKSPSKGNGQQRPTKQKSEEQLQAYYKKTLEERLSAGALNTFPRAFKQVMEGRDIKLVINQTAQDCFGCLESISQIRTATRDKKDTVTREKHPKKPFQKWMKKRAIKKGNYLRFQRLFYLDRGKLAKIILDDIECLSCDIPLSEIYSVFKTRWETTGSFKSLGDFKTYGKADNTAFRELITAKEIEKNVQEMSKGSAPGPDGITLGDVVKMDPEFSRTMEIFNLWLTTGKIPDMVRGCRTVLIPKSSDPDRLKDINNWRPITIGSILLRLFSRIVTARLSKACPLNPRQRGFIRAAGCSENLKLLQTIIWSAKREHRPLGVVFVDIAKAFDTVSHQHIIHALQQREVDPHIVGLVSNMYENISTYITTKRNTHTDKIQIRVGVKQGDPMSPLLFNLAMDPLLCKLEESGKGYHRGQSSITAMAFADDLVLLSDSWENMNTNISILETFCNLTGLKTQGQKCHGFYIKPTKKSYTINDCAAWTINGTPLNMIDPGESEKYLGLQFDPWIGIARSGLSTKLDFWLQRIDQAPLKPLQKLDILKTYTIPRLIYIADHSEVKSALLETLDQKIRTAVKEWLHLPPCTCDAILYSSTRDGGLGITKLAGLIPSVQARRLHRIAQSSDDTMKCFMEKEKMEQLHKKLWIQAGGDRENIPSIWEAPPSSEPPNNVSTNSEWEAPTQKDKFPKPCNWRKNEFKKWTKLASQGRGIVNFERDKISNHWIQYYRRIPHRKLLTALQLRANVYPTREFLARGRQDQYIKACRHCDADNESCAHIIGNCPVTQDARIKRHNYICELLLEEAKKKDWVVFKEPHIRDSNKELYKPDLIFVKDGRALVVDVTVRYEAAKSSLEEAAAEKVRKYKHLETEVRHLTNAKDVTFVGFPLGARGKWHQDNFKLLTELGLSKSRQVKMAETFSTVALFSSVDIVHMFASRARKSMVM

SEQ ID NO: 1307 - protein, 1360 aa, synthetic construct
MASCPKPGPPVSAGAMSLESGLTTHSVLAIERGPNSLANSGSDFGGGGLGLPLRLLRVSVGTQTSRSDWVDLVSWSHPGPTSKSQQVDLVSLFPKHRVDLLSKNDQVDLVAQFLPSKFPPNLAENDLALLVNLEFYRSDLHVYECVHKAAHWEGLSGLPEVYEQLAPQPCVGETLHSSLPRDSELFVPEEGSSEKESEDAPKTSPPEPETTSVAASPTLPVTNVEQSSESPITVIVPDKNPSCPCCGIRASGVSGLIEHLREVHRRREVCFRCSKCEKENTNYHSIICHFPKCKGKEETSAPAGEWSCEECEKTFDTKIGLGQHKRLVHPVTRNLERITAARPKTGTMRGAHRRCWTEDEMELLRKLDKQYEGQKNINKLIAEHIPTKTTKQISDKRRDLRKSPVKKGKDQGQTKHLELEGEHLVEGEHLVCIGSEMEGGLRSRYRKTVSEWVTSGKLSILHGMFEQVIEGEEDPALVADKAMKDCFTCLASKSLELKTSQGRPRQVAQTARPSEPPKGWMKKRARKRGQFLRFQRLFYLDRGKLAGIILDDVESLKCAIPQDEIHNVFKSRWESPGTFKGLGAFRSKGLADNSAFEAMITAKEISKNIREMNKNSAPGPDGLSLRDIMKIDPHCVQLMELFNLWLVTGTVPDVVKECRTVLISKSSLPERQMDINNWRPITIGSIILRLFSRILTARLAKACPINSRQKGFIRSAGCAENLKLLQLLIKSAKKEHRPLGVVFIDLAKAFDTVSHHHLMAVLKQKGVDHHIITLITNMYQNIRTRITVKNEHSDPIGIQIGVKQGDPMSPLLFNLSVDPLLCKLEEEGSGYHHDSKGVTSMAFADDLVLLSGSWEGMQSNIKILEAFCELTGLRTQGEKCHGFYIQPTKDSYTINDCPPWQINGTPLNMIEPGSSEKYLGLRIDPWTGISKPELLRKIRDWLQRIGEAPLKPFQKVDILKGYTIPRLIYLADQADVKATYLEELDLTIRTTVKEWLHLPPSTCDAILYSSTRDGGLGITRLSGLIPSIQARRLHRIAQSSDDVIRSIVKQEGIEKDFEKLWLTAGGDREKIPSIWDPSAIRVTSEELGEDEFASEWEIPTPKTIFPKPCDWRKQEFINWTKLQSQGRGIANFEKDKISNNWLERYRGIPHRKLLTALQLRANVYPTREFLARGRQESHIKSCRHCQAENESSAHIIGYCPAVQDARIKRHNQLCDLLITEVKKKDWIVFQEPILKDEQNEIYKPDLVFVKGDQAMVIDVTVRYESDETSLEMAATEKVDKYKHLTKEIRTITNAKDIVFMGFPLGARGKWYQGNFELLKALGLSKSDREKTARSLSSIALMSSVDIVHIFASKSRTCTTL

SEQ ID NO: 1308 - protein, 1326 aa, synthetic construct
MSKPDPLNVNMSTPFLGTQMRLLRVSTGTQTSMSDWADWAQRLCGTATRSALCKVVPVSLLSRHQTELLAMGHGSQMPLNAPLNTPDLTESELACLVLDWEFYRTDLSASSFNLVQFSANRESLSGLPEVYEQPTPFQPEGEKICPPRDCEAVLVGEGEGSSEEVTPEPSPPEPETTSVAASPTLPVTNVEQSSESPITVIVPDKNPSCPCCGIRASGVSGLIEHLREVHRRREVCFRCSKCEKENTNYHSIICHFPKCKGKEETSAPAGEWSCEECEKTFDTKIGLGQHKRLVHPVTRNLERITAARPKTGTMRGAHRRCWTEDEMELLRKLDKQYEGQKNINKLIAEHIPTKTTKQISDKRRDLRKSPVKKGKDQGQTKHLELEGEHLVEGEHLVCIGSEMEGGLRSRYRKTVSEWVTSGKLSILHGMFEQVIEGEEDPALVADKAMKDCFTCLASKSLELKTSQGRPRQVAQTARPSEPPKGWMKKRARKRGQFLRFQRLFYLDRGKLAGIILDDVESLKCAIPQDEIHNVFKSRWESPGTFKGLGAFRSKGLADNSAFEAMITAKEISKNIREMNKNSAPGPDGLSLRDIMKIDPHCVQLMELFNLWLVTGTVPDVVKECRTVLISKSSLPERQMDINNWRPITIGSIILRLFSRILTARLAKACPINSRQKGFIRSAGCAENLKLLQLLIKSAKKEHRPLGVVFIDLAKAFDTVSHHHLMAVLKQKGVDHHIITLITNMYQNIRTRITVKNEHSDPIGIQIGVKQGDPMSPLLFNLSVDPLLCKLEEEGSGYHHDSKGVTSMAFADDLVLLSGSWEGMQSNIKILEAFCELTGLRTQGEKCHGFYIQPTKDSYTINDCPPWQINGTPLNMIEPGSSEKYLGLRIDPWTGISKPELLRKIRDWLQRIGEAPLKPFQKVDILKGYTIPRLIYLADQADVKATYLEELDLTIRTTVKEWLHLPPSTCDAILYSSTRDGGLGITRLSGLIPSIQARRLHRIAQSSDDVIRSIVKQEGIEKDFEKLWLTAGGDREKIPSIWDPSAIRVTSEELGEDEFASEWEIPTPKTIFPKPCDWRKQEFINWTKLQSQGRGIANFEKDKISNNWLERYRGIPHRKLLTALQLRANVYPTREFLARGRQESHIKSCRHCQAENESSAHIIGYCPAVQDARIKRHNQLCDLLITEVKKKDWIVFQEPILKDEQNEIYKPDLVFVKGDQAMVIDVTVRYEAAKSSLEEAAAEKVRKYKHLETEVRHLTNAKDVTFVGFPLGARGKWHQDNFKLLTELGLSKSRQVKMAETFSTVALFSSVDIVHMFASRARKSMVM

SEQ ID NO: 1309 - protein, 1356 aa, synthetic construct
MGWSGRIWFVTVATQTKYSDWAFTVHSITNPELAGDGIADLRGLEFVNSEKGYYVGHSPSRSSLLATLPEVYETPRVMGKVTSPSSVLTEHEGSSEKESEDAPKTSPPTPGKHGLEQTGEEKVMVTVPDKNPPCPCCGTRVNSVLNLIEHLKVSHGKRGVCFRCAKCGKENSNYHSVVCHFKKCRGPETEKAPAGEWICEVCNRDFTTKIGLGQHKRLAHPAVRNQERIVASQPKETSNRGAHKRCWTKEEEELLIRLEAQFEGNKNINKLIAEHITTKTAKQISDKRRLLSRKPAEEPRMEPGTCHHTRRAAASLRTEPEMSHHAQAEDRDNGPGRRPLPGRAAAGGRTMDEIRRHPDKANDQQEASSSGRGPVTRRAAAGKKTKKSIDHPTDKANGQQVAISTRRGCLNRGVTAGVETIEGSSHLPDKDSDGQGTPSREKEGQLQDHYQEVIGAWLSDGRINTFPEAFKGLLGKREIQATINQSILDCFGGIDSKSQVNKMTRDKKDKKPGRPPQKWMKKRAIKRGSYLRFQRLFHLDRGKLAKIVLDNIECLTCDIPPSEIYSVFKARWETAGKFTSLGDFKFTEKVDNSAFRDLITAKEVEKNMQEMSKGSAPGPDGITLRDIQKMDPKLSRTTEIFNLWLAAGKIPDGVRECRTVLIPKSTKPERLKDINNWRPITIGSTLLRLFSRILTARLSKACPLNPRQKGFIQAAGCSENLQLLQSIIWSAKREHRPLGVVFVDIAKAFDTVSHKHILHVLQRRGVDPHIIGLVSDMYENIHTSITTKKARTDRIQIRVGVKQGDPMSPLLFNLAMDPLLCELETNGRGHHRGTNCITAMAFADDLVLLSDSWEDMKSNIKILEAFCDLTGLKTQGEKCHGFYIKPTKDSYTVNDCAAWTINGTPLNMILPGESEKYLGLQIDPWTGLAKSDLSTKLDSWLEQIDRVPLKPLQKIELLKTYTIPRLTYVADHSDLKVSFLETLDQKIRTIVKDWLHLPACTCDAILYSSTKDGGLGITKLAKLIPSVQARRLHRIAQSSDETMKQFLHRDKMEAMYQKLWIQAGGDRENIPSIWEAPPSSEPPNNVSTNSEWEAPTQKDKFPKPCNWRKNEFKKWTKLASQGRGIVNFERDKISNHWIQYYRRIPHRKLLTALQLRANVYPTREFLARGRQDQYIKACRHCDADNESCAHIIGNCPVTQDARIKRHNYICELLLEEAKKKDWVVFKEPHIRDSNKELYKPDLIFVKDGRALVVDVTVRYEAAKSSLEEAAAEKVRKYKHLETEVRHLTNAKDVTFVGFPLGARGKWHQDNFKLLTELGLSKSRQVKMAETFSTVALFSSVDIVHMFASRARKSMVM

SEQ ID NO: 1310 - protein, 1559 aa, synthetic construct
MRKKQQEFENIRQQNLKLITELMNERNTLQEENKKLSEQLQQKIENDQQHQAAELECEEDVIPDSPITAFSFSGVNRLRRKENPHVRYIEQTHTKLEHSVCANEMRKVSKSSTHPQHNPNENEILVADTYDQSQSPMAKAHGTSSYTPDKSSFNLATVVAETLGLGVQEESETQGPMSPLGDELYHCLEGNHKKQPFESGSETPGTSESATPEGSPKRKVSSAEGAAKEEPKRRSARLSAKPPAKVEAKPKKAAAKDKSSDKKVQTKGKRGAKGKQAEVANQETKEDLPAENGETKTEESPASDEAGEKEAKSDSGSETPGTSESATPESYETPRVMGKVTSPSSVLTEGEGSSEEVTPEPSPPEPETTSVAASPTLPVTNVEQSSESPITVIVPDKNPSCPCCGIRASGVSGLIEHLREVHRRREVCFRCSKCEKENTNYHSIICHFPKCKGKEETSAPAGEWSCEVCGRDFNTKIGLGQHKRLAHPAVRNQERVAASHPKENSKRGAHKKCWTEEEEKLLIELIAQFEGHANINKLIAEHITTKTAKQISEKRRLLSKKLMVVEAECEPGPSHRTRRAAAEIRKGAEMNHHNEDAAEDNGAGRGPLTRRAAAGGRTMDEIRRHPDKGNGQQRPTKQKSEEQLQAYYKKTLEERLSAGALNTFPRAFKQVMEGRDIKLVINQTAQDCFGCLESISQIRTATRDKKDTVTREKHPKKPFQKWMKKRAIKKGNYLRFQRLFYLDRGKLAKIILDDIECLSCDIPLSEIYSVFKTRWETTGSFKSLGDFKTYGKADNTAFRELITAKEIEKNVQEMSKGSAPGPDGITLGDVVKMDPEFSRTMEIFNLWLTTGKIPDMVRGCRTVLIPKSSKPDRLKDINNWRPITIGSILLRLFSRIVTARLSKACPLNPRQRGFIRAAGCSENLKLLQTIIWSAKREHRPLGVVFVDIAKAFDTVSHQHIIHALQQREVDPHIVGLVSNMYENISTYITTKRNTHTDKIQIRVGVKQGDPMSPLLFNLAMDPLLCKLEESGKGYHRGQSSITAMAFADDLVLLSDSWENMNTNISILETFCNLTGLKTQGQKCHGFYIKPTKDSYTINDCAAWTINGTPLNMIDPGESEKYLGLQFDPWIGIARSGLSTKLDFWLQRIDQAPLKPLQKTDILKTYTIPRLIYIADHSEVKSALLETLDQKIRTAVKEWLHLPPCTCDAILYSSTRDGGLGITKLAGLIPSVQARRLHRIAQSSDDTMKCFMEKEKMEQLHKKLWIQAGGDRENIPSIWEAPPSSEPPNNVSTNSEWEAPTQKDKFPKPCNWRKNEFKKWTKLASQGRGIVNFERDKISNHWIQYYRRIPHRKLLTALQLRANVYPTREFLARGRQDQYIKACRHCDADNESCAHIIGNCPVTQDARIKRHNYICELLLEEAKKKDWVVFKEPHIRDSNKELYKPDLIFVKDGRALVVDVTIRYEITTKTLEEAALAKAKKYAHLKSQIQDLTNTSIINFTGFPLGSRGKWYQGNYNILKDLGLSSSRQEKVARRLSNYALFSSVDIVHMFASKARTEVR

SEQ ID NO: 1311 - protein, 1538 aa, synthetic construct
MRKKQQEFENIRQQNLKLITELMNERNTLQEENKKLSEQLQQKIENDQQHQAAELECEEDVIPDSPITAFSFSGVNRLRRKENPHVRYIEQTHTKLEHSVCANEMRKVSKSSTHPQHNPNENEILVADTYDQSQSPMAKAHGTSSYTPDKSSFNLATVVAETLGLGVQEESETQGPMSPLGDELYHCLEGNHKKQPFESGSETPGTSESATPEGSPKRKVSSAEGAAKEEPKRRSARLSAKPPAKVEAKPKKAAAKDKSSDKKVQTKGKRGAKGKQAEVANQETKEDLPAENGETKTEESPASDEAGEKEAKSDSGSETPGTSESATPESYETPRVMGKVTSPSSVLTEHEGDRTSSPPRTPPPILETGADLPQEGTPVVKVPDDNPACPCCGNRIGRISGLIDHLKRTHGKKKILFQCAKCGRTNLKHHSIACHVPKCKGAKGTSPLRGWACEECNRTFGTKIGLGQHKRLAHPAVRNQERIVASQPKETSNRGAHKRCWTKEEEELLIRLEAQFEGNKNINKLIAEHITTKTAKQISDKRRLLSRKPAEEPREEPGTCHHTRRAAASLRTEPEMSHHAQAEDRDNGPPSKKKVKELGIREELMKEGEYLERSGSQEEGGLRSRYRKSIAEWLRTRKITTLREIYERVMKGKKDLPALVDEAAQGHYACLKKDLLEGERRQIQKIREIRRSRPQKPSKQWTIKRARKRGQFLRFQRLFHLDRRKLAGIILDDVESLQCGIPLDAIHEVFKSRWESPGTFKGLGTFCTNGLADNSAFQPMITVKEIEKNIREMNKNTAPGPDGVTLRDLMKADPQCVNLMELFNLWLLTGYIPDGIKNCRTILIPKSNVPEKLNDVNNWRPITIGSIILRLFSKILTARLSKACPINTRQRGFIKSPGCSENLKLLQLVIQYAKREHRPLGVVFVDLAKAFDTVSHAHIIAVLKQKGVDEHIINLIENSYHNIKTYIDMKKEKSDSIGIRIGVKQGDPMSPILFNLSVDPLLCKLDEIGNGFECHTKVVTSLAFADDLVLLSGSWEGMQKNIEIVETFCELTGLKMQGEKCHGFYIKPTKDSYTINDCPPWTINGTPLNMIEPGSSEKYLGLRIDPWTGISKPELLEKVDRWLAKVGKAPLKPFQKVDILKGHLIPRLIYLADQANLKPTHLENIDLAIRNGVKEWLHLPACTCDAILYSNTQDGGLGINRLAALIPNVQTRRLHRIAQTTDDVLKEIVKQEGIEREYEKLWVMAGGDKEKIPSIWDPKSIMVISETGGEELSEWESPNPKLIYPKPCNWRKREFNNWVKLSTQGRGISNFEKDKISNNWIQQYRGIPQRKVITALQLRANIYPTREFLARGQSETYIKSCRHCQADIETCAHIIGYCPSVQDARIKRHNQICNILAEEAKSKDWLVYQEPLLRDESNELYKPDLIFVKENQAIVTDVTIRYEITTKTLEEAALAKAKKYAHLKSQIQDLTNTSIINFTGFPLGSRGKWYQGNYNILKDLGLSSSRQEKVARRLSNYALFSSVDIVHMFASKARTEVR

SEQ ID NO: 1312 - protein, 1497 aa, synthetic construct
MRKKQQEFENIRQQNLKLITELMNERNTLQEENKKLSEQLQQKIENDQQHQAAELECEEDVIPDSPITAFSFSGVNRLRRKENPHVRYIEQTHTKLEHSVCANEMRKVSKSSTHPQHNPNENEILVADTYDQSQSPMAKAHGTSSYTPDKSSFNLATVVAETLGLGVQEESETQGPMSPLGDELYHCLEGNHKKQPFESGSETPGTSESATPEGSPKRKVSSAEGAAKEEPKRRSARLSAKPPAKVEAKPKKAAAKDKSSDKKVQTKGKRGAKGKQAEVANQETKEDLPAENGETKTEESPASDEAGEKEAKSDSGSETPGTSESATPESYETPRVMGKVTSPSSVLTEHEGDRTSSPPRTPPPILETGADLPQEGTPVVKVPDDNPACPCCGNRIGRISGLIDHLKRTHGKKKILFQCAKCGRTNLKHHSIACHVPKCKGAKGTSPLRGWACEECNRTFGTKIGLGQHKRLVHPVTRNLERIATTRPKAGTMRGAHRRCWTEDEIELLRKLDKQYEGQKNINKLIAEHIPTKTTKQISDKRRDLHKSPSKKKVKELGIREELMKEGEYLERSGSQEEGGLRSRYRKSIAEWLRTRKITTLREIYERVMKGKKDLPALVDEAAQGHYACLKKDLLEGERRQIQKIREIRRSRPQKPSKQWTIKRARKRGQFLRFQRLFHLDRRKLAGIILDDVESLQCGIPLDAIHEVFKSRWESPGTFKGLGTFCTNGLADNSAFQPMITVKEIEKNIREMNKNTAPGPDGVTLRDLMKADPQCVNLMELFNLWLLTGYIPDGIKNCRTILIPKSNVPEKLNDVNNWRPITIGSIILRLFSKILTARLSKACPINTRQRGFIKSPGCSENLKLLQLVIQYAKREHRPLGVVFVDLAKAFDTVSHAHIIAVLKQKGVDEHIINLIENSYHNIKTYIDMKKEKSDSIGIRIGVKQGDPMSPILFNLSVDPLLCKLDEIGNGFECHTKVVTSLAFADDLVLLSGSWEGMQKNIEIVETFCELTGLKMQGEKCHGFYIKPTKDSYTINDCPPWTINGTPLNMIEPGSSEKYLGLRIDPWTGISKPELLEKVDRWLAKVGKAPLKPFQKVDILKGHLIPRLIYLADQANLKPTHLENIDLAIRNGVKEWLHLPACTCDAILYSNTQDGGLGINRLAALIPNVQTRRLHRIAQTTDDVLKEIVKQEGIEREYEKLWVMAGGDKEKIPSIWDPKSIMVISETGGEELSEWESPNPKLIYPKPCNWRKREFNNWVKLSTQGRGISNFEKDKISNNWIQQYRGIPQRKVITALQLRANIYPTREFLARGQSETYIKSCRHCQADIETCAHIIGYCPSVQDARIKRHNQICNILAEEAKSKDWLVYQEPLLRDESNELYKPDLIFVKENQAIVTDVTIRYEITTKTLEEAALAKAKKYAHLKSQIQDLTNTSIINFTGFPLGSRGKWYQGNYNILKDLGLSSSRQEKVARRLSNYALFSSVDIVHMFASKARTEVR

SEQ ID NO: 1313 - protein, 1545 aa, synthetic construct
MRKKQQEFENIRQQNLKLITELMNERNTLQEENKKLSEQLQQKIENDQQHQAAELECEEDVIPDSPITAFSFSGVNRLRRKENPHVRYIEQTHTKLEHSVCANEMRKVSKSSTHPQHNPNENEILVADTYDQSQSPMAKAHGTSSYTPDKSSFNLATVVAETLGLGVQEESETQGPMSPLGDELYHCLEGNHKKQPFESGSETPGTSESATPEGSPKRKVSSAEGAAKEEPKRRSARLSAKPPAKVEAKPKKAAAKDKSSDKKVQTKGKRGAKGKQAEVANQETKEDLPAENGETKTEESPASDEAGEKEAKSDSGSETPGTSESATPESFESPKVSGRTISPSSVQTEYTGERTSSPPITPPPILEAGADPPQEGTPVVKIPDKNPACPCCGNRMGKITGLVDHLKRTHGKRKILFQCARCGRTNPKHHSIACHIPKCKGAEEPSISMGWACEECNRTFGTKIGLGQHKRLAHPAVRNQERVAASHPKENSKRGAHKKCWTEEEEKLLIELIAQFEGHANINKLIAEHITTKTAKQISEKRRLLSKKLMVVEAECEPGPSHRTRRAAAEIRKGAEMNHHNEDAAEDNGAPSKKSPSKRKGKNLALREQLMEEGEHLPESGSQDGGGLRPHYRKVIAEWIRSQKITSLKDVFERVIKGKEDLPLLVDKAAQDHYACLKMDLIEEGDRQSQKIREIRRPRPQKPSKQWTKRRARKRGQFLRFQRLFHLDRGKLAGIILDDVESLQCGIPLDVVHEVFKSRWESPGTFKGLGTFNTIGHADNSAFQTLITAKEIVKNIREMNKNAAPGPDGISLRDLMKTDPHCTKLMELFNLWLTTGYIPEGIKNCRTILIPKSSVPEKLNDVNNWRPITIGSIVLRLFSKILTARLTKACPINTRQRGFIRSPGCSENLKLLQLLIRYAKREHLPLGVVFVDLAKAFDTVSHSHIIAVLKQKGVDEHIIRLIENSYENINTYIDMKNVKSDLIGIQIGVKQGDPMSPILFNLSVDPLLCKLEEMGNGFQYYTKDVTSLAFADDLVLVSGSWEGMQRNIEIVETFCELTGLKMQGEKCHGFYIKPTKDSYTINDCPPWTINGTPLNMIEPGSSEKYLGLYIDPWTGISKPELLEKVDRWLSKVGKAPLKPFQKVDILKGHLIPRLIYLADQANLKSTHLESLDLAIRIGVKEWLHLPSCTCDSILYSNTQDGGLGISRLAALIPSVQARRLHRIAQTTDDVLRTVVEREGIEGEFKKLWVTAGGDKEKIPSIWDPKTIMVISETGGDQSLSEWETPNPKIFYPKPCNWRKREFNNWTKLLTQGRGIANFEKDKISNNWIIHYRGIPQRKLITALQLRANIYPTREFLSRGRSETYIKSCRHCQADNETCSHIIGYCPSVQDARIKRHNQICHILAEEAKSKDWLVYQEPLLRDQQNELYKPDLIFVKGNQAIVTDITIRYETSLTTLEEAALEKAKKYAHLVTQIQDLTNTSVINFTGFPLGSRGKWYQNNFKILKELGLSSSRQEKVARRLSNYALFSSVDIVHMFASKARTEVR

SEQ ID NO: 1314 - protein, 1546 aa, synthetic construct
MRKKQQEFENIRQQNLKLITELMNERNTLQEENKKLSEQLQQKIENDQQHQAAELECEEDVIPDSPITAFSFSGVNRLRRKENPHVRYIEQTHTKLEHSVCANEMRKVSKSSTHPQHNPNENEILVADTYDQSQSPMAKAHGTSSYTPDKSSFNLATVVAETLGLGVQEESETQGPMSPLGDELYHCLEGNHKKQPFESGSETPGTSESATPEGSPKRKVSSAEGAAKEEPKRRSARLSAKPPAKVEAKPKKAAAKDKSSDKKVQTKGKRGAKGKQAEVANQETKEDLPAENGETKTEESPASDEAGEKEAKSDSGSETPGTSESATPESFESPKVSGRTISPSSVQTEYTGERTSSPPITPPPILEAGADPPQEGTPVVKIPDKNPACPCCGNRMGKITGLVDHLKRTHGKRKILFQCARCGRTNPKHHSIACHIPKCKGAEEPSISMGWACEECNRTFGTKIGLGQHKRLAHPAVRNQERVAASHPKENSKRGAHKKCWTEEEEKLLIELIAQFEGHANINKLIAEHITTKTAKQISEKRRLLSKKLMVVEAECEPGPSHRTRRAAAEIRKGAEMNHHNEDAAEDNGAPSKKSPSKRKGKNLALREQLMEEGEHLPESGSQDGGGLRPHYRKVIAEWIRSQKITSLKDVFERVIKGKEDLPLLVDKAAQDHYACLKMDLIEEGDRQSQKIREIRRPRPQKPSKQWTKRRARKRGQFLRFQRLFHLDRGKLAGIILDDVESLQCGIPLDVVHEVFKSRWESPGTFKGLGTFNTIGHADNSAFQTLITAKEIVKNIREMNKNAAPGPDGISLRDLMKTDPHCTKLMELFNLWLTTGYIPEGIKNCRTILIPKSSVPEKLNDVNNWRPITIGSIVLRLFSKILTARLTKACPINTRQRGFIRSPGCSENLKLLQLLIRYAKREHLPLGVVFVDLAKAFDTVSHSHIIAVLKQKGVDEHIIRLIENSYENINTYIDMKNVKSDLIGIQIGVKQGDPMSPILFNLSVDPLLCKLEEMGNGFQYYTKDVTSLAFADDLVLVSGSWEGMQRNIEIVETFCELTGLKMQGEKCHGFYIKPTKDSYTINDCPPWTINGTPLNMIEPGSSEKYLGLYIDPWTGISKPELLEKVDRWLSKVGKAPLKPFQKVDILKGHLIPRLIYLADQANLKSTHLESLDLAIRIGVKEWLHLPSCTCDSILYSNTQDGGLGISRLAALIPSVQARRLHRIAQTTDDVLRTVVEREGIEGEFKKLWVTAGGDKEKIPSIWDPKTIMVISETGGDQSLSEWETPNPKIFYPKPCNWRKREFNNWTKLLTQGRGIANFEKDKISNNWIIHYRGIPQRKLITALQLRANIYPTREFLSRGRSETYIKSCRHCQADNETCSHIIGYCPSVQDARIKRHNQICHILAEEAKSKDWLVYQEPLLRDQQNELYKPDLIFVKGNQAIVTDITVRYEAAKSSLEEAAAEKVRKYKHLETEVRHLTNAKDVTFVGFPLGARGKWHQDNFKLLTELGLSKSRQVKMAETFSTVALFSSVDIVHMFASRARKSMVM

SEQ ID NO: 1315 - protein, 1389 aa, synthetic construct
MASCPKLGPPISAGAMSLESGLTTHSVLAIEHGPNSLANSGSDFGGGGLGLPVCLLRVSVGTQTSRSDWVDLVSWSHPGPSSKSQRVDLVSLFPKHRVDLLSKNDQVDLVAQFLPSKFPPNLAENDLALLVNLEFYRSDLHVYECVHFAADWEGLSGLPEVYEQLAPQPCVGETLHSSLPRDSEPFVPEEGSSEKESEDAPKTSPPTPGKHGEQTGEEKVVVTVPDKNPPCPCCGTRVNSVLNRIEHLKVSHGKRGVCFRCAKCGKENSNYHSVVCHFPKCRGPETEKAPAGEWIYEVCNRNFTTKIGLGQHKRLAHPAVRNQERIVASQPKETSNRGAHKRCWTKEEEELLIRLEAQFEGNKNINKLIAEHITTKTAKQISDKRRLLPRKPAEETREEPGVCHRTRRAAAGLRTEPEMSHHAQAEARDNGPGRRPLPGRAAARGRTMDEIRHHPDKGNGRQRTTKQKSEGQLQAYYKKTLEERLSAGALNTFPRAFKQVTEGRDIQLVINQTAQSCFGCLESISQIRTATRDKKDTVTREERPKKPFQKWMKDRAIKKGNYLRFQRLFYLDRGKLAKIILDDIECLSCDIPPSEIYSVFKTRWETTGNFKSLGDFKTYGKADNTAFRELITAKEIEKNVQEMSKGSAPGPDGITLGDVVKMDPEFSRTMEIFNLWLTTGKIPDMVRGCRTVLIPKSTKPDRLKDINNWRPITIGSILLRLFSRIVTARLSKACPLNPRQRGFIRAAGCSENLKLLQTIIWSAKREHRPLGVVFVDIAKAFDTVSHQHIIHALQQREVDPHIVGLVSNMYENISTYITTKRNTHTDKIQIRVGVKQGDPMSPLLFNLAMDPLLCKLEESGKGYHRGQSSITAMAFADDLVLLSDSWENMNTNISILETFCNLTGLKTQGQKCHGFYIKPTKDSYTINDCAAWTINGTPLNMIDPGESEKYLGLQFDPWIGIARSGLSTKLDFWLQRIDQAPLKPLQKTDILKTYTIPRLIYIADHSEVKTGLLETLDQKIRTAVKEWLHLPPCTCDAILYSSTRDGGLGITKLAGLIPSVQARRLHRIAQSSDETMKCFMEKEKMEQLHKKLWIQAGGDRENIPSIWEAPPSSEPPNNVSTNSEWEAPTQKDKFPKPCNWRKNEFKKWTKLASQGRGIVNFERDKISNPWIQYYRRIPHRKLLTALQLRANVYPTREFLARGRQDQYIKACRHCDADIESCAHIIGNCPVTQDARIKRHNYICELLLEEAKKKDWVVFKEPHIRDSNKELYKPDLIFVKDARALVVDVTVRYEAAKSSLEEAAAEKVRKYKHLETEVRHLTNAKDVTFVGFPLGARGKWHQDNFKLLTELGLSKSRQVKMAETFSTVALFSSVDIVHMFASRARKSMVM

SEQ ID NO: 1316 - protein, 1522 aa, synthetic construct
MRKKQQEFENIRQQNLKLITELMNERNTLQEENKKLSEQLQQKIENDQQHQAAELECEEDVIPDSPITAFSFSGVNRLRRKENPHVRYIEQTHTKLEHSVCANEMRKVSKSSTHPQHNPNENEILVADTYDQSQSPMAKAHGTSSYTPDKSSFNLATVVAETLGLGVQEESETQGPMSPLGDELYHCLEGNHKKQPFESGSETPGTSESATPEGSPKRKVSSAEGAAKEEPKRRSARLSAKPPAKVEAKPKKAAAKDKSSDKKVQTKGKRGAKGKQAEVANQETKEDLPAENGETKTEESPASDEAGEKEAKSDSGSETPGTSESATPESYETPMLQGNVISPRSEPAEQEGERPSSPPITPPPPILETEADLPQEGTPVVKVPDENPACPCCGNRMGRISGLIDHLKRTHGKRKILFQCARCGKTNLKHQSIACHVPKCKGVEGLSPVRAWTCEECNRSFGTKIGLGQHKRLAHPAVRNQERVAASHPKENSKRGAHKKCWTEEEEKLLIELIAQFEGHANINKLIAEHITTKTAKQISEKRRLLSKKLMVVEAECEPGPSHRTRRAAAEIRKGAEMNHHNEDAAEDNGAPSKKNGKDLTLREQLTEEGEHLIESGSQEGGGLRSHYRKSIAEWIRSQKITSLRKIFERVIEGKEDLPSIVDEAAQDCYACLKRDLTEGEGRQIQKIREIRRTHPQKPSKQWTKKRARKRGQFLRFQRLFYLDRGKLAGIILDDVESLKCGIPLDVVHEVFKSRWESPGTFKGLGTFKTIGQADNSAFQAMITMKEIKKNIREMNKNAAPGPDGISLRDLMKIDPQCAKLMELFNLWLLTGYIPDGVKNCRTILIPKSTVPEKLNDVNNWRPITIGSIILRLFSKILTARLTKACPINIRQRGFIKSSGCSENLKLLQLIIRYAKREHRPLGVVFVDLAKAFDTVSHSHILSVLKQKGVDEHIIKLIENSYYNIKTYIDLKNEKSDSIGIRIGVKQGDPMSPILFNLSVDPLLCKLEEMGNGFQCHSQNVTALAFADDLVLLSGSWEGMQNNITIVETFCELTGLKMQGEKCHGFYIKPTKDSYTINDCPVWTINGTPLNMIEPGSSEKYLGLYVDPWIGISKPELLEKVDRWLVKVGKAPLKPFQKVDILKGYLIPRVIYLADQANLKPTYLESIDLAIRTGVKEWLHLPACTCDAILYSNTQDGGLGISRLAALIPSVQVRRLHRIAQTSDEVLKTIVKREGIEREFEKLWLMAGGDKERIPSIWDPKTVMIISETGGDQILSEWEIPNPKLIYPKPCNWRKREFNNWTKLLSQGRGIVNFEKDKISNNWLIHYRGIPQRKLITALQLRANIYPTREFLARGRSETYIKSCRHCQADNETCAHIIGYCPSVQDARIKRHNQICHILAEEAKRKDWLVYQEPLLRDQQNELRYESDETSLEMAATEKVDKYKHLTKEIRTITNAKDIVFMGFPLGARGKWYQGNFELLKALGLSKSDREKTARSLSSIALMSSVDIVHIFASKSRTCTTL

SEQ ID NO: 1317 - protein, 1528 aa, synthetic construct
MRKKQQEFENIRQQNLKLITELMNERNTLQEENKKLSEQLQQKIENDQQHQAAELECEEDVIPDSPITAFSFSGVNRLRRKENPHVRYIEQTHTKLEHSVCANEMRKVSKSSTHPQHNPNENEILVADTYDQSQSPMAKAHGTSSYTPDKSSFNLATVVAETLGLGVQEESETQGPMSPLGDELYHCLEGNHKKQPFESGSETPGTSESATPEGSPKRKVSSAEGAAKEEPKRRSARLSAKPPAKVEAKPKKAAAKDKSSDKKVQTKGKRGAKGKQAEVANQETKEDLPAENGETKTEESPASDEAGEKEAKSDSGSETPGTSESATPESYETPRVMGKVTSPSSVLTEHEGDRTSSPPRTPPPILETGADLPQEGTPVVKVPDDNPACPCCGNRIGRISGLIDHLKRTHGKKKILFQCAKCGRTNLKHHSIACHVPKCKGAKGTSPLRGWACEECNRTFGTKIGLGQHKRLAHPAVRNQERVAASHPKENSKRGAHKKCWTEEEEKLLIELIAQFEGHANINKLIAEHITTKTAKQISEKRRLLSKKLMVVEAECEPGPSHRTRRAAAEIRPSKKSPSKRKGKNLALREQLMEEGEHLPESGSQDGGGLRPHYRKVIAEWIRSQKITSLKDVFERVIKGKEDLPLLVDKAAQDHYACLKMDLIEEGDRQSQKIREIRRPRPQKPSKQWTKRRARKRGQFLRFQRLFHLDRGKLAGIILDDVESLQCGIPLDVVHEVFKSRWESPGTFKGLGTFNTIGHADNSAFQTLITAKEIVKNIREMNKNAAPGPDGISLRDLMKTDPHCTKLMELFNLWLTTGYIPEGIKNCRTILIPKSSVPEKLNDVNNWRPITIGSIVLRLFSKILTARLTKACPINTRQRGFIRSPGCSENLKLLQLLIRYAKREHLPLGVVFVDLAKAFDTVSHSHIIAVLKQKGVDEHIIRLIENSYENINTYIDMKNVKSDLIGIQIGVKQGDPMSPILFNLSVDPLLCKLEEMGNGFQYYTKDVTSLAFADDLVLVSGSWEGMQRNIEIVETFCELTGLKMQGEKCHGFYIKPTKDSYTINDCPPWTINGTPLNMIEPGSSEKYLGLYIDPWTGISKPELLEKVDRWLSKVGKAPLKPFQKVDILKGHLIPRLIYLADQANLKSTHLESLDLAIRIGVKEWLHLPSCTCDSILYSNTQDGGLGISRLAALIPSVQARRLHRIAQTTDDVLRTVVEREGIEGEFKKLWVTAGGDKEKIPSIWDPKTIMVISETGGDQSLSEWETPNPKIFYPKPCNWRKREFNNWTKLLTQGRGIANFEKDKISNNWIIHYRGIPQRKLITALQLRANIYPTREFLSRGRSETYIKSCRHCQADNETCSHIIGYCPSVQDARIKRHNQICHILAEEAKSKDWLVYQEPLLRDQQNELYKPDLIFVKGNQAIVTDITIRYESKLSSLADAAAEKVKKYCHLKSQIQELTNAKNITFKGFPVGARGKWYSGNYEVLKALGISNSRQDKIARCMSRKALFTSVDIIHMFVSHSRSIVRT

SEQ ID NO: 1318 - protein, 1504 aa, synthetic construct
MRKKQQEFENIRQQNLKLITELMNERNTLQEENKKLSEQLQQKIENDQQHQAAELECEEDVIPDSPITAFSFSGVNRLRRKENPHVRYIEQTHTKLEHSVCANEMRKVSKSSTHPQHNPNENEILVADTYDQSQSPMAKAHGTSSYTPDKSSFNLATVVAETLGLGVQEESETQGPMSPLGDELYHCLEGNHKKQPFESGSETPGTSESATPEGSPKRKVSSAEGAAKEEPKRRSARLSAKPPAKVEAKPKKAAAKDKSSDKKVQTKGKRGAKGKQAEVANQETKEDLPAENGETKTEESPASDEAGEKEAKSDSGSETPGTSESATPESFESPKVSGRTISPSSVQTEYTGERTSSPPITPPPILEAGADPPQEGTPVVKIPDKNPACPCCGNRMGKITGLVDHLKRTHGKRKILFQCARCGRTNPKHHSIACHIPKCKGAEEPSISMGWACEECNRTFGTKIGLGQHKRLVHPVTRNLERIATTRPKAGTMRGAHRRCWTEDEIELLRKLDKQYEGQKNINKLIAEHIPTKTTKQISDKRRDLHKSPSKKSPSKRKGKNLALREQLMEEGEHLPESGSQDGGGLRPHYRKVIAEWIRSQKITSLKDVFERVIKGKEDLPLLVDKAAQDHYACLKMDLIEEGDRQSQKIREIRRPRPQKPSKQWTKRRARKRGQFLRFQRLFHLDRGKLAGIILDDVESLQCGIPLDVVHEVFKSRWESPGTFKGLGTFNTIGHADNSAFQTLITAKEIVKNIREMNKNAAPGPDGISLRDLMKTDPHCTKLMELFNLWLTTGYIPEGIKNCRTILIPKSSVPEKLNDVNNWRPITIGSIVLRLFSKILTARLTKACPINTRQRGFIRSPGCSENLKLLQLLIRYAKREHLPLGVVFVDLAKAFDTVSHSHIIAVLKQKGVDEHIIRLIENSYENINTYIDMKNVKSDLIGIQIGVKQGDPMSPILFNLSVDPLLCKLEEMGNGFQYYTKDVTSLAFADDLVLVSGSWEGMQRNIEIVETFCELTGLKMQGEKCHGFYIKPTKDSYTINDCPPWTINGTPLNMIEPGSSEKYLGLYIDPWTGISKPELLEKVDRWLSKVGKAPLKPFQKVDILKGHLIPRLIYLADQANLKSTHLESLDLAIRIGVKEWLHLPSCTCDSILYSNTQDGGLGISRLAALIPSVQARRLHRIAQTTDDVLRTVVEREGIEGEFKKLWVTAGGDKEKIPSIWDPKTIMVISETGGDQSLSEWETPNPKIFYPKPCNWRKREFNNWTKLLTQGRGIANFEKDKISNNWIIHYRGIPQRKLITALQLRANIYPTREFLSRGRSETYIKSCRHCQADNETCSHIIGYCPSVQDARIKRHNQICHILAEEAKSKDWLVYQEPLLRDQQNELYKPDLIFVKGNQAIVTDITIRYESKLSSLADAAAEKVKKYCHLKSQIQELTNAKNITFKGFPVGARGKWYSGNYEVLKALGISNSRQDKIARCMSRKALFTSVDIIHMFVSHSRSIVRT

SEQ ID NO: 1319 - protein, 1504 aa, synthetic construct
MRKKQQEFENIRQQNLKLITELMNERNTLQEENKKLSEQLQQKIENDQQHQAAELECEEDVIPDSPITAFSFSGVNRLRRKENPHVRYIEQTHTKLEHSVCANEMRKVSKSSTHPQHNPNENEILVADTYDQSQSPMAKAHGTSSYTPDKSSFNLATVVAETLGLGVQEESETQGPMSPLGDELYHCLEGNHKKQPFESGSETPGTSESATPEGSPKRKVSSAEGAAKEEPKRRSARLSAKPPAKVEAKPKKAAAKDKSSDKKVQTKGKRGAKGKQAEVANQETKEDLPAENGETKTEESPASDEAGEKEAKSDSGSETPGTSESATPESFESPKVSGRTISPSSVQTEYTGERTSSPPITPPPILEAGADPPQEGTPVVKIPDKNPACPCCGNRMGKITGLVDHLKRTHGKRKILFQCARCGRTNPKHHSIACHIPKCKGAEEPSISMGWACEECNRTFGTKIGLGQHKRLVHPVTRNLERIATTRPKAGTMRGAHRRCWTEDEIELLRKLDKQYEGQKNINKLIAEHIPTKTTKQISDKRRDLHKSPSKKSPSKRKGKNLALREQLMEEGEHLPESGSQDGGGLRPHYRKVIAEWIRSQKITSLKDVFERVIKGKEDLPLLVDKAAQDHYACLKMDLIEEGDRQSQKIREIRRPRPQKPSKQWTKRRARKRGQFLRFQRLFHLDRGKLAGIILDDVESLQCGIPLDVVHEVFKSRWESPGTFKGLGTFNTIGHADNSAFQTLITAKEIVKNIREMNKNAAPGPDGISLRDLMKTDPHCTKLMELFNLWLTTGYIPEGIKNCRTILIPKSSVPEKLNDVNNWRPITIGSIVLRLFSKILTARLTKACPINTRQRGFIRSPGCSENLKLLQLLIRYAKREHLPLGVVFVDLAKAFDTVSHSHIIAVLKQKGVDEHIIRLIENSYENINTYIDMKNVKSDLIGIQIGVKQGDPMSPILFNLSVDPLLCKLEEMGNGFQYYTKDVTSLAFADDLVLVSGSWEGMQRNIEIVETFCELTGLKMQGEKCHGFYIKPTKDSYTINDCPPWTINGTPLNMIEPGSSEKYLGLYIDPWTGISKPELLEKVDRWLSKVGKAPLKPFQKVDILKGHLIPRLIYLADQANLKSTHLESLDLAIRIGVKEWLHLPSCTCDSILYSNTQDGGLGISRLAALIPSVQARRLHRIAQTTDDVLRTVVEREGIEGEFKKLWVTAGGDKEKIPSIWDPKTIMVISETGGDQSLSEWETPNPKIFYPKPCNWRKREFNNWTKLLTQGRGIANFEKDKISNNWIIHYRGIPQRKLITALQLRANIYPTREFLSRGRSETYIKSCRHCQADNETCSHIIGYCPSVQDARIKRHNQICHILAEEAKSKDWLVYQEPLLRDQQNELYKPDLIFVKGNQAIVTDITVRYEAAKSSLEEAAAEKVRKYKHLETEVRHLTNAKDVTFVGFPLGARGKWHQDNFKLLTELGLSKSRQVKMAETFSTVALFSSVDIVHMFASRARKSMVM

SEQ ID NO: 1320 - protein, 1503 aa, synthetic construct
MRKKQQEFENIRQQNLKLITELMNERNTLQEENKKLSEQLQQKIENDQQHQAAELECEEDVIPDSPITAFSFSGVNRLRRKENPHVRYIEQTHTKLEHSVCANEMRKVSKSSTHPQHNPNENEILVADTYDQSQSPMAKAHGTSSYTPDKSSFNLATVVAETLGLGVQEESETQGPMSPLGDELYHCLEGNHKKQPFESGSETPGTSESATPEGSPKRKVSSAEGAAKEEPKRRSARLSAKPPAKVEAKPKKAAAKDKSSDKKVQTKGKRGAKGKQAEVANQETKEDLPAENGETKTEESPASDEAGEKEAKSDSGSETPGTSESATPESFESPKVSGRTISPSSVQTEYTGERTSSPPITPPPILEAGADPPQEGTPVVKIPDKNPACPCCGNRMGKITGLVDHLKRTHGKRKILFQCARCGRTNPKHHSIACHIPKCKGAEEPSISMGWACEECNRTFGTKIGLGQHKRLVHPVTRNLERIATTRPKAGTMRGAHRRCWTEDEIELLRKLDKQYEGQKNINKLIAEHIPTKTTKQISDKRRDLHKSPSKKSPSKRKGKNLALREQLMEEGEHLPESGSQDGGGLRPHYRKVIAEWIRSQKITSLKDVFERVIKGKEDLPLLVDKAAQDHYACLKMDLIEEGDRQSQKIREIRRPRPQKPSKQWTKRRARKRGQFLRFQRLFHLDRGKLAGIILDDVESLQCGIPLDVVHEVFKSRWESPGTFKGLGTFNTIGHADNSAFQTLITAKEIVKNIREMNKNAAPGPDGISLRDLMKTDPHCTKLMELFNLWLTTGYIPEGIKNCRTILIPKSSVPEKLNDVNNWRPITIGSIVLRLFSKILTARLTKACPINTRQRGFIRSPGCSENLKLLQLLIRYAKREHLPLGVVFVDLAKAFDTVSHSHIIAVLKQKGVDEHIIRLIENSYENINTYIDMKNVKSDLIGIQIGVKQGDPMSPILFNLSVDPLLCKLEEMGNGFQYYTKDVTSLAFADDLVLVSGSWEGMQRNIEIVETFCELTGLKMQGEKCHGFYIKPTKDSYTINDCPPWTINGTPLNMIEPGSSEKYLGLYIDPWTGISKPELLEKVDRWLSKVGKAPLKPFQKVDILKGHLIPRLIYLADQANLKSTHLESLDLAIRIGVKEWLHLPSCTCDSILYSNTQDGGLGISRLAALIPSVQARRLHRIAQTTDDVLRTVVEREGIEGEFKKLWVTAGGDKEKIPSIWDPKTIMVISETGGDQSLSEWETPNPKIFYPKPCNWRKREFNNWTKLLTQGRGIANFEKDKISNNWIIHYRGIPQRKLITALQLRANIYPTREFLSRGRSETYIKSCRHCQADNETCSHIIGYCPSVQDARIKRHNQICHILAEEAKSKDWLVYQEPLLRDQQNELYKPDLIFVKGNQAIVTDITIRYETSLTTLEEAALEKAKKYAHLVTQIQDLTNTSVINFTGFPLGSRGKWYQNNFKILKELGLSSSRQEKVARRLSNYALFSSVDIVHMFASKARTEVR

SEQ ID NO: 1321 - protein, 1315 aa, synthetic construct
MAPRSDGGTGSGSGLTTHPAPESESGHDSTNPGPVLAAGDGARPVLLVSVGTQTCKEDITSRPTKLIESELGLLVNFSLEVYRSDLKGDVQGVHFPDNWGVLDGFPEVYEQLAPQTGEGDGLKPSLQGDSEGDVLEKGSSEKEKEVTPEALPPKRKAHSEQSQDNIVKVTVPDKNPPCPCCGVRLNSVLALIEHLKGHGKRRVCFRCAKCGRENFNHHSTVCHFAKCKGPQTERPPVGEWICEVCGRDFTTKIGLGQHKRHMHAMERNQERIDASQPKETSNRGAHKRCWTKEEEELLMKLEVQFESHKNINKLIAEHLTTKTAKQISDKRRMLLKKGRVTAGNLDSEPGMNHQPQAEVKDNELGGCHLPGGPAVDKGKLGQHLESGNGHQETAGQKKERGLQARYRRRIMKRLAAGTINIFPKVFKELLNCQEARPLINQTTEECFGLLDSACQIRTALRDKGRAQEERPRKQYQKWMKKRAIKRGNYLRFQRLFHLDRGKLARIILDNTESLSCEIPPSEIYSVFKARWETPGQFNGLGDFEIKGKANNKAFRDLITAKEIEKNVREMSKGSAPGPDGIALGDIRKMDPGYSRTAELFNLWLTSGDIPDMVRGCRTVLIPKSTTPERLKDINNWRPITIGSILLRLFSRIITARMTKACPLNPRQRGFISAPGCSENLKLLQSIIRTAKSEHRPLGVIFVDIAKAFDTVSHQHIIHVLQQRRVDPHIVGLVNNMYNDISTRITTKKDTHTDKIQIRVGVKQGDPLSPLLFNLAMDPLLCKLEESGKGFHRGQSSITAMAFADDLVLLSDSWENMKENIRILETFCDLTGLKTQGQKCHGFYIKPTKDSYTVNNCPAWTINGTPLNMINPGESEKYLGLQIDPWTGIAKYDLSTKLKAWLESIDRAPLKPLQKLDILKTYTIPRLTYLADHSEMKAGALEALDQQIRTAVKDWLHLPSCTCDAILYVSTRDGGLGVTKLAGLIPSVQARRLHRIAQSPDQTMKDFLEKAQMEKMYEKLWIQAGGKKKGMPSIWEAPPATVPPVNAGTLSEWEAPNPKSRYPKPCDWRRKELKKWTKLESQGRGVKNFRNDTISNDWIQCYRRIPHRKLLTAIQLRANVYPTREFLGRGRGDDCVKFCRHCEMDLESCGHIIGFCPVTKDARIKRHNRICDRLCDEAIKRDWVVFKEPHLKDATRELFKPDLIFVKEGRALVVDVTVRYEAAKTTLEAAAAEKVDKYKHLEPEVKSLTNATDVVFMGFPLGARGKFYKGNFDLLETLGLPKTRQISVAKTLSTYALTSSVDIVHMFVSKARKSNV

SEQ ID NO: 1322 - protein, 1238 aa, synthetic construct
MGWSGRIWFVTVATQTKYSDWAFTVHSITNPELAGDGIADLRGLEFVNSEKGYYVGHSPSRSSLLATLPEVYETPRVMGKVTSPSSVLTEHEGDRTSSPPRTPPPILETGADLPQEGTPVVKVPDDNPACPCCGNRIGRISGLIDHLKRTHGKKKILFQCAKCGRTNLKHHSIACHVPKCKGAKGTSPLRGWACEECNRTFGTKIGLSQHKRLAHPVTRNIERITASRPKEESARGAHRRCWSEEEVELLKKLEKQYEGNKNINKLIAEHLPSKTAKQISDKRRGLIKSPSKKNGKDLTLREQLTEEGEHLIESGSQEGGGLRSHYRKSIAEWIRSQKITSLRKIFERVIEGKEDLPSIVDEAAQDHYACLKRDLTEGEGRQIQKIREIRRTHPQKPSKQWTKKRARKRGQFLRFQRLFYLDRGKLAGIILDDVESLKCGIPLDVVHEVFKSRWESPGTFKGLGTFKTIGQADNSAFQAMITMKEIKKNIREMNKNAAPGPDGISLRDLMKTDPQCAKLMELFNLWLLTGYIPDGVKNCRTILIPKSTVPEKLNDVNNWRPITIGSIILRLFSKILTARLTKACPINIRQRGFIKSSGCSENLKLLQLIIRYAKREHRPLGVVFVDLAKAFDTVSHSHILSVLKQKGVDEHIIKLIENSYYNIKTYIDLKNEKSDSIGIRIGVKQGDPMSPILFNLSVDPLLCKLEEMGNGFQCHSQNVTALAFADDLVLLSGSWEGMQNNITIVETFCELTGLKMQGEKCHGFYIKPTKDSYTINDCPVWTINGTPLNMIEPGSSEKYLGLYVDPWIGISKPELLEKVDRWLVKVGKAPLKPFQKVDILKGYLIPRVIYLADQANLKPTYLESIDLAIRTGVKEWLHLPACTCDAILYSNTQDGGLGISRLAALIPSVQVRRLHRIAQTSDEVLKTIVKREGIEREFEKLWLMAGGDKERIPSIWDPKTVMIISETGGDQLSEWEIPNPKLIYPKPCNWRKREFNNWTKLLSQGRGIVNFEKDKISNNWLIHYRGIPQRKLITALQLRANIYPTREFLARGRSETYIKSCRHCQADNETCAHIIGYCPSVQDARIKRHNQICHILAEEAKRKDWLVYQEPLLRDQQNELYKPDLIFVKGNQAIVTDITIRYETTITTLEEAALEKAKKYVHLESQVQDLTNTSVINFTGFPLGSRGKWYQGNYKILNELGLSNSRQEKVARRLSNYALFSSVDIIHMFASKARTEVR

SEQ ID NO: 1323 - DNA, 2409 bp, synthetic construct
  source 1..2409: mol_type = other DNA
gagtaactatgactctcttaaggcagcttgagatggtctgttactaactgggcttagctgcggaagtcacacctcctcgtggtcccgccggacacccgtaaagggtgactgagttgacttctgccccagtgtgagtgagggagattattctccctccctatcgtctggactcgccacccagcgatagtttcacgatcttgctgaaacaaataatttggcacagtttcttactgttgcccagagcctggtccacgggcttaagttggacgctgttggcagcgtggggtgagggccccgctgttgacattgacaaccctcacttggacgtgacgtattttattttccggaattgacctactcgacggatcgatccgaacaaacgacccaacacccgtgcgttttattctgtctttttattgccgatcccctcagaagaactcgtcaagaaggcgatagaaggcgatgcgctgcgaatcgggagcggcgataccgtaaagcacgaggaagcggtcagcccattcgccgccaagctcttcagcaatatcacgggtagccaacgctatgtcctgatagcggtcggccgctttacttgtacagctcgtccatgccgagagtgatcccggcggcggtcacgaactccagcaggaccatgtgatcgcgcttctcgttggggtctttgctcagggcggactgggtgctcaggtagtggttgtcgggcagcagcacggggccgtcgccgatgggggtgttctgctggtagtggtcggccagctgcacgctgccgtcctcgatgttgtggcggatcttgaagttcaccttgatgccgttcttctgcttgtcggccatgatatagacgttgtggctgttgtagttgtactccagcttgtgccccaggatgttgccgtcctccttgaagtcgatgcccttcagctcgatgcggttcaccagggtgtcgccctcgaacttcacctcggcgcgggtcttgtagttgccgtcgtccttgaagaagatggtgcgctcctggacgtagccttcgggcatggcggacttgaagaagtcgtgctgcttcatgtggtcggggtagcggctgaagcactgcacgccgtaggtcagggtggtcacgagggtgggccagggcacgggcagcttgccggtggtgcagatgaacttcagggtcagcttgccgtaggtggcatcgccctcgccctcgccggacacgctgaacttgtggccgtttacgtcgccgtccagctcgaccaggatgggcaccaccccggtgaacagctcctcgcccttgctcaccatggtggcgaattcgaagcttgagctcgagatctgagtccggtagcgctagcggatctgacggttcactaaaccagctctgcttatatagacctcccaccgtacacgcctaccgcccatttgcgtcaatggggcggagttgttacgacattttggaaagtcccgttgattttggtgccaaaacaaactcccattgacgtcaatggggtggagacttggaaatccccgtgagtcaaaccgctatccacgcccattgatgtactgccaaaaccgcatcaccatggtaatagcgatgactaatacgtagatgtactgccaagtaggaaagtcccataaggtcatgtactgggcataatgccaggcgggccatttaccgtcattgacgtcaatagggggcgtacttggcatatgatacacttgatgtactgccaagtgggcagtttaccgtaaatactccacccattgacgtcaatggaaagtccctattggcgttactatgggaacatacgtcattattgacgtcaatgggcgggggtcgttgggcggtcagccaggcgggccatttaccgtaagttatgtaacgcggaactccatatatgggctatgaactaatgaccccgtaattgattactattaaattcctgcagttcaggttatttagatgcttagtttttgtacctttcttgttttgtttaggattttgatagtgttagtatttttatatttttgtacgattgcataatgttcttttttatacagttctgttttaataaaatagacgatagctagagacgttagggcagccacaagccagttaggtagcggatagtaggtaggaacagacttttactatttcataacgcgtcaattaccacctgatttggaccaattcacgggatttgtccaaggtggacgggccacctttacttaacccggaaaaggaacatatataatttatgtgtgttcgataaatagccaaatgcctcgtcatcaccggtaaaaaaaaaaaaaaaaaaaaaaaaaaaaaaacgttgactaaaaaaaaaaaaaaaaaaaaaaaaaaaaaaaaaaaaaaaaaaaaaaaaaaaaaaaaaaaaaaaaaaaaaa

SEQ ID NO: 1324 - protein, 1421 aa, synthetic construct
MSKPDPLNVNMSTPFLGTQMRLLRVSTGTQTSMSDWADWAQRLCGTATRSALCKVVPVSLLSRHQTELLAMGHGSQMPLNAPLNTPDLTESELACLVLDWEFYRTDLSASSFNLVQFSANRESLSGLPEVYEQPTPFQPEGEKICPPRDSELFVPEEGSSEKESEDAPKTSPPTPGKHGLEQTGEEKVMVTVPDKNPPCPCCGTRVNSVLNLIEHLKVSHGKRGVCFRCAKCGKENSNYHSVVCHFKKCRGPETEKAPAGEWICEVCNRDFTTKIGLGQHKRLAHPAVRNQERIVASQPKETSNRGAHKRCWTKEEEELLIRLEAQFEGNKNINKLIAEHITTKTAKQISDKRRLLSRKPAEEPRMEPGTCHHTRRAAASLRTEPEMSHHAQAEDRDNGPGRRPLPGRAAAGGRTMDEIRRHPDKANDQQEASSSGRGPVTRRAAAGKKTKKSIDHPTDKANGQQVAISTRRGCLNRGVTAGVETIEGSSHLPDKDSDGQGTPSREKEGQLQDHYQEVIGAWLSDGRINTFPEAFKGLLGKREIQATINQSILDCFGGIDSKSQVNKMTRDKKDKKPGRPPQKWMKKRAIKRGSYLRFQRLFHLDRGKLAKIVLDNIECLTCDIPPSEIYSVFKARWETAGKFTSLGDFKFTEKVDNSAFRDLITAKEVEKNMQEMSKGSAPGPDGITLRDIQKMDPKLSRTTEIFNLWLAAGKIPDGVRECRTVLIPKSTKPERLKDINNWRPITIGSTLLRLFSRILTARLSKACPLNPRQKGFIQAAGCSENLQLLQSIIWSAKREHRPLGVVFVDIAKAFDTVSHKHILHVLQRRGVDPHIIGLVSDMYENIHTSITTKKARTDRIQIRVGVKQGDPMSPLLFNLAMDPLLCELETNGRGHHRGTNCITAMAFADDLVLLSDSWEDMKSNIKILEAFCDLTGLKTQGEKCHGFYIKPTKDSYTVNDCAAWTINGTPLNMILPGESEKYLGLQIDPWTGLAKSDLSTKLDSWLEQIDRVPLKPLQKIELLKTYTIPRLTYVADHSDLKVSFLETLDQKIRTIVKDWLHLPACTCDAILYSSTKDGGLGITKLAKLIPSVQARRLHRIAQSSDETMKQFLHRDKMEAMYQKLWIQAGGDRENIPSIWEAPPSSEPPNNVSTNSEWEAPTQKDKFPKPCNWRKNEFKKWTKLASQGRGIVNFERDKISNHWIQYYRRIPHRKLLTALQLRANVYPTREFLARGRQDQYIKACRHCDADNESCAHIIGNCPVTQDARIKRHNYICELLLEEAKKKDWVVFKEPHIRDSNKELYKPDLIFVKDGRALVVDVTVRYEAAKSSLEEAAAEKVRKYKHLETEVRHLTNAKDVTFVGFPLGARGKWHQDNFKLLTELGLSKSRQVKMAETFSTVALFSSVDIVHMFASRARKSMVM

SEQ ID NO: 1325 - protein, 1388 aa, synthetic construct
MASCPKPGPPVSAGAMSLESGLTTHSVLAIERGPNSLANSGSDFGGGGLGLPVCLLRVSVGTQTSRSDWVDLVSWSHPGPSSKSQRVDLVSLFPKHRVDLLSKNDQVDLVAQFLPSKFPPNLAENDLALLVNLEFYRSDLHVYECVHFAADWEGLSGLPEVYEQLAPQPCVGETLHSSLPRDSEPFVPEEGSSEKESEDAPKTSPPTPGKHGEQTGEEKVVVTVPDKNPPCPCCGTRVNSVLNRIEHLKVSHGKRGVCFRCAKCGKENSNYHSVVCHFPKCRGPETEKAPAGEWIYEVCNRNFTTKIGLGQHKRLAHPAVRNQERIVASQPKETSNRGAHKRCWTKEEEELLIRLEAQFEGNKNINKLIAEHITTKTAKQISDKRRLLPRKPAEETREEPGVCHRTRRAAAGLRTEPEMSHHAQAEARDNGPGRRPLPGRAAARGRTMDEIRHHPDKGNGRQRTTKQKSEGQLQAYYKKTLEERLSAGALNTFPRAFKQVTEGRDIQLVINQTAQSCFGCLESISQIRTATRDKKDTVTREERPKKPFQKWMKDRAIKKGNYLRFQRLFYLDRGKLAKIILDDIECLSCDIPPSEIYSVFKTRWETTGNFKSLGDFKTYGKADNTAFRELITAKEIEKNVQEMSKGSAPGPDGITLGDVVKMDPEFSRTMEIFNLWLTTGKIPDMVRGCRTVLIPKSTKPDRLKDINNWRPITIGSILLRLFSRIVTARLSKACPLNPRQRGFIRAAGCSENLKLLQTIIWSAKREHRPLGVVFVDIAKAFDTVSHQHIIHALQQREVDPHIVGLVSNMYENISTYITTKRNTHTDKIQIRVGVKQGDPMSPLLFNLAMDPLLCKLEESGKGYHRGQSSITAMAFADDLVLLSDSWENMNTNISILETFCNLTGLKTQGQKCHGFYIKPTKDSYTINDCAAWTINGTPLNMIDPGESEKYLGLQFDPWIGIARSGLSTKLDFWLQRIDQAPLKPLQKTDILKTYTIPRLIYIADHSEVKTGLLETLDQKIRTAVKEWLHLPPCTCDAILYSSTRDGGLGITKLAGLIPSVQARRLHRIAQSSDETMKCFMEKDKMEQLHKKLWIQAGGDRENIPSIWEAPPSIEPPNNVSTNSEWEAPTQKDKFPKPCNWRKNEFKKWTKLASQGRGIVNFERDKISNPWIQYYRRIPHRKLLTALQLRANVYPTREFLARGRQDQYIKACRHCDADIESCAHIIGNCPVTQDARIKRHNYICELLLEEAKKKDWVVFKEPHIRDSNKELYKPDLIFVKDARALVVDVTVRYEAAKSSLEEAAAEKVRKYKHLEMEVRHLTNAKDVTFVGFPLGARGKWHQDNFKLLTELGLSKSRQVKMAETFSTVALFSSVDIVHMFASRARQMVM

SEQ ID NO: 1326 - protein, 1390 aa, synthetic construct
MASCPKPGPPVSAGAMSSESGLTTHSVLAIERGPNSLANSGSDFGGGGLGLPLRLLRLSVGTQTSRSDWVDLVSWSHPGPTSKSQQVDLVSLFPKHRVDLLSKNDQVDLVAQFLPSKFPPNLAENDLALLVNLEFYRSDLHVYECVHFAAHWEGLSGLPEVYEQLAPQPCVGETLHSSLPRDSELFVPEEGSSEKESEDAPKTSPPTPGKHGLEQTGEEKVMVTVPDKNPPCPCCGTRVNSVLNLIEHLKVSHGKRGVCFRCAKCGKENSNYHSVVCHFPKCRGPETEKAPAGEWICEVCNRDFTTKIGLGQHKRLAHPAVRNQERIVASQPKETSNRGAHKRCWTKEEEELLIRLEAQFEGNKNINKLIAEHITTKTAKQISDKRRLLSRKPAEEPREEPGTCHHTRRAAASLRTEPEMSHHAQAEDRDNGPGRRPLPGRAAAGGRTMDEIRRHPDKGNGQQRPTKQKSEEQLQAYYKKTLEERLSAGALNTFPRAFKQVMEGRDIKLVINHTAQDCFGCLESISQIRTATRDKKDTVTREKHPKKPFQKWMKDRAIKKGNYLRFQRLFYLDRGKLAKIVLDDIECLSCDIPLSEIYSVFKTRWETTGSFKSLGDFKTYGKADNTAFRELITAKEIEKNVQEMSKGSAPGPDGITLGDVVKMDPEFSRTMEIFNLWLTTGKIPDMVRGCRTVLIPKSSKPDRLKDINNWRPITIGSILLRLFSRIVTARLSKACPLNPRQRGFIRAAGCSENLKLLQTIIWSAKREHRPLGVVFVDIAKAFDTVSHQHIIHALQQREVDPHIVGLVSNMYENISTYITTKRNTHTDKIQIRVGVKQGDPMSPLLFNLAMDPLLCKLEESGKGYHRGQSKITAMAFADDLVLLSDSWENMNTNISILETFCNLTGLQTQGQKCHGFYIKPTKDSYTINDCAAWTINGTPLNMIDPGESEKYLGLQFDPWIGIARSSLSTKLDFWLQRIDQAPLKPLQKTDILKTYTIPRLIYIADHSEVKTALLETLDQKIRTAVKEWLHLPPCTCDAILYSSTRDGGLGITKLAGLIPSVQARRLHRIAQSSDDTMKCFMEKEKMEQLHKKLWIQAGGDRENIPSIWEAPPSSEPPNNVSTNSEWEAPTQKDKFPKPCNWRKNEFKKWTELASQGRGIANFERDKISNHWIQYYRSIPHRKLLTALQLRANVYPTREFLARGRQDQYIKACRHCDADIESCAHIIGNCPVTQDARIKRHNYICERLLEEAKKKDWVVFKEPHIRDSNKELYKPDLIFVKDARAHVVDVTVRYEAAKSSLEEAAAEKVRKYKHLETEVRQLTNAKDVTFWGFPLGARGKWHQDNFKLLTELGLSKSRQVKMAETFSTVALFSSVDIVHMFASRARKSMVM

SEQ ID NO: 1327 - protein, 1388 aa, synthetic construct
MASCPKPGPPVSAGAMSLESGLTTHSVLAIERGPNSLANSGSDFGGGGLGLPVCLLRVSVGTQTSRSDWVDLVSWSHPGPSSKSQRVDLVSLFPKHRVDLLSKNDQVDLVAQFLPSKFPPNLAENDLALLVNLEFYRSDLHVYECVHFAADWEGLSGLPEVYEQLAPQPCVGETLHSSLPRDSEPFVPEEGSSEKESEDAPKTSPPTPGKHGEQTGEEKVVVTVPDKNPPCPCCGTRVNSVLNRIEHLKVSHGKRGVCFRCAKCGKENSNYHSVVCHFPKCRGPETEKAPAGEWIYEVCNRNFTTKIGLGQHKRLAHPAVRNQERIVASQPKETSNRGAHKRCWTKEEEELLIRLEAQFEGNKNINKLIAEHITTKTAKQISDKRRLLPRKPAEETREEPGVCHRTRRAAAGLRTEPEMSHHAQAEARDNGPGRRPLPGRAAARGRTMDEIRHHPDKGNGRQRTTKQKSEGQLQAYYKKTLEERLSAGALNTFPRAFKQVTEGRDIQLVINQTAQSCFGCLESISQIRTATRDKKDTVTREERPKKPFQKWMKDRAIKKGNYLRFQRLFYLDRGKLAKIILDDIECLSCDIPPSEIYSVFKTRWETTGNFKSLGDFKTYGKADNTAFRELITAKEIEKNVQEMSKGSAPGPDGITLGDVVKMDPEFSRTMEIFNLWLTTGKIPDMVRGCRTVLIPKSTKPDRLKDINNWRPITIGSILLRLFSRIVTARLSKACPLNPRQRGFIRAAGCSENLKLLQTIIWSAKREHRPLGVVFVDIAKAFDTVSHQHIIHALQQREVDPHIVGLVSNMYENISTYITTKRNTHTDKIQIRVGVKQGDPMSPLLFNLAMDPLLCKLEESGKGYHRGQSSITAMAFADDLVLLSDSWENMNTNISILETFCNLTGLKTQGQKCHGFYIKPTKDSYTINDCAAWTINGTPLNMIDPGESEKYLGLQFDPWIGIARSGLSTKLDFWLQRIDQAPLKPLQKTDILKTYTIPRLIYIADHSEVKTGLLETLDQKIRTAVKEWLHLPPCTCDAILYSSTRDGGLGITKLAGLIPSVQARRLHRIAQSSDETMKCFMEKEKMEQLHKKLWIQAGGDRENIPSIWEAPPSSEPPNNVSTNSEWEAPTQKDKFPKPCNWRKNEFKKWTKLASQGRGIVNFERDKISNPWIQYYRRIPHRKLLTALQLRANVYPTREFLARGRQDQYIKACRHCDADIESCAHIIGNCPVTQDARIKRHNYICELLLEEAKKKDWVVFKEPHIRDSNKELYKPDLIFVKDARALVVDVTVRYEAAKSSLEEAAAEKVRKYKHLETEVRHLTNAKDVTFVGFPLGARGKWHQDNFKLLTELGLSKSRQVKMAETFSTVALFSSVDIVHMFASRARKMVM

SEQ ID NO: 1328 - DNA, 2344 bp, synthetic construct
  source 1..2344: mol_type = other DNA
gagtaactatgactctcttaagtctagttacaactgggcatcgctgcagagatcgcacctcctcgtggtcccgctggtagcccttcgaagggtgactaagtcgatctctgccccaggtacggagccgttgggactcaccagtccaacgtaatactcgacggatcgatccgaacaaacgacccaacacccgtgcgttttattctgtctttttattgccgatcccctcagaagaactcgtcaagaaggcgatagaaggcgatgcgctgcgaatcgggagcggcgataccgtaaagcacgaggaagcggtcagcccattcgccgccaagctcttcagcaatatcacgggtagccaacgctatgtcctgatagcggtcggccgctttacttgtacagctcgtccatgccgagagtgatcccggcggcggtcacgaactccagcaggaccatgtgatcgcgcttctcgttggggtctttgctcagggcggactgggtgctcaggtagtggttgtcgggcagcagcacggggccgtcgccgatgggggtgttctgctggtagtggtcggccagctgcacgctgccgtcctcgatgttgtggcggatcttgaagttcaccttgatgccgttcttctgcttgtcggccatgatatagacgttgtggctgttgtagttgtactccagcttgtgccccaggatgttgccgtcctccttgaagtcgatgcccttcagctcgatgcggttcaccagggtgtcgccctcgaacttcacctcggcgcgggtcttgtagttgccgtcgtccttgaagaagatggtgcgctcctggacgtagccttcgggcatggcggacttgaagaagtcgtgctgcttcatgtggtcggggtagcggctgaagcactgcacgccgtaggtcagggtggtcacgagggtgggccagggcacgggcagcttgccggtggtgcagatgaacttcagggtcagcttgccgtaggtggcatcgccctcgccctcgccggacacgctgaacttgtggccgtttacgtcgccgtccagctcgaccaggatgggcaccaccccggtgaacagctcctcgcccttgctcaccatggtggcgaattcgaagcttgagctcgagatctgagtccggtagcgctagcggatctgacggttcactaaaccagctctgcttatatagacctcccaccgtacacgcctaccgcccatttgcgtcaatggggcggagttgttacgacattttggaaagtcccgttgattttggtgccaaaacaaactcccattgacgtcaatggggtggagacttggaaatccccgtgagtcaaaccgctatccacgcccattgatgtactgccaaaaccgcatcaccatggtaatagcgatgactaatacgtagatgtactgccaagtaggaaagtcccataaggtcatgtactgggcataatgccaggcgggccatttaccgtcattgacgtcaatagggggcgtacttggcatatgatacacttgatgtactgccaagtgggcagtttaccgtaaatactccacccattgacgtcaatggaaagtccctattggcgttactatgggaacatacgtcattattgacgtcaatgggcgggggtcgttgggcggtcagccaggcgggccatttaccgtaagttatgtaacgcggaactccatatatgggctatgaactaatgaccccgtaattgattactattaaattcctgcagttcaggttatttagatgcttagtttatgtacctttcttgttttgtctaggattttgatagtgttagtatttttatatttttgtacgattgcataatgttcttttttatacagctctgttttaataaaatagacgatacctagagacgttagggcagccacaagccagttaggtagcggatagtaggtaggaacagacttttactatttcataacgcgtcaattaccacctgatttggaccaattcacgggatttgtccaaggtggacgggccacctttacttaaccaggaaaaggaacatatataatttatgtgtgttcgataaatagccaaatgcctcgtcatcaccggtagacatgataagatacattgatgagtttggacaaaccacaactagaatgcagtgaaaaaaatgctttatttgtgaaatttgtgatgctattgctttatttgtaaccattataagctgcaataaacaagttaacaacaacaaaaaaaaaaaaaaaaaaaaaaaaaaaaaaacgttgactaaaaaaaaaaaaaaaaaaaaaaaaaaaaaaaaaaaaaaaaaaaaaaaaaaaaaaaaaaaaaaaaaaaaaa

SEQ ID NO: 1329 - DNA, 2344 bp, synthetic construct
  source 1..2344: mol_type = other DNA
gagtaactatgactctcttaagtctagttacaactgggcatcgctgcagagatcgcacctcctcgtggtcccgctggtagcccttcgaagggtgactaagtcgatctctgccccaggtacggagccgttgggactcaccagtccaacgtaatactcgacggatcgatccgaacaaacgacccaacacccgtgcgttttattctgtctttttattgccgatcccctcagaagaactcgtcaagaaggcgatagaaggcgatgcgctgcgaatcgggagcggcgataccgtaaagcacgaggaagcggtcagcccattcgccgccaagctcttcagcaatatcacgggtagccaacgctatgtcctgatagcggtcggccgctttacttgtacagctcgtccatgccgagagtgatcccggcggcggtcacgaactccagcaggaccatgtgatcgcgcttctcgttggggtctttgctcagggcggactgggtgctcaggtagtggttgtcgggcagcagcacggggccgtcgccgatgggggtgttctgctggtagtggtcggccagctgcacgctgccgtcctcgatgttgtggcggatcttgaagttcaccttgatgccgttcttctgcttgtcggccatgatatagacgttgtggctgttgtagttgtactccagcttgtgccccaggatgttgccgtcctccttgaagtcgatgcccttcagctcgatgcggttcaccagggtgtcgccctcgaacttcacctcggcgcgggtcttgtagttgccgtcgtccttgaagaagatggtgcgctcctggacgtagccttcgggcatggcggacttgaagaagtcgtgctgcttcatgtggtcggggtagcggctgaagcactgcacgccgtaggtcagggtggtcacgagggtgggccagggcacgggcagcttgccggtggtgcagatgaacttcagggtcagcttgccgtaggtggcatcgccctcgccctcgccggacacgctgaacttgtggccgtttacgtcgccgtccagctcgaccaggatgggcaccaccccggtgaacagctcctcgcccttgctcaccatggtggcgaattcgaagcttgagctcgagatctgagtccggtagcgctagcggatctgacggttcactaaaccagctctgcttatatagacctcccaccgtacacgcctaccgcccatttgcgtcaatggggcggagttgttacgacattttggaaagtcccgttgattttggtgccaaaacaaactcccattgacgtcaatggggtggagacttggaaatccccgtgagtcaaaccgctatccacgcccattgatgtactgccaaaaccgcatcaccatggtaatagcgatgactaatacgtagatgtactgccaagtaggaaagtcccataaggtcatgtactgggcataatgccaggcgggccatttaccgtcattgacgtcaatagggggcgtacttggcatatgatacacttgatgtactgccaagtgggcagtttaccgtaaatactccacccattgacgtcaatggaaagtccctattggcgttactatgggaacatacgtcattattgacgtcaatgggcgggggtcgttgggcggtcagccaggcgggccatttaccgtaagttatgtaacgcggaactccatatatgggctatgaactaatgaccccgtaattgattactattaaattcctgcagttcaggttatttagatgcttagtttatgtacctttcttgttttgtctaggattttgatagtgttagtatttttatatttttgtacgattgcataatgttcttttttatacagctctgttttaataaaatagacgatacctagagacgttagggcagccacaagccagttaggtagcggatagtaggtaggaacagacttttactatttcataacgcgtcaattaccacctgatttggaccaattcacgggatttgtccaaggtggacgggccacttttacttaaccaggaaaaggaacatatataatttatgtgtgttcgataaatagccaaatgcctcgtcatcaccggtagacatgataagatacattgatgagtttggacaaaccacaactagaatgcagtgaaaaaaatgctttatttgtgaaatttgtgatgctattgctttatttgtaaccattataagctgcaataaacaagttaacaacaacaaaaaaaaaaaaaaaaaaaaaaaaaaaaaaacgttgactaaaaaaaaaaaaaaaaaaaaaaaaaaaaaaaaaaaaaaaaaaaaaaaaaaaaaaaaaaaaaaaaaaaaaa

SEQ ID NO: 1330 - DNA, 2344 bp, synthetic construct
  source 1..2344: mol_type = other DNA
gagtaactatgactctcttaagtctagttacaactgggcatcgctgcagagatcgcacctcctcgtggtcccgctggtagcccttcgaagggtgactaagtcgatctctgccccaggtacggagccgttgggactcaccagtccaacgtaatactcgacggatcgatccgaacaaacgacccaacacccgtgcgttttattctgtctttttattgccgatcccctcagaagaactcgtcaagaaggcgatagaaggcgatgcgctgcgaatcgggagcggcgataccgtaaagcacgaggaagcggtcagcccattcgccgccaagctcttcagcaatatcacgggtagccaacgctatgtcctgatagcggtcggccgctttacttgtacagctcgtccatgccgagagtgatcccggcggcggtcacgaactccagcaggaccatgtgatcgcgcttctcgttggggtctttgctcagggcggactgggtgctcaggtagtggttgtcgggcagcagcacggggccgtcgccgatgggggtgttctgctggtagtggtcggccagctgcacgctgccgtcctcgatgttgtggcggatcttgaagttcaccttgatgccgttcttctgcttgtcggccatgatatagacgttgtggctgttgtagttgtactccagcttgtgccccaggatgttgccgtcctccttgaagtcgatgcccttcagctcgatgcggttcaccagggtgtcgccctcgaacttcacctcggcgcgggtcttgtagttgccgtcgtccttgaagaagatggtgcgctcctggacgtagccttcgggcatggcggacttgaagaagtcgtgctgcttcatgtggtcggggtagcggctgaagcactgcacgccgtaggtcagggtggtcacgagggtgggccagggcacgggcagcttgccggtggtgcagatgaacttcagggtcagcttgccgtaggtggcatcgccctcgccctcgccggacacgctgaacttgtggccgtttacgtcgccgtccagctcgaccaggatgggcaccaccccggtgaacagctcctcgcccttgctcaccatggtggcgaattcgaagcttgagctcgagatctgagtccggtagcgctagcggatctgacggttcactaaaccagctctgcttatatagacctcccaccgtacacgcctaccgcccatttgcgtcaatggggcggagttgttacgacattttggaaagtcccgttgattttggtgccaaaacaaactcccattgacgtcaatggggtggagacttggaaatccccgtgagtcaaaccgctatccacgcccattgatgtactgccaaaaccgcatcaccatggtaatagcgatgactaatacgtagatgtactgccaagtaggaaagtcccataaggtcatgtactgggcataatgccaggcgggccatttaccgtcattgacgtcaatagggggcgtacttggcatatgatacacttgatgtactgccaagtgggcagtttaccgtaaatactccacccattgacgtcaatggaaagtccctattggcgttactatgggaacatacgtcattattgacgtcaatgggcgggggtcgttgggcggtcagccaggcgggccatttaccgtaagttatgtaacgcggaactccatatatgggctatgaactaatgaccccgtaattgattactattaaattcctgcagttcaggttatttagatgcttagtttttgtacctttcttgttttgtttaggattttgatagtgttagtatttttatatttttgtacgattgcataatgttctttcttatatagttctgttttaataaaatagacgatagctagagacgttagggcagccacaagccagttaggtagcggatagtaggtaggaacagacttttactacttcataacgcgtcaattaccacctgatttggaccaattcacgggatttgtccaaggtggacgggccacctttacttaacccggaaaaggaacatatataatttatgtgtgttcgataaatagccaaatgcctcgtcatcaccggtagacatgataagatacattgatgagtttggacaaaccacaactagaatgcagtgaaaaaaatgctttatttgtgaaatttgtgatgctattgctttatttgtaaccattataagctgcaataaacaagttaacaacaacaaaaaaaaaaaaaaaaaaaaaaaaaaaaaaacgttgactaaaaaaaaaaaaaaaaaaaaaaaaaaaaaaaaaaaaaaaaaaaaaaaaaaaaaaaaaaaaaaaaaaaaaa

SEQ ID NO: 1331 - DNA, 2391 bp, synthetic construct
  source 1..2391: mol_type = other DNA
gagtaactatgactctcttaagggtctagttacaactgggcatcgctgcagagatcgcacctcctcgtggtcccgctggtagcccttcgaagggtgactaagttgatctctgccccaggtacggagccgttgggactcaccagtccaacgtaactcctgcccaaactcggtgaaacaaattcttcggtaaaaagcccctactcgacggatcgatccgaacaaacgacccaacacccgtgcgttttattctgtctttttattgccgatcccctcagaagaactcgtcaagaaggcgatagaaggcgatgcgctgcgaatcgggagcggcgataccgtaaagcacgaggaagcggtcagcccattcgccgccaagctcttcagcaatatcacgggtagccaacgctatgtcctgatagcggtcggccgctttacttgtacagctcgtccatgccgagagtgatcccggcggcggtcacgaactccagcaggaccatgtgatcgcgcttctcgttggggtctttgctcagggcggactgggtgctcaggtagtggttgtcgggcagcagcacggggccgtcgccgatgggggtgttctgctggtagtggtcggccagctgcacgctgccgtcctcgatgttgtggcggatcttgaagttcaccttgatgccgttcttctgcttgtcggccatgatatagacgttgtggctgttgtagttgtactccagcttgtgccccaggatgttgccgtcctccttgaagtcgatgcccttcagctcgatgcggttcaccagggtgtcgccctcgaacttcacctcggcgcgggtcttgtagttgccgtcgtccttgaagaagatggtgcgctcctggacgtagccttcgggcatggcggacttgaagaagtcgtgctgcttcatgtggtcggggtagcggctgaagcactgcacgccgtaggtcagggtggtcacgagggtgggccagggcacgggcagcttgccggtggtgcagatgaacttcagggtcagcttgccgtaggtggcatcgccctcgccctcgccggacacgctgaacttgtggccgtttacgtcgccgtccagctcgaccaggatgggcaccaccccggtgaacagctcctcgcccttgctcaccatggtggcgaattcgaagcttgagctcgagatctgagtccggtagcgctagcggatctgacggttcactaaaccagctctgcttatatagacctcccaccgtacacgcctaccgcccatttgcgtcaatggggcggagttgttacgacattttggaaagtcccgttgattttggtgccaaaacaaactcccattgacgtcaatggggtggagacttggaaatccccgtgagtcaaaccgctatccacgcccattgatgtactgccaaaaccgcatcaccatggtaatagcgatgactaatacgtagatgtactgccaagtaggaaagtcccataaggtcatgtactgggcataatgccaggcgggccatttaccgtcattgacgtcaatagggggcgtacttggcatatgatacacttgatgtactgccaagtgggcagtttaccgtaaatactccacccattgacgtcaatggaaagtccctattggcgttactatgggaacatacgtcattattgacgtcaatgggcgggggtcgttgggcggtcagccaggcgggccatttaccgtaagttatgtaacgcggaactccatatatgggctatgaactaatgaccccgtaattgattactattaaattcctgcagttcaggttatttagatgcttagtttttgtacctttcttgttttgtttaggattttgatagtgttagtatttttatatttttgtacgattgcataatgttcttttttatacagttctgttttaataaaatagacgatagctagagacgttagggcagccacaagccagttaggtagcggatagtaggtaggaacagacttttactatttcataacgcgtcaattaccacctgatttggaccaattcacgggatttgtccaaggtggacgggccacctttacttaacccggaaaaggaacatatataatttatgtgtgttcgataaatagccaaatgcctcgtcatcaccggtagacatgataagatacattgatgagtttggacaaaccacaactagaatgcagtgaaaaaaatgctttatttgtgaaatttgtgatgctattgctttatttgtaaccattataagctgcaataaacaagttaacaacaacaaaaaaaaaaaaaaaaaaaaaaaaaaaaaaacgttgactaaaaaaaaaaaaaaaaaaaaaaaaaaaaaaaaaaaaaaaaaaaaaaaaaaaaaaaaaaaaaaaaaaaaaa

SEQ ID NO: 1332 - DNA, 2391 bp, synthetic construct
  source 1..2391: mol_type = other DNA
gagtaactatgactctcttaagggtctagttacaactgggcatcgctgcagagatcgcacctcctcgtggtcccgctggtagccctccgaagggtgactaagttgatctctgccccaggtacggagccgttgggactcaccagtccaacgtaactcctgcccaaactcggtgaaacaaattcttcggtaaaaagcccctactcgacggatcgatccgaacaaacgacccaacacccgtgcgttttattctgtctttttattgccgatcccctcagaagaactcgtcaagaaggcgatagaaggcgatgcgctgcgaatcgggagcggcgataccgtaaagcacgaggaagcggtcagcccattcgccgccaagctcttcagcaatatcacgggtagccaacgctatgtcctgatagcggtcggccgctttacttgtacagctcgtccatgccgagagtgatcccggcggcggtcacgaactccagcaggaccatgtgatcgcgcttctcgttggggtctttgctcagggcggactgggtgctcaggtagtggttgtcgggcagcagcacggggccgtcgccgatgggggtgttctgctggtagtggtcggccagctgcacgctgccgtcctcgatgttgtggcggatcttgaagttcaccttgatgccgttcttctgcttgtcggccatgatatagacgttgtggctgttgtagttgtactccagcttgtgccccaggatgttgccgtcctccttgaagtcgatgcccttcagctcgatgcggttcaccagggtgtcgccctcgaacttcacctcggcgcgggtcttgtagttgccgtcgtccttgaagaagatggtgcgctcctggacgtagccttcgggcatggcggacttgaagaagtcgtgctgcttcatgtggtcggggtagcggctgaagcactgcacgccgtaggtcagggtggtcacgagggtgggccagggcacgggcagcttgccggtggtgcagatgaacttcagggtcagcttgccgtaggtggcatcgccctcgccctcgccggacacgctgaacttgtggccgtttacgtcgccgtccagctcgaccaggatgggcaccaccccggtgaacagctcctcgcccttgctcaccatggtggcgaattcgaagcttgagctcgagatctgagtccggtagcgctagcggatctgacggttcactaaaccagctctgcttatatagacctcccaccgtacacgcctaccgcccatttgcgtcaatggggcggagttgttacgacattttggaaagtcccgttgattttggtgccaaaacaaactcccattgacgtcaatggggtggagacttggaaatccccgtgagtcaaaccgctatccacgcccattgatgtactgccaaaaccgcatcaccatggtaatagcgatgactaatacgtagatgtactgccaagtaggaaagtcccataaggtcatgtactgggcataatgccaggcgggccatttaccgtcattgacgtcaatagggggcgtacttggcatatgatacacttgatgtactgccaagtgggcagtttaccgtaaatactccacccattgacgtcaatggaaagtccctattggcgttactatgggaacatacgtcattattgacgtcaatgggcgggggtcgttgggcggtcagccaggcgggccatttaccgtaagttatgtaacgcggaactccatatatgggctatgaactaatgaccccgtaattgattactattaaattcctgcagttcaggttatttagatgcttagtttttgtacctttcttgttttgtttaggattttgatagtgttagtatttttatatttttgtacgattgcataatgttcttttttatacagttctgttttaataaaatagacgatagctagagacgttagggcagccacaagccagttaggtagcggatagtaggtaggaacagacttttactatttcataacgcgtcaattaccacctgatttggaccaattcacgggatttgtccaaggtggacgggccacctttacttaacccggaaaaggaacatatataatttatgtgtgttcgataaatagccaaatgcctcgtcatcaccggtagacatgataagatacattgatgagtttggacaaaccacaactagaatgcagtgaaaaaaatgctttatttgtgaaatttgtgatgctattgctttatttgtaaccattataagctgcaataaacaagttaacaacaacaaaaaaaaaaaaaaaaaaaaaaaaaaaaaaacgttgactaaaaaaaaaaaaaaaaaaaaaaaaaaaaaaaaaaaaaaaaaaaaaaaaaaaaaaaaaaaaaaaaaaaaaa

SEQ ID NO: 1333 - DNA, 2391 bp, synthetic construct
  source 1..2391: mol_type = other DNA
gagtaactatgactctcttaagggtctagttacaactgggcatcgctgcagagatcgcacctcctcgtggtcccgctggtagccctccgaagggtgactaagtcgatctctgccccaggtacggagccgttgggactcaccagtccaacgtaactcctgcctaaactcggtgaaacaaattcttcggtaaaaagcccctactcgacggatcgatccgaacaaacgacccaacacccgtgcgttttattctgtctttttattgccgatcccctcagaagaactcgtcaagaaggcgatagaaggcgatgcgctgcgaatcgggagcggcgataccgtaaagcacgaggaagcggtcagcccattcgccgccaagctcttcagcaatatcacgggtagccaacgctatgtcctgatagcggtcggccgctttacttgtacagctcgtccatgccgagagtgatcccggcggcggtcacgaactccagcaggaccatgtgatcgcgcttctcgttggggtctttgctcagggcggactgggtgctcaggtagtggttgtcgggcagcagcacggggccgtcgccgatgggggtgttctgctggtagtggtcggccagctgcacgctgccgtcctcgatgttgtggcggatcttgaagttcaccttgatgccgttcttctgcttgtcggccatgatatagacgttgtggctgttgtagttgtactccagcttgtgccccaggatgttgccgtcctccttgaagtcgatgcccttcagctcgatgcggttcaccagggtgtcgccctcgaacttcacctcggcgcgggtcttgtagttgccgtcgtccttgaagaagatggtgcgctcctggacgtagccttcgggcatggcggacttgaagaagtcgtgctgcttcatgtggtcggggtagcggctgaagcactgcacgccgtaggtcagggtggtcacgagggtgggccagggcacgggcagcttgccggtggtgcagatgaacttcagggtcagcttgccgtaggtggcatcgccctcgccctcgccggacacgctgaacttgtggccgtttacgtcgccgtccagctcgaccaggatgggcaccaccccggtgaacagctcctcgcccttgctcaccatggtggcgaattcgaagcttgagctcgagatctgagtccggtagcgctagcggatctgacggttcactaaaccagctctgcttatatagacctcccaccgtacacgcctaccgcccatttgcgtcaatggggcggagttgttacgacattttggaaagtcccgttgattttggtgccaaaacaaactcccattgacgtcaatggggtggagacttggaaatccccgtgagtcaaaccgctatccacgcccattgatgtactgccaaaaccgcatcaccatggtaatagcgatgactaatacgtagatgtactgccaagtaggaaagtcccataaggtcatgtactgggcataatgccaggcgggccatttaccgtcattgacgtcaatagggggcgtacttggcatatgatacacttgatgtactgccaagtgggcagtttaccgtaaatactccacccattgacgtcaatggaaagtccctattggcgttactatgggaacatacgtcattattgacgtcaatgggcgggggtcgttgggcggtcagccaggcgggccatttaccgtaagttatgtaacgcggaactccatatatgggctatgaactaatgaccccgtaattgattactattaaattcctgcagttcaggttatttagatgcttagtttttgtacctttcttgttttgtttaggattttgatagtgttagtatttttatatttttgtacgattgcataatgttcttttttatacagttctgttttaataaaatagacgatagctagagacgttagggcagccacaagccagttaggtagcggatagtaggtaggaacagacttttactatttcataacgcgtcaattaccacctgatttggaccaattcacgggatttgtccaaggtggacgggccacctttacttaacccggaaaaggaacatatataatttatgtgtgttcgataaatagccaaatgcctcgtcatcaccggtagacatgataagatacattgatgagtttggacaaaccacaactagaatgcagtgaaaaaaatgctttatttgtgaaatttgtgatgctattgctttatttgtaaccattataagctgcaataaacaagttaacaacaacaaaaaaaaaaaaaaaaaaaaaaaaaaaaaaacgttgactaaaaaaaaaaaaaaaaaaaaaaaaaaaaaaaaaaaaaaaaaaaaaaaaaaaaaaaaaaaaaaaaaaaaaa

SEQ ID NO: 1334 - DNA, 2269 bp, synthetic construct
  source 1..2269: mol_type = other DNA
gagtaactatgactctcttaaagacttaagtgagtttggttacaactgggcatagctgcagagaccgcgcctcctcgcggccccgctggtaagcccttaacagggtgactaatactcgacggatcgatccgaacaaacgacccaacacccgtgcgttttattctgtctttttattgccgatcccctcagaagaactcgtcaagaaggcgatagaaggcgatgcgctgcgaatcgggagcggcgataccgtaaagcacgaggaagcggtcagcccattcgccgccaagctcttcagcaatatcacgggtagccaacgctatgtcctgatagcggtcggccgctttacttgtacagctcgtccatgccgagagtgatcccggcggcggtcacgaactccagcaggaccatgtgatcgcgcttctcgttggggtctttgctcagggcggactgggtgctcaggtagtggttgtcgggcagcagcacggggccgtcgccgatgggggtgttctgctggtagtggtcggccagctgcacgctgccgtcctcgatgttgtggcggatcttgaagttcaccttgatgccgttcttctgcttgtcggccatgatatagacgttgtggctgttgtagttgtactccagcttgtgccccaggatgttgccgtcctccttgaagtcgatgcccttcagctcgatgcggttcaccagggtgtcgccctcgaacttcacctcggcgcgggtcttgtagttgccgtcgtccttgaagaagatggtgcgctcctggacgtagccttcgggcatggcggacttgaagaagtcgtgctgcttcatgtggtcggggtagcggctgaagcactgcacgccgtaggtcagggtggtcacgagggtgggccagggcacgggcagcttgccggtggtgcagatgaacttcagggtcagcttgccgtaggtggcatcgccctcgccctcgccggacacgctgaacttgtggccgtttacgtcgccgtccagctcgaccaggatgggcaccaccccggtgaacagctcctcgcccttgctcaccatggtggcgaattcgaagcttgagctcgagatctgagtccggtagcgctagcggatctgacggttcactaaaccagctctgcttatatagacctcccaccgtacacgcctaccgcccatttgcgtcaatggggcggagttgttacgacattttggaaagtcccgttgattttggtgccaaaacaaactcccattgacgtcaatggggtggagacttggaaatccccgtgagtcaaaccgctatccacgcccattgatgtactgccaaaaccgcatcaccatggtaatagcgatgactaatacgtagatgtactgccaagtaggaaagtcccataaggtcatgtactgggcataatgccaggcgggccatttaccgtcattgacgtcaatagggggcgtacttggcatatgatacacttgatgtactgccaagtgggcagtttaccgtaaatactccacccattgacgtcaatggaaagtccctattggcgttactatgggaacatacgtcattattgacgtcaatgggcgggggtcgttgggcggtcagccaggcgggccatttaccgtaagttatgtaacgcggaactccatatatgggctatgaactaatgaccccgtaattgattactattaaattcctgcagggtagataatctttgtatagtggggggggatctcatgtaccgggtttcttttatttgattttcaataaaacagacggtagctaggttcgcaaggcagccacaagccaaagataggtagggtgctcatagtgagtagggacagtgccttttgattcacaacgcgtcaataccatctgacacggatacccttaccggacttgtcatgatctcccagacttgtccaaggtggacgggccacctttacttaacccggaaaaggaacatatattaattatatgtgttcggaaaatagccaaatgcctcgtcatcaccggtagacatgataagatacattgatgagtttggacaaaccacaactagaatgcagtgaaaaaaatgctttatttgtgaaatttgtgatgctattgctttatttgtaaccattataagctgcaataaacaagttaacaacaacaaaaaaaaaaaaaaaaaaaaaaaaaaaaaaacgttgactaaaaaaaaaaaaaaaaaaaaaaaaaaaaaaaaaaaaaaaaaaaaaaaaaaaaaaaaaaaaaaaaaaaaaa

SEQ ID NO: 1335 - skipped

SEQ ID NO: 1336 - protein, 1253 aa, synthetic construct; identical to SEQ ID NO: 460

SEQ ID NO: 1337 - protein, 1335 aa, synthetic construct
MAYCLKPGPPVSDRGKEFGSGLTTHPEPESESGHDPTVPNPGPSLGAGEGAQPLPLLRVSVGTQTCEEDFITSRPTKLPGIESELGPLVKFSLEVYRSDLKGDVQFEGIHFPDNWGVLEGFPEVYEQLAPQPNGGDELNHSLPGDREGDVLEKDSSEKEKEAAPEALPSVQRARSEQLPDNIVKVTVPDKNPPCPCCGVRLNSVLALIEHLKGSHGRRRVCFRCAKCGRENFNHHSTVCHYAKCKGPQIERPPVGEWICEVCGRDFTTKIGLGQHKRHMHAMVRNQERIDASQPKETSNRGAHKRCWTKEEEELLMKLEVQFENHKNINKLIAEQLTTKTAKQISDKRRMLLKKGRGTTGNLETEPGMSHQSQAKVKDNGLGGDHLPGGPVVDKGYIGKPGQHLDTDNSHQITAGKKKGGGLQARYRRRIMKRLAAGTINIFPKVFKELINDQEARPLINQTTEDCFGLLDSACQIRTALREKGKSQEERPRKQYQKWMKKRAIKRGDYLRFQRLFHLDRGKLARIILDNTESLSCDISPSEIYSVFKARWETPGHFNGLGDFEIKGKANNKAFRDFITAKEIEKNVREMSKGSAPGPDGIALGDIKKMDPGYSRTAELFNLWLTAGDIPDMVRGCRTVLIPKSTTPERLKDINNWRPITIGSILLRLFSRIITARMTKACPLNPRQRGFISAPGCSENLKLLQSIIRTAKNEHKPLGVIFVDIAKAFDTVSHQHIIHVLQQRRVDPHIVGLVNNMYKDISTYVTTKKNTHTDKIQIRVGVKQGDPLSPLLFNLAMDPLLCKLEESGKGFHRGQSSITAMAFADDLVLLSDSWENMKENIKILETFCNLTGLKTQGQKCHGFYIKPTKDSYTINNCPAWTINGTPLNMINPGESEKYLGLQIDPWTGVAKYDLSTKLKIWLESIDRAPLKPLQKLDILKTYTIPRLTYLADHSEMKAGALEALDQQIRTAVKDWLHLPSCTCDAILYVSTRDGGLGVTKLAGLIPSVQARRLHRIAQSPDETMKDFLEKAQMEKMYEKLWVQAGGKKKDMPSIWEALPMTVPPTNTGNLSEWEAPNPKSKYPKPCDWRRKELKKWTKLESQGRGVKNFRNDTISNDWIQYYRRIPHRKLLTAIQLRANVYPTREFLARGRGDNQVKFCRHCEADLETCGHIIGFCPVTKDARIKRHNRICDRLCEEAAKREWVVFKEPHLRDATTELFKPDVIFVKEDRALVVDVTVRYESAKTTLEAAAMEKVDKYKHLEAEVKELTNAKDVVFMGFPLGARGKFYKGNFNLLETLGLPKTRQLSVAKTLSTYALMSSVDIVHMFASRSRKPNV

SEQ ID NO: 1338 - DNA, 4471 bp, synthetic construct; identical to SEQ ID NO: 511
  source 1..4471: mol_type = other DNA

SEQ ID NO: 1339 - DNA, 372 bp, synthetic construct
  source 1..372: mol_type = other DNA
tatctgctactgttctgttttatatcgggtttgctatattactacttgttgttactattgtacttactgttctgtcttatgttgtttcttgcggtattactacttactgccttgctgtattactattcaattctttaataaaactacccctggtactcctgctctattaccctggcactggaaaggtcgggacagaaaactggaactcgtattcatgacgtgtcacaccaacctaaatttggacaaaatgctaattggaaatgtcaaattttttaccgatttggaccactttaccggatttgacacaggtggacgggccacctttacttaactcggaaaagaaacatatataatttttatgtgtttgttaaa

SEQ ID NO: 1340 - DNA, 369 bp, synthetic construct
  source 1..369: mol_type = other DNA
ctattgttactgtttcggttatattgctcttttttgctgtattattgttggttgttcttattgcatttattgttctgtcttgtatcgttcttgctatattatcattcattgccttgttgtattactatcaattctttaataaaactacccctggtactcctgctctgttcccttggcactggaaaggttgggagagtaatttggaactcgtattcatgacgtgtcacatcaacctaaattttgacaaaatactaattggacttgacaaattctgccgaattggactattcactggattggacacaggtggacgggccacctttacttaactcggaaaagaaacatatatacttttatgtgtttgttaaa

SEQ ID NO: 1341 - DNA, 299 bp, synthetic construct
  source 1..299: mol_type = other DNA
gacgggatcatagttactaactgggcagagctgcagaggttacacctcctcgtggtcccgctggatgcccttcggggtaaccaagttaacctctgccccagtctgggaattatagctacttcccccctatcgtctggcctcaccaaccattcgatagattcggcctggtgatccaaattcctggcaacgatttttcgtcgctgcccaaagccttgcctacgggcacagttgggctcagtcatacagcacttgagggggtgttgtttgacttatactactcctctaactggactggcaaa

SEQ ID NO: 1342 - DNA, 299 bp, synthetic construct
  source 1..299: mol_type = other DNA
gatgggatcatagttactaactgggcagagctgcagaggttacacctcctcgtggtcccgctggatgcccttcggggtaaccaagttaacctctgccccagtgtgggaattatagctacttcccccctatcgtccggcctcaccgaccgttcgatagattctgtttggtgatacaaattcctggcaacgatttccagtcgctgcccaaagccttgcctacgggcacagttgggctcagtcatacagcacttgagggggtgttgtttgacttatactactcctctatctggactggcaaa

SEQ ID NO: 1343 - DNA, 299 bp, synthetic construct
  source 1..299: mol_type = other DNA
gacgggatcatagttactaactgggcagagctgcagaggttacacctcctcgtggtcccgctggatgcccttcggggtaaccaagttaacctctgccccagtgtgggaattatagctacttcccccctatcgtctggcctcaccaaccagtcgatagattcgctgtggtgatctaaattcctggcaccgattctcgatcgctgcccaaagcctcgcctacgggcacagttgggctcagtcatacagcacttgagggggtgttgtttgacttatacttctcctctatctggactggcaaa

SEQ ID NO: 1344 - DNA, 232 bp, synthetic construct
  source 1..232: mol_type = other DNA
attactttgaatttgcttaattgtaatgtttagatatgataagtagatgtattagtggtagtataagtagtatatagaattgtagcttgtattgtagtatgttaataaaaacggactgggatctcgtgatgattacctttaatcatgacgctcactggatggacttggtaggtggacgggccaccttcataaaacccggaaaaagttcacatacttgttatgtgttcgtaaa

SEQ ID NO: 1345 - DNA, 210 bp, synthetic construct
  source 1..210: mol_type = other DNA
atttgaatttgtctttttgtagagtaataagtagatgtattagatgtagaatgtagtattgtagattgtaatgtagtatgcaataaaatctggactgggatctcgtgatgattaccttaatcatgacgcgcactggatggacttggtaggtggacgggccaccttcataaaacccggaaaaagttcacatacttgttatgtgttcgttac

SEQ ID NO: 1346 - DNA, 240 bp, synthetic construct
  source 1..240: mol_type = other DNA
acattttcattatattactcttgatgtattaggtaatagattagtataagtagtatgtagatgtattagattgtaatgtagtattgtagtattgtagaaatgtagtattgcaataaactggactgggatctcgtgatgattacctttaatcatgacgctcactggacatgacttggtaggtggacgggccaccttcataaaacccggaaaaagtacacatactcgtaatgtgttcgtaaa

SEQ ID NO: 1347 - DNA, 208 bp, synthetic construct
  source 1..208: mol_type = other DNA
acttattctgacttatttagatttgtaatgtttagatgtagtattgtagcatgtagttttgtagattgtaatgtagaatgtaataaaatggactgggatctcgtgatgattaccttaatcatgacgctcactggactgacttggttggtggacgggccaccttataaaacccggaaaaagtacacataccctgttatgtgttcgtaag

SEQ ID NO: 1348 - DNA, 293 bp, synthetic construct
  source 1..293: mol_type = other DNA
gacgggatcatagttacaactgggcatagctgcggggggtcacacctccacgtggtcccgccggatactccttgtgggtaaccgagttgaccccctgccccagtgtgaacggagctatggttacttccaccctatcaagtggcctcaccaaccacttgatagtatctccctaaggtgaaacaaagttcagacttctgtctaaattcctcagcccacggtaatagttgggcacgaccgacaagttcggtggggtactgtcggtcctaccaaagccccacaattggacattcgaa

SEQ ID NO: 1349 - DNA, 295 bp, synthetic construct
  source 1..295: mol_type = other DNA
gacgggatcatagttacaactgggcatagctgcggggggtcacacctccccgtggtcccgccggataccccttgtgggtaaccgagttgaccccctgccccagtgtgagcagagctatggttacttcctccctatcaagtggcctcaccaaccacttgatagtatctccctaaggtgaaacaaagttcagactttgtgtctaaattcctgggcccacggtaagagttgggcaactctgacaagttcggtggggtactgtcggaggggttaaatccccacaattcggactttcgag

SEQ ID NO: 1350 - DNA, 297 bp, synthetic construct
  source 1..297: mol_type = other DNA
gacgggatcatagttacaactgggcatagctgcggggggtcacacctccccgtggtcccgccggatacctcttgtgggtaaccgagttgaccccctgccccagtgcgaacggagttatggttacttcctccctatcaattggcctcaccaaccaattgatagtaatatcccaaggtgaaacaaagttctgaccttgcgtctaaattcctagcccacggtaatagttgggcttgtccggcaagttctgttggggtactgtcggacttgtcgaaatccccacaaatttggatatacgaa

SEQ ID NO: 1351 - DNA, 298 bp, synthetic construct
  source 1..298: mol_type = other DNA
gacgggatcatagttactaactgggcacagctgcggggggtcacacctccacgtggtcccgctggataccccttgtgggtaaccgagttgaccccctgccccagtggcacggagctatggttacttcctccctatcgagtggactcaccaaccacttgatagtatctcccaaaggtgaaacaaagttctgaaacgctccgtttctaaattccttagcccacggtaatagttgggcacctccgacaagttcggtggggtactgtcggattgatcaaatcctcacaattggcacttcgaa

SEQ ID NO: 1352 - DNA, 250 bp, synthetic construct
  source 1..250: mol_type = other DNA
gcagttccttactattgttttgtaaacttcctctgtagcacgttttcaataaagtttcggcggaggctagggacgcagggcagccacaagccagaacatcgctcatggtaagtagggacaggacggaacttttcataacgcgtcaattaccacccgatttggaccgatttacctgatttgtccgaggtggacgggccacctttacttaacccggaaaaggaacatatagtatttatatgtgttcgaaaaa

SEQ ID NO: 1353 - DNA, 356 bp, synthetic construct
  source 1..356: mol_type = other DNA
tttatttatttttattcttgttattgttataggttgttttactttttgttgtatttttgtctttttgtattttgttgcaatgttttgtatgttttcttattatttaaaaaaaaaaaaaaaaaaaaaaaaaaaaaaaaaaaaaaaaaaaaaaaccaataaaaaagacagtagctagggacgcagggcagccacaagccagttaggtagctgatagtgagtagggacaggactttttatttcataccgcgtcaattaccacccgaactggaccaatttaccggatttgtccaaggtggacgggccacctttacttaacccggaaaaggaacatatattatttatatgtgttcgaaaaa

SEQ ID NO: 1354 - DNA, 362 bp, synthetic construct
  source 1..362: mol_type = other DNA
tttattttttatttttattttattttatagctttttgtaactgtttgtagcttcctttttgtagtatttttgcatttttgtatctttttatatgctttaatttaaaaaaaaaaaaaaaaaaaaaaaaaaaaaaaaaaaaaaaaaaaaaaaaaaaaaaacctaataaaaagacagcagctagggacgtagggcagccacaagccagttaggtagctgatagtgagtagggacaggactttttatttcataacgcgtcaattaccacccgaattggaccaatttaccggatttgtccaaggtggacgggccacctttacttaacccggaaaaggaacatatattatttatatgtgttcgaaaaa

SEQ ID NO: 1355 - DNA, 221 bp, synthetic construct
  source 1..221: mol_type = other DNA
aagagtatagttacaacctgggcatagccgcagagatcgcacctcctcgtggtcccgctggtaaccctgccaagggtgacaaagtcgatctctgccccaggacggagccgttgggactcgccaccccaacgaactccagccaaaactcggtgaaaccaatttctcggcaaaagccgcacggctcattgcctgaaacctggccccccggtttcataggggca

SEQ ID NO: 1356 - DNA, 249 bp, synthetic construct
  source 1..249: mol_type = other DNA
ccaaaggcggctttggtaagtacggttgcaggctgggcacagttaaacatctctagcccaggacagagacgttagagttcaccagcctaacgatctcttgctaaattcggtgaaacaaattcctggtttaagccctctggcttaatacccaaaacccggccccagggtatcaaagagggcaaaagtctggtggattggcaaggggggccactaccagtcccacaacacccccctactttgcaaataaca

SEQ ID NO: 1357 - DNA, 261 bp, synthetic construct
  source 1..261: mol_type = other DNA
ccaaaacctgttttggtaggggtagggatacatactgggcacaactgtaattctctagcccaggaccgagaagttgggactcaccaacccaactttctcttgaaatttcggtgaaacaaatttaaggtataggtcatttgacttaatacccaaaacctggcccctgggtttttagagggcaaagtttggtagtttggcagggagggccgctactactcctgcttcaccctcccaccttgctaagactaatattttccggac

SEQ ID NO: 1358 - DNA, 187 bp, synthetic construct
  source 1..187: mol_type = other DNA
ggcggcttttgagagtatagttgcaaactgggcttcgttgcagagatcgcacctcctcgtggtcccgctggtagccctgcgtagggtgaccaagtcgatctctgccccaggtacggaaccgttggggctcaccagtccaacggattcctaccaaattcggtgaaacaaattcctcggtaaaagccgc

SEQ ID NO: 1359 - DNA, 130 bp, synthetic construct; identical to SEQ ID NO: 215
  source 1..130: mol_type = other DNA

SEQ ID NO: 1360 - DNA, 331 bp, synthetic construct
  source 1..331: mol_type = other DNA
ggcagcttgagagtgtctgttactaactgggctttgctgcggaagtcacacctcctcgtggtcccgccggacaccctaaagggtgactaagttgacttccgccccagtgtgagtgagggagttcattctccctccctatcgtttggactcgccacccagcgatagtttcacgaattgctgaaacaaatttgtggcacagttccgttctgttgcccagagcctggtccacgggcttaagttggacgctgttggcagcgtggggtgagggccccgctgttgacattgacaaccctcacttggacgtgacctattttgttctcctgaattgacc

SEQ ID NO: 1361 - DNA, 332 bp, synthetic construct
  source 1..332: mol_type = other DNA
ggaagcttgagatggtcggttactaactgggcttagctgcggaagtcacacctcctagtggtcccgctggacacccgtaaagggtgactgagttgacttctgccccagtgtgagtgggggagattattctccctccctatcgtctggactcgccacccagcgatagtttcacgacttgctgaaacaaataatttggcacagttttttactgttgcccagagcctggtccacgggcttaagttggacgctgttggcagcgtggggtgagggccccgctgttgacattgacaaccctcacttggacgtgacgtatttaattttccggattgacc

SEQ ID NO: 1362 - DNA, 332 bp, synthetic construct
  source 1..332: mol_type = other DNA
ggcagcttgagatggtctgttactaactgggcttagctgcggaagtcacacctcctcgtggtcccgccggacgcccgtaaagggtgactgagttgacttctgccccagtgtgagtgagggaggttattctccctccctatcgtctggtctcgccacccagcggtagtttcacgatcttgctggaacaaatacttggcacagtttcttactgtcgcccagagcctggtccacgggcctaagttggacgcagttggcagcgtgggggagggccccgctgctgactttgacaaccctcacttggacgtgacgcaatttacattccggatccgacc

SEQ ID NO: 1363 - DNA, 192 bp, synthetic construct
  source 1..192: mol_type = other DNA
gtctagttacaactgggcatagctgcagagatctcacctcctcgtggtcccgctggtaagcccttaacagggtgactaagtagatctctgccccagtcaaggagccgctgggaatcaccagcccagcgattcctttcaaatttaggtgaaacaaatttctcggtgtgggtcgcaagacttactacctaaaac

SEQ ID NO: 1364 - DNA, 247 bp, synthetic construct; identical to SEQ ID NO: 217
  source 1..247: mol_type = other DNA

SEQ ID NO: 1365 - DNA, 205 bp, synthetic construct
  source 1..205: mol_type = other DNA
ggcgacttaagaaggtctcgttacaactgggcatagctgcagagatcgcgcctcctcgtggccccgctggtaagcccttaacagggtgactaagtcgatctctgccccagtccaggagccgctgggactcaccagcccagcgattccttccaaattcggtgaaacaaatttctcggtgtaagtcgcaagacttattacctgaaac

SEQ ID NO: 1366 - DNA, 503 bp, synthetic construct
  source 1..503: mol_type = other DNA
tgccggattggcgggaacagccgatcctagtaaggctggatgaattcatgcgggctgaagcagcggttctcccataaaataggggctttggggaaggtgggggacgtcgggggggcccctggagggacccctgtaccgataggggatccttgttttttcccctctacctggggcttttgtggggaggcgagggcacgtggtgagtgggggatggctgactggggaaagttaccaaggtatccccaaaacctgttttggtaggggtagggatacatactgggcacaactgtaattctctagcccaggaccgagaagttgggactcaccaacccaactttctcttgaaatttcggtgaaacaaatttaaggtataggtcatttgacttaatacccaaaacctggcccctgggtttttagagggcaaagtttggtagtttggcagggagggccgctactactcctgcttcaccctcccaccttgctaagactaatattttccggac

SEQ ID NO: 1367 - protein, 1364 aa, synthetic construct; identical to SEQ ID NO: 412

SEQ ID NO: 1368 - protein, 1390 aa, synthetic construct
MASCPKPGPPVSAGAMSLESGLTTHSVLAIERGPNSLANSGSDFGGGGLGLPLRLLRVSVGTQTSRSDWVDLVSWSHPGPTSKSQQVDLVSLFPKHRVDLLSKNDQVDLVAQFLPSKFPPNLAENDLALLVNLEFYRSDLHVYECVHFAAHWEGLSGLPEVYEQLAPQPCVGETLHSSLPRDSELFVPEEGSSEKESEDAPKTSPPTPGKHGLEQTGEEKVMVTVPDKNPPCPCCGTRVNSVLNLIEHLKVSHGKRGVCFRCAKCGKENSNYHSVVCHFKKCRGPETEKAPAGEWICEVCNRDFTTKIGLGQHKRLAHPAVRNQERIVASQPKETSNRGAHKRCWTKEEEELLIRLEAQFEGNKNINKLIAEHITTKTAKQISDKRRLLSRKPAEEPREEPGTCHHTRRAAASLRTEPEMSHHAQAEDRDNGPGRRPLPGRAAAGGRTMDEIRRHPDKGNGQQRPTKQKSEEQLQAYYKKTLEERLSAGALNTFPRAFKQVMEGRDIKLVINQTAQDCFGCLESISQIRTATRDKKDTVTREKHPKKPFQKWMKKRAIKKGNYLRFQRLFYLDRGKLAKIILDDIECLSCDIPLSEIYSVFKTRWETTGSFKSLGDFKTYGKADNTAFRELITAKEIEKNVQEMSKGSAPGPDGITLGDVVKMDPEFSRTMEIFNLWLTTGKIPDMVRGCRTVLIPKSSKPDRLKDINNWRPITIGSILLRLFSRIVTARLSKACPLNRRQRGFIRAAGCSENLKLLQTIIWSAKREHRPLGVVFVDIAKAFDTVSHQHIIHALQQREVDPHIVGLVSNMYENISTYITTKRNTHTDKIQIRVGVKQGDPMSPLLFNLAMDPLLCKLEESGKGYHRGQSSITAMAFADDLVLLSDSWENMNTNISILETFCNLTGLKTQGQKCHGFYIKPTKDSYTINDCAAWTINGTPLNMIDPGESEKYLGLQFDPWIGIARSGLSTKLDFWLQRIDQAPLKPLQKTDILKTYTIPRLIYIADHSEVKSALLETLDQKIRTAVKEWLHLPPCTCDAILYSSTRDGGLGITKLAGLIPSVQARRLHRIAQSSDDTMKCFMEKEKMEQLHKKLWIQAGGDRENIPSIWEAPPSSEPPNNVSTNSEWEAPTQKDKFPKPCNWRKNEFKKWTKLASQGRGIVNFERDKISNHWIQYYRRIPHRKLLTALQLRANVYPTREFLARGRQDQYIKACRHCDADNESCAHIIGNCPVTQDARIKRHNYICELLLEEAKKKDWVVFKEPHIRDSNKELYKPDLIFVKDARALVVDVTVRYEAAKSSLEEAAAEKVRKYKHLETEVRHLTNAKDVTFVGFPLGARGKWHQDNFKLLTELGLSKSRQVKMAETFSTVALFSSVDIVHMFASRARKSMVM

SEQ ID NO: 1369 - protein, 1390 aa, synthetic construct
MASCPKPGPPVSAGAMSLESGLTTHSVLAIERGPNSLANSGSDFGGGGLGLPLRLLRVSVGTQTSRSDWVDLVSWSHPGPTSKSQQVDLVSLFPKHRVDLLSKNDQVDLVAQFLPSKFPPNLAENDLALLVNLEFYRSDLHVYECVHFAAHWEGLSGLPEVYEQLAPQPCVGETLHSSLPRDSELFVPEEGSSEKESEDAPKTSPPTPGKHGLEQTGEEKVMVTVPDKNPPCPCCGTRVNSVLNLIEHLKVSHGKRGVCFRCAKCGKENSNYHSVVCHFKKCRGPETEKAPAGEWICEVCNRDFTTKIGLGQHKRLAHPAVRNQERIVASQPKETSNRGAHKRCWTKEEEELLIRLEAQFEGNKNINKLIAEHITTKTAKQISDKRRLLSRKPAEEPREEPGTCHHTRRAAASLRTEPEMSHHAQAEDRDNGPGRRPLPGRAAAGGRTMDEIRRHPDKGNGQQRPTKQKSEEQLQAYYKKTLEERLSAGALNTFPRAFKQVMEGRDIKLVINQTAQDCFGCLESISQIRTATRDKKDTVTREKHPKKPFQKWMKKRAIKKGNYLRFQRLFYLDRGKLAKIILDDIECLSCDIPLSEIYSVFKTRWETTGSFKSLGDFKTYGKADNTAFRELITAKEIEKNVQEMSKGSAPGPDGITLGDVVKMDPEFSRTMEIFNLWLTTGKIPDMVRGCRTVLIPKSSKPDRLKDINNWRPITIGSILLRLFSRIVTARLSKACPLNPRQRGFIRAAGCSENLKLLQTIIWSAKREHRPLGVVFVDIAKAFDTVSHQHIIHALQQREVDPHIVGLVSNMYENISTYITTKRNTHTDKIQIRVGVKQGDPMSPLLFNLAMDPLLCKLEESGKGYHRGQSSITAMAFADDLVLLSDSWENMNTNISILETFCNLTGLKTQGQKCHGFYIKPTKKSYTINDCAAWTINGTPLNMIDPGESEKYLGLQFDPWIGIARSGLSTKLDFWLQRIDQAPLKPLQKTDILKTYTIPRLIYIADHSEVKTALLETLDQKIRTAVKEWLHLPPCTCDAILYSSTRDGGLGITKLAGLIPSVQARRLHRIAQSSDDTMKCFMEKEKMEQLHKKLWIQAGGDRENIPSIWEAPPSSEPPNNVSTNSEWEAPTQKDKFPKPCNWRKNEFKKWTKLASQGRGIVNFERDKISNHWIQYYRRIPHRKLLTALQLRANVYPTREFLARGRQDQYIKACRHCDADIESCAHIIGNCPVTQDARIKRHNYICELLLEEAKKKDWVVFKEPHIRDSNKELYKPDLIFVKDARALVVDVTVRYEAAKSSLEEAAAEKVRKYKHLETEVRHLTNAKDVTFVGFPLGARGKWHQDNFKLLTELGLSKSRQVKMAETFSTVALFSSVDIVHMFASRARKSMVM

SEQ ID NO: 1370 - protein, 1390 aa, synthetic construct
MASCPKPGPPVSAGAMSLESGLTTHSVLAIERGPNSLANSGSDFGGGGLGLPLRLLRVSVGTQTSRSDWVDLVSWSHPGPTSKSQQVDLVSLFPKHRVDLLSKNDQVDLVAQFLPSKFPPNLAENDLALLVNLEFYRSDLHVYECVHFAAHWEGLSGLPEVYEQLAPQPCVGETLHSSLPRDSELFVPEEGSSEKESEDAPKTSPPTPGKHGLEQTGEEKVMVTVPDKNPPCPCCGTRVNSVLNLIEHLKVSHGKRGVCFRCAKCGKENSNYHSVVCHFKKCRGPETEKAPAGEWICEVCNRDFTTKIGLGQHKRLAHPAVRNQERIVASQPKETSNRGAHKRCWTKEEEELLIRLEAQFEGNKNINKLIAEHITTKTAKQISDKRRLLSRKPAEEPREEPGTCHHTRRAAASLRTEPEMSHHAQAEDRDNGPGRRPLPGRAAAGGRTMDEIRRHPDKGNGQQRPTKQKSEEQLQAYYKKTLEERLSAGALNTFPRAFKQVMEGRDIKLVINQTAQDCFGCLESISQIRTATRDKKDTVTREKHPKKPFQKWMKDRAIKKGNYLRFQRLFYLDRGKLAKIILDDIECLSCDIPLSEIYSVFKTRWETTGSFKSLGDFKTYGKADNTAFRELITAKEIEKNVQEMSKGSAPGPDGITLGDVVKMDPEFSRTMEIFNLWLTTGKIPDMVRGCRTVLIPKSSDPDRLKDINNWRPITIGSILLRLFSRIVTARLSKACPLNPRQRGFIRAAGCSENLKLLQTIIWSAKREHRPLGVVFVDIAKAFDTVSHQHIIHALQQREVDPHIVGLVSNMYENISTYITTKRNTHTDKIQIRVGVKQGDPMSPLLFNLAMDPLLCKLEESGKGYHRGQSSITAMAFADDLVLLSDSWENMNTNISILETFCNLTGLKTQGQKCHGFYIKPTKDSYTINDCAAWTINGTPLNMIDPGESEKYLGLQFDPWIGIARSGLSTKLDFWLQRIDQAPLKPLQKTDILKTYTIPRLIYIADHSEVKTALLETLDQKIRTAVKEWLHLPPCTCDAILYSSTRDGGLGITKLAGLIPSVQARRLHRIAQSSDDTMKCFMEKEKMEQLHKKLWIQAGGDRENIPSIWEAPPSSEPPNNVSTNSEWEAPTQKDKFPKPCNWRKNEFKKWTKLASQGRGIVNFERDKISNHWIQYYRRIPHRKLLTALQLRANVYPTREFLARGRQDQYIKACRHCDADIESCAHIIGNCPVTQDARIKRHNYICELLLEEAKKKDWVVFKEPHIRDSNKELYKPDLIFVKDARALVVDVTVRYEAAKSSLEEAAAEKVRKYKHLETEVRHLTNAKDVTFVGFPLGARGKWHQDNFKLLTELGLSKSRQVKMAETFSTVALFSSVDIVHMFASRARKSMVM

SEQ ID NO: 1371 - protein, 1390 aa, synthetic construct
MASCPKPGPPVSAGAMSLESGLTTHSVLAIERGPNSLANSGSDFGGGGLGLPLRLLRVSVGTQTSRSDWVDLVSWSHPGPTSKSQQVDLVSLFPKHRVDLLSKNDQVDLVAQFLPSKFPPNLAENDLALLVNLEFYRSDLHVYECVHFAAHWEGLSGLPEVYEQLAPQPCVGETLHSSLPRDSELFVPEEGSSEKESEDAPKTSPPTPGKHGLEQTGEEKVMVTVPDKNPPCPCCGTRVNSVLNLIEHLKVSHGKRGVCFRCAKCGKENSNYHSVVCHFKKCRGPETEKAPAGEWICEVCNRDFTTKIGLGQHKRLAHPAVRNQERIVASQPKETSNRGAHKRCWTKEEEELLIRLEAQFEGNKNINKLIAEHITTKTAKQISDKRRLLSRKPAEEPREEPGTCHHTRRAAASLRTEPEMSHHAQAEDRDNGPGRRPLPGRAAAGGRTMDEIRRHPDKGNGQQRPTKQKSEEQLQAYYKKTLEERLSAGALNTFPRAFKQVMEGRDIKLVINQTAQDYFGCLESISQIRTATRDKKDTVTREKHPKKPFQKWMKKRAIKKGNYLRFQRLFYLDRGKLAKIILDDIECLSCDIPLSEIYSVFKTRWETTGSFKSLGDFKTYGKADNTAFRELITAKEIEKNVQEMSKGSAPGPDGITLGDVVKMDPEFSRTMEIFNLWLTTGKIPDMVRGCRTVLIPKSSDPDRLKDINNWRPITIGSILLRLFSRIVTARLSKACPLNPRQRGFIRAAGCSENLKLLQTIIWSAKREHRPLGVVFVDIAKAFDTVSHQHIIHALQQREVDPHIVGLVSNMYENISTYITTKRNTHTDKIQIRVGVKQGDPMSPLLFNLAMDPLLCKLEESGKGYHRGQSSITAMAFADDLVLLSDSWENMNTNISILETFCNLTGLKTQGQKCHGFYIKPTKDSYTINDCAAWTINGTPLNMIDPGESEKYLGLQFDPWIGIARSGLSTKLDFWLQRIDQAPLKPLQKTDILKTYTIPRLIYIADHSEVKTALLETLDQKIRTAVKEWLHLPPCTCDAILYSSTRDGGLGITKLAGLIPSVQARRLHRIAQSSDDTMKCFMEKEKMEQLHKKLWIQAGGDRENIPSIWEAPPSSEPPNNVSTNSEWEAPTQKDKFPKPCNWRKNEFKKWTKLASQGRGIVNFERDKISNHWIQYYRRIPHRKLLTALQLRANVYPTREFLARGRQDQYIKACRHCDADIESCAHIIGNCPVTQDARIKRHNYICELLLEEAKKKDWVVFKEPHIRDSNKELYKPDLIFVKDARALVVDVTVRYEAAKSSLEEAAAEKVRKYKHLETEVRHLTNAKDVTFVGFPLGARGKWHQDNFKLLTELGLSKSRQVKMAETFSTVALFSSVDIVHMFASRARKSMVM

SEQ ID NO: 1372 - protein, 1390 aa, synthetic construct
MASCPKPGPPVSAGAMSLESGLTTHSVLAIERGPNSLANSGSDFGGGGLGLPLRLLRVSVGTQTSRSDWVDLVSWSHPGPTSKSQQVDLVSLFPKHRVDLLSKNDQVDLVAQFLPSKFPPNLAENDLALLVNLEFYRSDLHVYECVHFAAHWEGLSGLPEVYEQLAPQPCVGETLHSSLPRDSELFVPEEGSSEKESEDAPKTSPPTPGKHGLEQTGEEKVMVTVPDKNPPCPCCGTRVNSVLNLIEHLKVSHGKRGVCFRCAKCGKENSNYHSVVCHFKKCRGPETEKAPAGEWICEVCNRDFTTKIGLGQHKRLAHPAVRNQERIVASQPKETSNRGAHKRCWTKEEEELLIRLEAQFEGNKNINKLIAEHITTKTAKQISDKRRLLSRKPAEEPREEPGTCHHTRRAAASLRTEPEMSHHAQAEDRDNGPGRRPLPGRAAAGGRTMDEIRRHPDKGNGQQRPTKQKSEEQLQAYYKKTLEERLSAGALNTFPRAFKQVMEGRDIKLVINQTAQDCFGCLESISQIRTATRDKKDTVTREKHPKKPFQKWMKDRAIKKGNYLRFQRLFYLDRGKLAKIILDDIECLSCDIPLSEIYSVFKTRWETTGSFKSLGDFKTYGKADNTAFRELITAKEIEKNVQEMSKGSAPGPDGITLGDVVKMDPEFSRTMEIFNLWLTTGKIPDMVRGCRTVLIPKSSKPDRLKDINNWRPITIGSILLRLFSRIVTARLSKACPLNPRQRGFIRAAGCSENLKLLQTIIWSAKREHRPLGVVFVDIAKAFDTVSHQHIIHALQQREVDPHIVGLVSNMYENISTYITTKRNTHTDKIQIRVGVKQGDPMSPLLFNLAMDPLLCKLEESGKGYHRGQSSITAMAFADDLVLLSDSWENMNTNISILETFCNLTGLKTQGQKCHGFYIKPTKDSYTINDCAAWTINGTPLNMIDPGESEKYLGLQFDPWIGIARSGLSTKLDFWLQRIDQAPLKPLQKTDILKTYTIPRLIYIADHSEVKTALLETLDQKIRTAVKEWLHLPPCTCDAILYSSTRDGGLGITKLAGLIPSVQARRLHRIAQSSDDTMKCFMEKEKMEQLHKKLWIQAGGDRENIPSIWEAPPSSEPPNNVSTNSEWEAPTQKDKFPKPCNWRKNEFKKWTKLASQGRGIVNFERDKISNHWIQYYRRIPHRKLLTALQLRANVYPTREFLARGRQDQYIKACRHCDADIESCAHIIGNCPVTQDARIKRHNKICELLLEEAKKKDWVVFKEPHIRDSNKELYKPDLIFVKDARALVVDVTVRYEAAKSSLEEAAAEKVRKYKHLETEVRHLTNAKDVTFVGFPLGARGKWHQDNFKLLTELGLSKSRQVKMAETFSTVALFSSVDIVHMFASRARKSMVM

SEQ ID NO: 1373 - protein, 1390 aa, synthetic construct; identical to SEQ ID NO: 231

SEQ ID NO: 1374 - protein, 1390 aa, synthetic construct; identical to SEQ ID NO: 1

SEQ ID NO: 1375 - protein, 1390 aa, synthetic construct
MASCPKPGPPVSAGAMSLESGLTTHSVLAIERGPNSLANSGSDFGGGGLGLPLRLLRVSVGTQTSRSDWVDLVSWSHPGPTSKSQQVDLVSLFPKHRVDLLSKNDQVDLVAQFLPSKFPPNLAENDLALLVNLEFYRSDLHVYECVHFAAHWEGLSGLPEVYEQLAPQPCVGETLHSSLPRDSELFVPEEGSSEKESEDAPKTSPPTPGKHGLEQTGEEKVMVTVPDKNPPCPCCGTRVNSVLNLIEHLKVSHGKRGVCFRCAKCGKENSNYHSVVCHFPKCRGPETEKAPAGEWICEVCNRDFTTKIGLGQHKRLAHPAVRNQERIVASQPKETSNRGAHKRCWTKEEEELLIRLEAQFEGNKNINKLIAEHITTKTAKQISDKRRLLSRKPAEEPREEPGTCHHTRRAAASLRTEPEMSHHAQAEDRDNGPGRRPLPGRAAAGGRTMDEIRRHPDKGNGQQRPTKQKSEEQLQAYYKKTLEERLSAGALNTFPRAFKQVMEGRDIKLVINQTAQDCFGCLESISQIRTATRDKKDTVTREKHPKKPFQKWMKKRAIKKGNYLRFQRLFYLDRGKLAKIILDDIECLSCDIPLSEIYSVFKTRWETTGSFKSLGDFKTYGKADNTAFRELITAKEIEKNVQEMSKGSAPGPDGITLGDVVKMDPEFSRTMEIFNLWLTTGKIPDMVRGCRTVLIPKSSKPDRLKDINNWRPITIGSILLRLFSRIVTARLSKACPLNPRQRGFIRAAGCSENLKLLQTIIWSAKREHRPLGVVFVDIAKAFDTVSHQHIIHALQQREVDPHIVGLVSNMYENISTYITTKRNTHTDKIQIRVGVKQGDPMSPLLFNLAMDPLLCKLEESGKGYHRGQSSITAMAFADDLVLLSDSWENMNTNISILETFCNLTGLKTQGQKCHGFYIKPTKDSYTINDCAAWTINGTPLNMIDPGESEKYLGLQFDPWIGIARSGLSTKLDFWLQRIDQAPLKPLQKTDILKTYTIPRLIYIADHSEVKTALLETLDQKIRTAVKEWLHLPPCTCDAILYSSTRDGGLGITKLAGLIPSVQARRLHRIAQSSDDTMKCFMEKEKMEQLHKKLWIQAGGDRENIPSIWEAPPSSEPPNNVSTNSEWEAPTQKDKFPKPCNWRKNEFKKWTKLASQGRGIVNFERDKISNHWIQYYRRIPHRKLLTALQLRANVYPTREFLARGRQDQYIKACRHCDADIESCAHIIGNCPVTQDARIKRHNYICELLLEEAKKKDWVVFKEPHIRDSNKELYKPDLIFVKDARALVVDVTVRYEAAKSSLEEAAAEKVRKYKHLETEVRHLTNAKDVTFVGFPLGARGKWHQDNFKLLTELGLSKSRQVKMAETFSTVALFSSVDIVHMFASRARKSMVM

SEQ ID NO: 1376 - protein, 1397 aa, synthetic construct
MAPKKKRKVSCPKPGPPVSAGAMSLESGLTTHSVLAIERGPNSLANSGSDFGGGGLGLPLRLLRVSVGTQTSRSDWVDLVSWSHPGPTSKSQQVDLVSLFPKHRVDLLSKNDQVDLVAQFLPSKFPPNLAENDLALLVNLEFYRSDLHVYECVHKAAHWEGLSGLPEVYEQLAPQPCVGETLHSSLPRDSELFVPEEGSSEKESEDAPKTSPPTPGKHGLEQTGEEKVMVTVPDKNPPCPCCGTRVNSVLNLIEHLKVSHGKRGVCFRCAKCGKENSNYHSVVCHFKKCRGPETEKAPAGEWICEVCNRDFTTKIGLGQHKRLAHPAVRNQERIVASQPKETSNRGAHKRCWTKEEEELLIRLEAQFEGNKNINKLIAEHITTKTAKQISDKRRLLSRKPAEEPREEPGTCHHTRRAAASLRTEPEMSHHAQAEDRDNGPGRRPLPGRAAAGGRTMDEIRRHPDKGNGQQRPTKQKSEEQLQAYYKKTLEERLSAGALNTFPRAFKQVMEGRDIKLVINQTAQDCFGCLESISQIRTATRDKKDTVTREKHPKKPFQKWMKKRAIKKGNYLRFQRLFYLDRGKLAKIILDDIECLSCDIPLSEIYSVFKTRWETTGSFKSLGDFKTYGKADNTAFRELITAKEIEKNVQEMSKGSAPGPDGITLGDVVKMDPEFSRTMEIFNLWLTTGKIPDMVRGCRTVLIPKSSKPDRLKDINNWRPITIGSILLRLFSRIVTARLSKACPLNPRQRGFIRAAGCSENLKLLQTIIWSAKREHRPLGVVFVDIAKAFDTVSHQHIIHALQQREVDPHIVGLVSNMYENISTYITTKRNTHTDKIQIRVGVKQGDPMSPLLFNLAMDPLLCKLEESGKGYHRGQSSITAMAFADDLVLLSDSWENMNTNISILETFCNLTGLKTQGQKCHGFYIKPTKDSYTINDCAAWTINGTPLNMIDPGESEKYLGLQFDPWIGIARSGLSTKLDFWLQRIDQAPLKPLQKTDILKTYTIPRLIYIADHSEVKSALLETLDQKIRTAVKEWLHLPPCTCDAILYSSTRDGGLGITKLAGLIPSVQARRLHRIAQSSDDTMKCFMEKEKMEQLHKKLWIQAGGDRENIPSIWEAPPSSEPPNNVSTNSEWEAPTQKDKFPKPCNWRKNEFKKWTKLASQGRGIVNFERDKISNHWIQYYRRIPHRKLLTALQLRANVYPTREFLARGRQDQYIKACRHCDADNESCAHIIGNCPVTQDARIKRHNYICELLLEEAKKKDWVVFKEPHIRDSNKELYKPDLIFVKDGRALVVDVTVRYEAAKSSLEEAAAEKVRKYKHLETEVRHLTNAKDVTFVGFPLGARGKWHQDNFKLLTELGLSKSRQVKMAETFSTVALFSSVDIVHMFASRARKSMVM

SEQ ID NO: 1377 - protein, 1390 aa, synthetic construct; identical to SEQ ID NO: 234

SEQ ID NO: 1378 - protein, 1390 aa, synthetic construct
MASCPKPGPPVSAGAMSLESGLTTHSVLAIERGPNSLANSGSDFGGGGLGLPLRLLRVSVGTQTSRSDWVDLVSWSHPGPTSKSQQVDLVSLFPKHRVDLLSKNDQVDLVAQFLPSKFPPNLAENDLALLVNLEFYRSDLHVYECVHKAAHWEGLSGLPEVYEQLAPQPCVGETLHSSLPRDSELFVPEEGSSEKESEDAPKTSPPTPGKHGLEQTGEEKVMVTVPDKNPPCPCCGTRVNSVLNLIEHLKVSHGKRGVCFRCAKCGKENSNYHSVVCHFKKCRGPETEKAPAGEWICEVCNRDFTTKIGLGQHKRLAHPAVRNQERIVASQPKETSNRGAHKRCWTKEEEELLIRLEAQFEGNKNINKLIAEHITTKTAKQISDKRRLLSRKPAEEPREEPGTCHHTRRAAASLRTEPEMSHHAQAEDRDNGPGRRPLPGRAAAGGRTMDEIRRHPDKGNGQQRPTKQKSEEQLQAYYKKTLEERLSAGALNTFPRAFKQVMEGRDIKLVINQTAQDCFGCLESISQIRTATRDKKDTVTREKHPKKPFQKWMKKRAIKKGNYLRFQRLFYLDRGKLAKIILDDIECLSCDIPLSEIYSVFKTRWETTGSFKSLGDFKTYGKADNTAFRELITAKEIEKNVQEMSKGSAPGPDGITLGDVVKMDPEFSRTMEIFNLWLTTGKIPDMVRGCRTVLIPKSSKPDRLKDINNWRPITIGSILLRLFSRIVTARLSKACPLNPRQRGFIRAAGCSENLKLLQTIIWSAKREHRPLGVVFVDIAKAFDTVSHQHIIHALQQREVDPHIVGLVSNMYENISTYITTKRNTHTDKIQIRVGVKQGDPMSPLLFNLAMDPLLCKLEESGKGYHRGQSSITAMAFADDLVLLSDSWENMNTNISILETFCNLTGLKTQGQKCHGFYIKPTKDSYTINDCAAWTINGTPLNMIDPGESEKYLGLQFDPWIGIARSGLSTKLDFWLQRIDQAPLKPLQKTDILKTYTIPRLIYIADHSEVKSALLETLDQKIRTAVKEWLHLPPCTCDAILYSSTRDGGLGITKLAGLIPSVQARRLHRIAQSSDDTMKCFMEKEKMEQLHKKLWIQAGGDRENIPSIWEAPPSSEPPNNVSTNSEWEAPTQKDKFPKPCNWRKNEFKKWTKLASQGRGIVNFERDKISNHWIQYYRRIPHRKLLTALQLRANVYPTREFLARGRQDQYIKACRHCDADNESCAHIIGNCPVTQDARIKRHNYICELLLEEAKKKDWVVFKEPHIRDSNKELYKPDLIFVKDGRALVVDVTVRYEAAKSSLEEAAAEKVRKYKHLETEVRHLTNAKDVTFVGFPLGARGKWHQDNFKLLTELGLSKSRQVKMAETFSTVALFSSVDIVHMFASRARKSMVM

SEQ ID NO: 1379 - protein, 1550 aa, synthetic construct; identical to SEQ ID NO: 258

SEQ ID NO: 1380 - protein, 1390 aa, synthetic construct
MASCPKPGPPVSAGAMSLESGLTTHSVLAIERGPNSLANSGSDFGGGGLGLPLRLLRVSVGTQTSRSDWVDLVSWSHPGPTSKSQQVDLVSLFPKHRVDLLSKNDQVDLVAQFLPSKFPPNLAENDLALLVNLEFYRSDLHVYECVHKAAHWEGLSGLPEVYEQLAPQPCVGETLHSSLPRDSELFVPEEGSSEKESEDAPKTSPPTPGKHGLEQTGEEKVMVTVPDKNPPCPCCGTRVNSVLNLIEHLKVSHGKRGVCFRCAKCGKENSNYHSVVCHFKKCRGPETEKAPAGEWICEVCNRDFTTKIGLGQHKRLAHPAVRNQERIVASQPKETSNRGAHKRCWTKEEEELLIRLEAQFEGNKNINKLIAEHITTKTAKQISDKRRLLSRKPAEEPREEPGTCHHTRRAAASLRTEPEMSHHAQAEDRDNGPGRRPLPGRAAAGGRTMDEIRRHPDKGNGQQRPTKQKSEEQLQAYYKKTLEERLSAGALNTFPRAFKQVMEGRDIKLVINQTAQDCFGCLESISQIRTATRDKKDTVTREKHPKKPFQKWMKKRAIKKGNYLRFQRLFYLDRGKLAKIILDDIECLSCDIPLSEIYSVFKTRWETTGSFKSLGDFKTYGKADNTAFRELITAKEIEKNVQEMSKGSAPGPDGITLGDVVKMDPEFSRTMEIFNLWLTTGKIPDMVRGCRTVLIPKSSKPDRLKDINNWRPITIGSILLRLFSRIVTARLSKACPLNPRQRGFIRAAGCSENLKLLQTIIWSAKREHRPLGVVFVDIAKAFDTVSHQHIIHALQQREVDPHIVGLVSNMYENISTYITTKRNTHTDKIQIRVGVKQGDPMSPLLFNLAMDPLLCKLEESGKGYHRGQSSITAMAFADDLVLLSDSWENMNTNISILETFCNLTGLKTQGQKCHGFYIKPTKDSYTINDCAAWTINGTPLNMIDPGESEKYLGLQFDPWIGIARSGLSTKLDFWLQRIDQAPLKPLQKTDILKTYTIPRLIYIADHSEVKTALLETLDQKIRTAVKEWLHLPPCTCDAILYSSTRDGGLGITKLAGLIPSVQARRLHRIAQSSDDTMKCFMEKEKMEQLHKKLWIQAGGDRENIPSIWEAPPSSEPPNNVSTNSEWEAPTQKDKFPKPCNWRKNEFKKWTKLASQGRGIVNFERDKISNHWIQYYRRIPHRKLLTALQLRANVYPTREFLARGRQDQYIKACRHCDADIESCAHIIGNCPVTQDARIKRHNYICELLLEEAKKKDWVVFKEPHIRDSNKELYKPDLIFVKDARALVVDVTVRYEAAKSSLEEAAAEKVRKYKHLETEVRHLTNAKDVTFVGFPLGARGKWHQDNFKLLTELGLSKSRQVKMAETFSTVALFSSVDIVHMFASRARKSMVM

SEQ ID NO: 1381 - protein, 1390 aa, synthetic construct
MASCPKPGPPVSAGAMSLESGLTTHSVLAIERGPNSLANSGSDFGGGGLGLPLRLLRVSVGTQTSRSDWVDLVSWSHPGPTSKSQQVDLVSLFPKHRVDLLSKNDQVDLVAQFLPSKFPPNLAENDLALLVNLEFYRSDLHVYECVHKAAHWEGLSGLPEVYEQLAPQPCVGETLHSSLPRDSELFVPEEGSSEKESEDAPKTSPPTPGKHGLEQTGEEKVMVTVPDKNPPCPCCGTRVNSVLNLIEHLKVSHGKRGVCFRCAKCGKENSNYHSVVCHFKKCRGPETEKAPAGEWICEVCNRDFTTKIGLGQHKRLAHPAVRNQERIVASQPKETSNRGAHKRCWTKEEEELLIRLEAQFEGNKNINKLIAEHITTKTAKQISDKRRLLSRKPAEEPREEPGTCHHTRRAAASLRTEPEMSHHAQAEDRDNGPGRRPLPGRAAAGGRTMDEIRRHPDKGNGQQRPTKQKSEEQLQAYYKKTLEERLSAGALNTFPRAFKQVMEGRDIKLVINQTAQDCFGCLESISQIRTATRDKKDTVTREKHPKKPFQKWMKKRAIKKGNYLRFQRLFYLDRGKLAKIILDDIECLSCDIPLSEIYSVFKTRWETTGSFKSLGDFKTYGKADNTAFRELITAKEIEKNVQEMSKGSAPGPDGITLGDVVKMDPEGSRTMEIFNLWLTTGKIPDMVRGCRTVLIPKSSDPDRLKDINNWRPITIGSILLRLFSRIVTARLSKACPLNPRQRGFIRAAGCSENLKLLQTIIWSAKREHRPLGVVFVDIAKAFDTVSHQHIIHALQQREVDPHIVGLVSNMYENISTYITTKRNTHTDKIQIRVGVKQGDPMSPLLFNLAMDPLLCKLEESGKGYHRGQSSITAMAFADDLVLLSDSWENMNTNISILETFCNLTGLKTQGQKCHGFYIKPTKDSYTINDCAAWTINGTPLNMIDPGESEKYLGLQFDPWIGIARSGLSTKLDFWLQRIDQAPLKPLQKTDILKTYTIPRLIYIADHSEVKTALLETLDQKIRTAVKEWLHLPPCTCDAILYSSTRDGGLGITKLAGLIPSVQARRLHRIAQSSDDTMKCFMEKEKMEQLHKKLWIQAGGDRENIPSIWEAPPSSEPPNNVSTNSEWEAPTQKDKFPKPCNWRKNEFKKWTKLASQGRGIVNFERDKISNHWIQYYRRIPHRKLLTALQLRANVYPTREFLARGRQDQYIKACRHCDADIESCAHIIGNCPVTQDARIKRHNYICELLLEEAKKKDWVVFKEPHIRDSNKELYKPDLIFVKDARALVVDVTVRYEAAKSSLEEAAAEKVRKYKHLETEVRHLTNAKDVTFVGFPLGARGKWHQDNFKLLTELGLSKSRQVKMAETFSTVALFSSVDIVHMFASRARKSMVM

SEQ ID NO: 1382 - protein, 1390 aa, synthetic construct
MASCPKPGPPVSAGAMSLESGLTTHSVLAIERGPNSLANSGSDFGGGGLGLPLRLLRVSVGTQTSRSDWVDLVSWSHPGPTSKSQQVDLVSLFPKHRVDLLSKNDQVDLVAQFLPSKFPPNLAENDLALLVNLEFYRSDLHVYEGVHFAAHWEGLSGLPEVYEQLAPQPCVGETLHSSLPRDSELFVPEEGSSEKESEDAPKTSPPTPGKHGLEQTGEEKVMVTVPDKNPPCPCCGTRVNSVLNLIEHLKVSHGKRGVCFRCAKCGKENSNYHSVVCHFKKCRGPETEKAPAGEWICEVCNRDFTTKIGLGQHKRLAHPAVRNQERIVASQPKETSNRGAHKRCWTKEEEELLIRLEAQFEGNKNINKLIAEHITTKTAKQISDKRRLLSRKPAEEPREEPGTCHHTRRAAASLRTEPEMSHHAQAEDRDNGPGRRPLPGRAAAGGRTMDEIRRHPDKGNGQQRPTKQKSEEQLQAYYKKTLEERLSAGALNTFPRAFKQVMEGRDIKLVINQTAQDCFGCLESISQIRTATRDKKDTVTREKHPKKPFQKWMKKRAIKKGNYLRFQRLFYLDRGKLAKIILDDIECLSCDIPLSEIYSVFKTRWETTGSFKSLGDFKTYGKADNTAFRELITAKEILKNVQEMSKGSAPGPDGITLGDVVKMDPEGSRTMEIFNLWLTTGKIPDMVRGCRTVLIPKSSKPDRLKDINNWRPITIGSILLRLFSRIVTARLSKACPLNPRQRGFIRAAGCSENLKLLQTIIWSAKREHRPLGVVFVDIAKAFDTVSHQHIIHALQQREVDPHIVGLVSNMYENISTYITTKRNTHTDKIQIRVGVKQGDPMSPLLFNLAMDPLLCKLEESGKGYHRGQSSITAMAFADDLVLLSDSWENMNTNISILETFCNLTGLKTQGQKCHGFYIKPTKDSYTINDCAAWTINGTPLNMIDPGESEKYLGLQFDPWIGIARSGLSTKLDFWLQRIDQAPLKPLQKTDILKTYTIPRLIYIADHSEVKSALLETLDQKIRTAVKEWLHLPPCTCDAILYSSTRDGGLGITKLAGLIPSVQARRLHRIAQSSDDTMKCFMEKEKMEQLHKKLWIQAGGDRENIPSIWEAPPSSEPPNNVSTNSEWEAPTQKDKFPKPCNWRKNEFKKWTKLASQGRGIVNFERDKISNHWIQYYRRIPHRKLLTALQLRANVYPTREFLARGRQDQYIKACRHCDADNESCAHIIGNCPVTQDARIKRHNKICELLLEEAKKKDWVVFKEPHIRDSNKELYKPDLIFVKDARALVVDVTVRYEAAKSSLEEAAAEKVRKYKHLETEVRHLTNAKDVTFVGFPLGARGKWHQDNFKLLTELGLSKSRQVKMAETFSTVALFSSVDIVHMFASRARKSMVM

SEQ ID NO: 1383 - protein, 1390 aa, synthetic construct
MASCPKPGPPVSAGAMSLESGLTTHSVLAIERGPNSLANSGSDFGGGGLGLPLRLLRVSVGTQTSRSDWVDLVSWSHPGPTSKSQQVDLVSLFPKHRVDLLSKNDQVDLVAQFLPSKFPPNLAENDLALLVNLEFYRSDLHVYECVHFAAHWEGLSGLPEVYEQLAPQPCVGETLHSSLPRDSELFVPEEGSSEKESEDAPKTSPPTPGKHGLEQTGEEKVMVTVPDKNPPCPCCGTRVNSVLNLIEHLKVSHGKRGVCFRCAKCGKENSNYHSVVCHFKKCRGPETEKAPAGEWICEVCNRDFTTKIGLGQHKRLAHPAVRNQERIVASQPKETSNRGAHKRCWTKEEEELLIRLEAQFEGNKNINKLIAEHITTKTAKQISDKRRLLSRKPAEEPREEPGTCHHTRRAAASLRTEPEMSHHAQAEDRDNGPGRRPLPGRAAAGGRTMDEIRRHPDKGNGQQRPTKQKSEEQLQAYYKKTLEERLSAGALNTFPRAFKQVMEGRDIKLVINQTAQDYFGCLESISQIRTATRDKKDTVTREKHPKKPFQKWMKKRAIKKGNYLRFQRLFYLDRGKLAKIILDDIECLSCDIPLSEIYSVFKTRWETTGSFKSLGDFKTYGKADNTAFRELITAKEIEKNVQEMSKGSAPGPDGITLGDVVKMDPEFSRTMEIFNLWLTTGKIPDMVRGCRTVLIPKSSDPDRLKDINNWRPITIGSILLRLFSRIVTARLSKACPLNPRQRGFIRAAGCSENLKLLQTIIWSAKREHRPLGVVFVDIAKAFDTVSHQHIIHALQQREVDPHIVGLVSNMYENISTYITTKRNTHTDKIQIRVGVKQGDPMSPLLFNLAMDPLLCKLEESGKGYHRGQSSITAMAFADDLVLLSDSWENMNTNISILETFCNLTGLKTQGQKCHGFYIKPTKKSYTINDCAAWTINGTPLNMIDPGESEKYLGLQFDPWIGIARSGLSTKLDFWLQRIDQAPLKPLQKTDILKTYTIPRLIYIADHSEVKTALLETLDQKIRTAVKEWLHLPPCTCDAILYSSTRDGGLGITKLAGLIPSVQARRLHRIAQSSDDTMKCFMEKEKMEQLHKKLWIQAGGDRENIPSIWEAPPSSEPPNNVSTNSEWEAPTQKDKFPKPCNWRKNEFKKWTKLASQGRGIVNFERDKISNHWIQYYRRIPHRKLLTALQLRANVYPTREFLARGRQDQYIKACRHCDADIESCAHIIGNCPVTQDARIKRHNYICELLLEEAKKKDWVVFKEPHIRDSNKELYKPDLIFVKDARALVVDVTVRYEAAKSSLEEAAAEKVRKYKHLETEVRHLTNAKDVTFVGFPLGARGKWHQDNFKLLTELGLSKSRQVKMAETFSTVALFSSVDIVHMFASRARKSMVM

SEQ ID NO: 1384 - protein, 1390 aa, synthetic construct
MASCPKPGPPVSAGAMSLESGLTTHSVLAIERGPNSLANSGSDFGGGGLGLPLRLLRVSVGTQTSRSDWVDLVSWSHPGPTSKSQQVDLVSLFPKHRVDLLSKNDQVDLVAQFLPSKFPPNLAENDLALLVNLEFYRSDLHVYECVHFAAHWEGLSGLPEVYEQLAPQPCVGETLHSSLPRDSELFVPEEGSSEKESEDAPKTSPPTPGKHGREQTGEEKVMVTVPDKNPPCPCCGTRVNSVLNLIEHLKVSHGKRGVCFRCAKCGKENSNYHSVVCHFKKCRGPETEKAPAGEWICEVCNRDFTTKIGLGQHKRLAHPAVRNQERIVASQPKETSNRGAHKRCWTKEEEELLIRLEAQFEGNKNINKLIAEHITTKTAKQISDKRRLLSRKPAEEPREEPGTCHHTRRAAASLRTEPEMSHHAQAEDRDNGPGRRPLPGRAAAGGRTMDEIRRHPDKGNGQQRPTKQKSEEQLQAYYKKTLEERLSAGALNTFPRAFKQVMEGRDIKLVINQTAQDYFGCLESISQIRTATRDKKDTVTREKHPKKPFQKWMKKRAIKKGNYLRFQRLFYLDRGKLAKIILDDIECLSCDIPLSEIYSVFKTRWETTGSFKSLGDFKTYGKADNTAFRELITAKEIEKNVQEMSKGSAPGPDGITLGDVVKMDPEFSRTMEIFNLWLTTGKIPDMVRGCRTVLIPKSSDPDRLKDINNWRPITIGSILLRLFSRIVTARLSKACPLNPRQRGFIRAAGCSENLKLLQTIIWSAKREHRPLGVVFVDIAKAFDTVSHQHIIHALQQREVDPHIVGLVSNMYENISTYITTKRNTHTDKIQIRVGVKQGDPMSPLLFNLAMDPLLCKLEESGKGYHRGQSSITAMAFADDLVLLSDSWENMNTNISILETFCNLTGLKTQGQKCHGFYIKPTKDSYTINDCAAWTINGTPLNMIDPGESEKYLGLQFDPWIGIARSGLSTKLDFWLQRIDQAPLKPLQKTDILKTYTIPRLIYIADHSEVKTALLETLDQKIRTAVKEWLHLPPCTCDAILYSSTRDGGLGITKLAGLIPSVQARRLHRIAQSSDDTMKCFMEKEKMEQLHKKLWIQAGGDRENIPSIWEAPPSSEPPNNVSTNSEWEAPTQKDKFPKPCNWRKNEFKKWTKLASQGRGIVNFERDKISNHWIQYYRRIPHRKLLTALQLRANVYPTREFLARGRQDQYIKACRHCDADIESCAHIIGNCPVTQDARIKRHNYICELLLEEAKKKDWVVFKEPHIRDSNKELYKPDLIFVKDARALVVDVTVRYEAAKSSLEEAAAEKVRKYKHLETEVRHLTNAKDVTFVGFPLGARGKWHQDNFKLLTELGLSKSRQVKMAETFSTVALFSSVDIVHMFASRARKSMVM

SEQ ID NO: 1385 - protein, 1390 aa, synthetic construct
MASCPKPGPPVSAGAMSLESGLTTHSVLAIERGPNSLANSGSDFGGGGLGLPLRLLRVSVGTQTSRSDWVDLVSWSHPGPTSKSQQVDLVSLFPKHRVDLLSKNDQVDLVAQFLPSKFPPNLAENDLALLVNLEFYRSDLHVYECVHFAAHWEGLSGLPEVYEQLAPQPCVGETLHSSLPRDSELFVPEEGSSEKESEDAPKTSPPTPGKHGLEQTGEEKVMVTVPDKNPPCPCCGTRVNSVLNLIEHLKVSHGKRGVCFRCAKCGKENSNYHSVVCHFKKCRGPETEKAPAGEWICEVCNRDFTTKIGLGQHKRLAHPAVRNQERIVASQPKETSNRGAHKRCWTKEERELLIRLEAQFEGNKNINKLIAEHITTKTAKQISDKRRLLSRKPAEEPREEPGTCHHTRRAAASLRTEPEMSHHAQAEDRDNGPGRRPLPGRAAAGGRTMDEIRRHPDKGNGQQRPTKQKSEEQLQAYYKKTLEERLSAGALNTFPRAFKQVMEGRDIKLVINQTAQDYFGCLESISQIRTATRDKKDTVTREKHPKKPFQKWMKKRAIKKGNYLRFQRLFYLDRGKLAKIILDDIECLSCDIPLSEIYSVFKTRWETTGSFKSLGDFKTYGKADNTAFRELITAKEIEKNVQEMSKGSAPGPDGITLGDVVKMDPEFSRTMEIFNLWLTTGKIPDMVRGCRTVLIPKSSDPDRLKDINNWRPITIGSILLRLFSRIVTARLSKACPLNPRQRGFIRAAGCSENLKLLQTIIWSAKREHRPLGVVFVDIAKAFDTVSHQHIIHALQQREVDPHIVGLVSNMYENISTYITTKRNTHTDKIQIRVGVKQGDPMSPLLFNLAMDPLLCKLEESGKGYHRGQSSITAMAFADDLVLLSDSWENMNTNISILETFCNLTGLKTQGQKCHGFYIKPTKDSYTINDCAAWTINGTPLNMIDPGESEKYLGLQFDPWIGIARSGLSTKLDFWLQRIDQAPLKPLQKTDILKTYTIPRLIYIADHSEVKTALLETLDQKIRTAVKEWLHLPPCTCDAILYSSTRDGGLGITKLAGLIPSVQARRLHRIAQSSDDTMKCFMEKEKMEQLHKKLWIQAGGDRENIPSIWEAPPSSEPPNNVSTNSEWEAPTQKDKFPKPCNWRKNEFKKWTKLASQGRGIVNFERDKISNHWIQYYRRIPHRKLLTALQLRANVYPTREFLARGRQDQYIKACRHCDADIESCAHIIGNCPVTQDARIKRHNYICELLLEEAKKKDWVVFKEPHIRDSNKELYKPDLIFVKDARALVVDVTVRYEAAKSSLEEAAAEKVRKYKHLETEVRHLTNAKDVTFVGFPLGARGKWHQDNFKLLTELGLSKSRQVKMAETFSTVALFSSVDIVHMFASRARKSMVM

SEQ ID NO: 1386 - protein, 1390 aa, synthetic construct
MASCPKPGPPVSAGAMSLESGLTTHSVLAIERGPNSLANSGSDFGGGGLGLPLRLLRVSVGTQTSRSDWVDLVSWSHPGPTSKSQQVDLVSLFPKHRVDLLSKNDQVDLVAQFLPSKFPPNLAENDLALLVNLEFYRSDLHVYEGVHFAAHWEGLSGLPEVYEQLAPQPCVGETLHSSLPRDSELFVPEEGSSEKESEDAPKTSPPTPGKHGLRQTGEEKVMVTVPDKNPPCPCCGTRVNSVLNLIEHLKVSHGKRRVCFRCAKCGKENSNYHSVVCHFPKCRGPETEKAPAGEWICEVCNRDFTTKIGLGQHKRLAHPAVRNQERIVASQPKETSNRGAHKRCWTKEEEELLIRLEAQFEGNKNINKLIAEHITTKTAKQISDKRRLLSRKPAEEPREEPGTCHHTRRAAASLRTEPEMSHHAQAEDRDNGPGRRPLPGRAAAGGRTMDEIRRHPDKGNGQQRPTKQKSEEQLQAYYKKTLEERLSAGALNTFPRAFKQVMEGRDIKLVINQTAQDCFGCLESISQIRTATRDKKDTVTREKHPKKPFQKWMKKRAIKKGNYLRFQRLFYLDRGKLAKIILDDIECLSCDIPLSEIYSVFKTRWETTGSFKSLGDFKTYGKADNTAFRELITAKEIEKNVQEMSKGSAPGPDGITLGDVVKMDPEFSRTMEIFNLWLTTGKIPDMVRGCRTVLIPKSSKPDRLKDINNWRPITIGSILLRLFSRIVTARLSKACPLNPRQRGFIRAAGCSENLKLLQTIIWSAKREHRPLGVVFVDIAKAFDTVSHQHIIHALQQREVDPHIVGLVSNMYENISTYITTKRNTHTDKIQIRVGVKQGDPMSPLLFNLAMDPLLCKLEESGKGYHRGQSSITAMAFADDLVLLSDSWENMNTNISILETFCNLTGLKTQGQKCHGFYIKPTKDSYTINDCAAWTINGTPLNMIDPGESEKYLGLQFDPWIGIARSGLSTKLDFWLQRIDQAPLKPLQKTDILKTYTIPRLIYIADHSEVKTALLETLDQKIRTAVKEWLHLPPCTCDAILYSSTRDGGLGITKLAGLIPSVQARRLHRIAQSSDDTMKCFMEKEKMEQLHKKLWIQAGGDRENIPSIWEAPPSSEPPNNVSTNSEWEAPTQKDKFPKPCNWRKNEFKKWTKLASQGRGIVNFERDKISNHWIQYYRRIPHRKLLTALQLRANVYPTREFLARGRQDQYIKACRHCDADIESCAHIIGNCPVTQDARIKRHNYICELLLEEAKKKDWVVFKEPHIRDSNKELYKPDLIFVKDARALVVDVTVRYEAAKSSLEEAAAEKVRKYKHLETEVRHLTNAKDVTFVGFPLGARGKWHQDNFKLLTELGLSKSRQVKMAETFSTVALFSSVDIVHMFASRARKSMVM

SEQ ID NO: 1387 - protein, 1390 aa, synthetic construct
MASCPKPGPPVSAGAMSLESGLTTHSVLAIERGPNSLANSGSDFGGGGLGLPLRLLRVSVGTQTSRSDWVDLVSWSHPGPTSKSQQVDLVSLFPKHRVDLLSKNDQVDLVAQFLPSKFPPNLAENDLALLVNLEFYRSDLHVYECVHFAAHWEGLSGLPEVYEQLAPQPCVGETLHSSLPRDSELFVPEEGSSEKESEDAPKTSPPTPGKHGLEQTGEEKVMVTVPDKNPPCPCCGTRVNSVLNLIEHLKVSHGKRGVCFRCAKCGKENSNYHSVVCHFKKCRGPETEKAPAGEWICEVCNRDFTTKIGLGQHKRLAHPAVRNQERIVASQPKETSNRGAHKRCWTKEEEELLIRLEAQFEGNKNINKLIAEHITTKTAKQISDKRRLLSRKPAEEPREEPGTCHHTRRAAASLRTEPEMSHHAQAEDRDNGPGRRPLPGRAAAGGRTMDEIRRHPDKGNGQQRPTKQKSEEQLQAYYKKTLEERLSAGALNTFPRAFKQVMEGRDIKLVINQTAQDYFGCLESISQIRTATRDKKDTVTREKHPKKPFQKWMKKRAIKKGNYLRFQRLFYLDRGKLAKIILDDIECLSCDIPLSEIYSVFKTRWETTGSFKSLGDFKTYGKADNTAFRELITAKEIEKNVQEMSKGSAPGPDGITLGDVVKMDPEFSRTMEIFNLWLTTGKIPDMVRGCRTVLIPKSSDPDRLKDINNWRPITIGSILLRLFSRIVTARLSKACPLNPRQRGFIRAAGCSENLKLLQTIIWSAKREHRPLGVVFVDIAKAFDTVSHQHIIHALQQREVDPHIVGLVSNMYENISTYITTKRNTHTDKIQIRVGVKQGDPMSPLLFNLAMDPLLCKLEESGKGYHRGQSSITAMAFADDLVLLSDSWENMNTNISILETFCNLTGLKTQGQKCHGFYIKPTKKSYTINDCAAWTINGTPLNMIDPGESEKYLGLQFDPWIGIARSGLSTKLDFWLQRIDQAPLKPLQKTDILKTYTIPRLIYIADHSEVKTALLETLDQKIRTAVKEWLHLPPCTCDAILYSSTRDGGLGITKLAGLIPSVQARRLHRIAQSSDDTMKCFMEKEKMEQLHKKLWIQAGGDRENIPSIWEAPPSSEPPNNVSTNSEWEAPTQKDKFPKPCNWRKNEFKKWTKLASQGRGIVNFERDKISNHWIQYYRRIPHRKLLTALQLRANVYPTREFLARGRQDQYIKACRHCDADNESCAHIIGNCPVTQDARIKRHNYICELLLEEAKKKDWVVFKEPHIRDSNKELYKPDLIFVKDARALVVDVTVRYEAAKSSLEEAAAEKVRKYKHLETEVRHLTNAKDVTFVGFPLGARGKWHQDNFKLLTELGLSKSRQVKMAETFSTVALFSSVDIVHMFASRARKSMVM

SEQ ID NO: 1388 - protein, 1550 aa, synthetic construct
MAPKKKRKVNISGSSCGSPNSADTSSDFKDLWTKLKECHDREVQGLQVKVTKLKQERILDAQRLEEFFTKNQQLREQQKVLHETIKVLEDRLRAGLCDRCAVTEEHMRKKQQEFENIRQQNLKLITELMNERNTLQEENKKLSEQLQQKIENDQQHQAAELECEEDVIPDSPITAFSFSGVNRLRRKENPHVRYIEQTHTKLEHSVCANEMRKVSKSSTHPQHNPNENEILVADTYDQSQSPMAKAHGTSSYTPDKSSFNLATVVAETLGLGVQEESETQGPMSPLGDELYHCLEGNHKKQPFESGSETPGTSESATPEGSYEQLAPQPCVGETLHSSLPRDSELFVPEEGSSEKESEDAPKTSPPTPGKHGLEQTGEEKVMVTVPDKNPPCPCCGTRVNSVLNLIEHLKVSHGKRGVCFRCAKCGKENSNYHSVVCHFKKCRGPETEKAPAGEWICEVCNRDFTTKIGLGQHKRLAHPAVRNQERIVASQPKETSNRGAHKRCWTKEEEELLIRLEAQFEGNKNINKLIAEHITTKTAKQISDKRRLLSRKPAEEPREEPGTCHHTRRAAASLRTEPEMSHHAQAEDRDNGPGRRPLPGRAAAGGRTMDEIRRHPDKGNGQQRPTKQKSEEQLQAYYKKTLEERLSAGALNTFPRAFKQVMEGRDIKLVINQTAQDCFGCLESISQIRTATRDKKDTVTREKHPKKPFQKWMKKRAIKKGNYLRFQRLFYLDRGKLAKIILDDIECLSCDIPLSEIYSVFKTRWETTGSFKSLGDFKTYGKADNTAFRELITAKEIEKNVQEMSKGSAPGPDGITLGDVVKMDPEFSRTMEIFNLWLTTGKIPDMVRGCRTVLIPKSSKPDRLKDINNWRPITIGSILLRLFSRIVTARLSKACPLNRRQRGFIRAAGCSENLKLLQTIIWSAKREHRPLGVVFVDIAKAFDTVSHQHIIHALQQREVDPHIVGLVSNMYENISTYITTKRNTHTDKIQIRVGVKQGDPMSPLLFNLAMDPLLCKLEESGKGYHRGQSSITAMAFADDLVLLSDSWENMNTNISILETFCNLTGLKTQGQKCHGFYIKPTKDSYTINDCAAWTINGTPLNMIDPGESEKYLGLQFDPWIGIARSGLSTKLDFWLQRIDQAPLKPLQKTDILKTYTIPRLIYIADHSEVKSALLETLDQKIRTAVKEWLHLPPCTCDAILYSSTRDGGLGITKLAGLIPSVQARRLHRIAQSSDDTMKCFMEKEKMEQLHKKLWIQAGGDRENIPSIWEAPPSSEPPNNVSTNSEWEAPTQKDKFPKPCNWRKNEFKKWTKLASQGRGIVNFERDKISNHWIQYYRRIPHRKLLTALQLRANVYPTREFLARGRQDQYIKACRHCDADNESCAHIIGNCPVTQDARIKRHNYICELLLEEAKKKDWVVFKEPHIRDSNKELYKPDLIFVKDGRALVVDVTVRYEAAKSSLEEAAAEKVRKYKHLETEVRHLTNAKDVTFVGFPLGARGKWHQDNFKLLTELGLSKSRQVKMAETFSTVALFSSVDIVHMFASRARKSMVM

SEQ ID NO: 1389 - protein, 1408 aa, synthetic construct
MAKRTADGSEFESPKKKRKVSCPKPGPPVSAGAMSLESGLTTHSVLAIERGPNSLANSGSDFGGGGLGLPLRLLRVSVGTQTSRSDWVDLVSWSHPGPTSKSQQVDLVSLFPKHRVDLLSKNDQVDLVAQFLPSKFPPNLAENDLALLVNLEFYRSDLHVYECVHKAAHWEGLSGLPEVYEQLAPQPCVGETLHSSLPRDSELFVPEEGSSEKESEDAPKTSPPTPGKHGLEQTGEEKVMVTVPDKNPPCPCCGTRVNSVLNLIEHLKVSHGKRGVCFRCAKCGKENSNYHSVVCHFKKCRGPETEKAPAGEWICEVCNRDFTTKIGLGQHKRLAHPAVRNQERIVASQPKETSNRGAHKRCWTKEEEELLIRLEAQFEGNKNINKLIAEHITTKTAKQISDKRRLLSRKPAEEPREEPGTCHHTRRAAASLRTEPEMSHHAQAEDRDNGPGRRPLPGRAAAGGRTMDEIRRHPDKGNGQQRPTKQKSEEQLQAYYKKTLEERLSAGALNTFPRAFKQVMEGRDIKLVINQTAQDCFGCLESISQIRTATRDKKDTVTREKHPKKPFQKWMKKRAIKKGNYLRFQRLFYLDRGKLAKIILDDIECLSCDIPLSEIYSVFKTRWETTGSFKSLGDFKTYGKADNTAFRELITAKEIEKNVQEMSKGSAPGPDGITLGDVVKMDPEFSRTMEIFNLWLTTGKIPDMVRGCRTVLIPKSSKPDRLKDINNWRPITIGSILLRLFSRIVTARLSKACPLNPRQRGFIRAAGCSENLKLLQTIIWSAKREHRPLGVVFVDIAKAFDTVSHQHIIHALQQREVDPHIVGLVSNMYENISTYITTKRNTHTDKIQIRVGVKQGDPMSPLLFNLAMDPLLCKLEESGKGYHRGQSSITAMAFADDLVLLSDSWENMNTNISILETFCNLTGLKTQGQKCHGFYIKPTKDSYTINDCAAWTINGTPLNMIDPGESEKYLGLQFDPWIGIARSGLSTKLDFWLQRIDQAPLKPLQKTDILKTYTIPRLIYIADHSEVKSALLETLDQKIRTAVKEWLHLPPCTCDAILYSSTRDGGLGITKLAGLIPSVQARRLHRIAQSSDDTMKCFMEKEKMEQLHKKLWIQAGGDRENIPSIWEAPPSSEPPNNVSTNSEWEAPTQKDKFPKPCNWRKNEFKKWTKLASQGRGIVNFERDKISNHWIQYYRRIPHRKLLTALQLRANVYPTREFLARGRQDQYIKACRHCDADNESCAHIIGNCPVTQDARIKRHNYICELLLEEAKKKDWVVFKEPHIRDSNKELYKPDLIFVKDGRALVVDVTVRYEAAKSSLEEAAAEKVRKYKHLETEVRHLTNAKDVTFVGFPLGARGKWHQDNFKLLTELGLSKSRQVKMAETFSTVALFSSVDIVHMFASRARKSMVM

SEQ ID NO: 1390 - protein, 1390 aa, synthetic construct
MASCPKPGPPVSAGAMSLESGLTTHSVLAIERGPNSLANSGSDFGGGGLGLPLRLLRVSVGTQTSRSDWVDLVSWSHPGPTSKSQQVDLVSLFPKHRVDLLSKNDQVDLVAQFLPSKFPPNLAENDLALLVNLEFYRSDLHVYECVHFAAHWEGLSGLPEVYEQLAPQPCVGETLHSSLPRDSELFVPEEGSSEKESEDAPKTSPPTPGKHGLEQTGEEKVMVTVPDKNPPCPCCGTRVNSVLNLIEHLKVSHGKRGVCFRCAKCGKENSNYHSVVCHFPKCRGPETEKAPAGEWICEVCNRDFTTKIGLGQHKRLAHPAVRNQERIVASQPKETSNRGAHKRCWTKEEEELLIRLEAQFEGNKNINKLIAEHITTKTAKQISDKRRLLSRKPAEEPREEPGTCHHTRRAAASLRTEPEMSHHAQAEDRDNGPGRRPLPGRAAAGGRTMDEIRRHPDKGNGQQRPTKQKSEEQLQAYYKKTLEERLSAGALNTFPRAFKQVMEGRDIKLVINQTAQDCFGCLESISQIRTATRDKKDTVTREKHPKKPFQKWMKDRAIKKGNYLRFQRLFYLDRGKLAKIILDDIECLSCDIPLSEIYSVFKTRWETTGSFKSLGDFKTYGKADNTAFRELITAKEIEKNVQEMSKGSAPGPDGITLGDVVKMDPEFSRTMEIFNLWLTTGKIPDMVRGCRTVLIPKSSKPDRLKDINNWRPITIGSILLRLFSRIVTARLSKACPLNPRQRGFIRAAGCSENLKLLQTIIWSAKREHRPLGVVFVDIAKAFDTVSHQHIIHALQQREVDPHIVGLVSNMYENISTYITTKRNTHTDKIQIRVGVKQGDPMSPLLFNLAMDPLLCKLEESGKGYHRGQSSITAMAFADDLVLLSDSWENMNTNISILETFCNLTGLKTQGQKCHGFYIKPTKDSYTINDCAAWTINGTPLNMIDPGESEKYLGLQFDPWIGIARSGLSTKLDFWLQRIDQAPLKPLQKTDILKTYTIPRLIYIADHSEVKTALLETLDQKIRTAVKEWLHLPPCTCDAILYSSTRDGGLGITKLAGLIPSVQARRLHRIAQSSDDTMKCFMEKEKMEQLHKKLWIQAGGDRENIPSIWEAPPSSEPPNNVSTNSEWEAPTQKDKFPKPCNWRKNEFKKWTKLASQGRGIVNFERDKISNHWIQYYRRIPHRKLLTALQLRANVYPTREFLARGRQDQYIKACRHCDADIESCAHIIGNCPVTQDARIKRHNYICELLLEEAKKKDWVVFKEPHIRDSNKELYKPDLIFVKDARALVVDVTVRYEAAKSSLEEAAAEAVRKYKHLETEVRHLTNAKDVTFVGFPLGARGKWHQDNFKLLTELGLSKSRQVKMAETFSTVALFSSVDIVHMFASRARKSMVM

SEQ ID NO: 1391 - protein, 1550 aa, synthetic construct
MAPKKKRKVNISGSSCGSPNSADTSSDFKDLWTKLKECHDREVQGLQVKVTKLKQERILDAQRLEEFFTKNQQLREQQKVLHETIKVLEDRLRAGLCDRCAVTEEHMRKKQQEFENIRQQNLKLITELMNERNTLQEENKKLSEQLQQKIENDQQHQAAELECEEDVIPDSPITAFSFSGVNRLRRKENPHVRYIEQTHTKLEHSVCANEMRKVSKSSTHPQHNPNENEILVADTYDQSQSPMAKAHGTSSYTPDKSSFNLATVVAETLGLGVQEESETQGPMSPLGDELYHCLEGNHKKQPFESGSETPGTSESATPEGSYEQLAPQPCVGETLHSSLPRDSELFVPEEGSSEKESEDAPKTSPPTPGKHGLEQTGEEKVMVTVPDKNPPCPCCGTRVNSVLNLIEHLKVSHGKRGVCFRCAKCGKENSNYHSVVCHFKKCRGPETEKAPAGEWICEVCNRDFTTKIGLGQHKRLAHPAVRNQERIVASQPKETSNRGAHKRCWTKEEEELLIRLEAQFEGNKNINKLIAEHITTKTAKQISDKRRLLSRKPAEEPREEPGTCHHTRRAAASLRTEPEMSHHAQAEDRDNGPGRRPLPGRAAAGGRTMDEIRRHPDKGNGQQRPTKQKSEEQLQAYYKKTLEERLSAGALNTFPRAFKQVMEGRDIKLVINQTAQDCFGCLESISQIRTATRDKKDTVTREKHPKKPFQKWMKKRAIKKGNYLRFQRLFYLDRGKLAKIILDDIECLSCDIPLSEIYSVFKTRWETTGSFKSLGDFKTYGKADNTAFRELITAKEIEKNVQEMSKGSAPGPDGITLGDVVKMDPEFSRTMEIFNLWLTTGKIPDMVRGCRTVLIPKSSKPDRLKDINNWRPITIGSILLRLFSRIVTARLSKACPLNPRQRGFIRAAGCSENLKLLQTIIWSAKREHRPLGVVFVDIAKAFDTVSHQHIIHALQQREVDPHIVGLVSNMYENISTYITTKRNTHTDKIQIRVGVKQGDPMSPLLFNLAMDPLLCKLEESGKGYHRGQSSITAMAFADDLVLLSDSWENMNTNISILETFCNLTGLKTQGQKCHGFYIKPTKDSYTINDCAAWTINGTPLNMIDPGESEKYLGLQFDPWIGIARSGLSTKLDFWLQRIDQAPLKPLQKTDILKTYTIPRLIYIADHSEVKSALLETLDQKIRTAVKEWLHLPPCTCDAILYSSTRDGGLGITKLAGLIPSVQARRLHRIAQSSDDTMKCFMEKEKMEQLHKKLWIQAGGDRENIPSIWEAPPSSEPPNNVSTNSEWEAPTQKDKFPKPCNWRKNEFKKWTKLASQGRGIVNFERDKISNHWIQYYRRIPHRKLLTALQLRANVYPTREFLARGRQDQYIKACRHCDADNESCAHIIGNCPVTQDARIKRHNYICELLLEEAKKKDWVVFKEPHIRDSNKELYKPDLIFVKDGRALVVDVTVRYEAAKSSLEEAAAEKVRKYKHLETEVRHLTNAKDVTFVGFPLGARGKWHQDNFKLLTELGLSKSRQVKMAETFSTVALFSSVDIVHMFASRARKSMVM

SEQ ID NO: 1392 - protein, 1390 aa, synthetic construct
MASCPKPGPPVSAGAMSLESGLTTHSVLAIERGPNSLANSGSDFGGGGLGLPLRLLRVSVGTQTSRSDWVDLVSWSHPGPTSKSQQVDLVSLFPKHRVDLLSKNDQVDLVAQFLPSKFPPNLAENDLALLVNLEFYRSDLHVYECVHFAAHWEGLSGLPEVYEQLAPQPCVGETLHSSLPRDSELFVPEEGSSEKESEDAPKTSPPTPGKHGLEQTGEEKVMVTVPDKNPPCPCCGTRVNSVLNLIEHLKVSHGKRGVCFRCAKCGKENSNYHSVVCHFKKCRGPETEKAPAGEWICEVCNRDFTTKIGLGQHKRLAHPAVRNQERIVASQPKETSNRGAHKRCWTKEEEELLIRLEAQFEGNKNINKLIAEHITTKTAKQISDKRRLLSRKPAEEPREEPGTCHHTRRAAASLRTEPEMSHHAQAEDRDNGPGRRPLPGRAAAGGRTMDEIRRHPDKGNGQQRPTKQKSEEQLQAYYKKTLEERLSAGALNTFPRAFKQVMEGRDIKLVINQTAQDCFGCLESISQIRTATRDKKDTVTREKHPKKPFQKWMKKRAIKKGNYLRFQRLFYLDRGKLAKIILDDIECLSCDIPLSEIYSVFKTRWETTGSFKSLGDFKTYGKADNTAFRELITAKEIEKNVQEMSKGSAPGPDGITLGDVVKMDPEFSRTMEIFNLWLTTGKIPDMVRGCRTVLIPKSTQPDRLKDINNWRPITIGSILLRLFSRIITARMTKACPLNPRQRGFIRAAGCSENLKLLQTIIRSAKSEHRPLGVVFVDIAKAFDTVSHQHILHVLQQRGVDPHIIGLVSNMYKDISTFVTTKKDTHTDKIQIRVGVKQGDPLSPLLFNLAMDPLLCKLEESGNGFHRGGHTITAMAFADDLVLLSDSWENMEKNIEILEAFCDLTGLKTQGQKCHGFYIKPTKDSYTVNNCAAWTIYGTPLNMINPGDSEKYLGLQFDPWIGIARSGLSTKLDFWLQRIDQAPLKPLQKTDILKTYTIPRLIYIADHSEVKTALLETLDQKIRTAVKEWLHLPPCTCDAILYSSTRDGGLGITKLAGLIPSVQARRLHRIAQSSDDTMKCFMEKEKMEQLHKKLWIQAGGDRENIPSIWEAPPSSEPPNNVSTNSEWEAPTQKDKFPKPCNWRKNEFKKWTKLASQGRGIVNFERDKISNHWIQYYRRIPHRKLLTALQLRANVYPTREFLARGRQDQYIKACRHCDADIESCAHIIGNCPVTQDARIKRHNYICELLLEEAKKKDWVVFKEPHIRDSNKELYKPDLIFVKDARALVVDVTVRYEAAKSSLEEAAAEKVRKYKHLETEVRHLTNAKDVTFVGFPLGARGKWHQDNFKLLTELGLSKSRQVKMAETFSTVALFSSVDIVHMFASRARKSMVM

SEQ ID NO: 1393 - protein, 1322 aa, synthetic construct
MPKRKVSSAEGAAKEEPKRRSARLSAKPPAKVEAKPKKAAAKDKSSDKKVQTKGKRGAKGKQAEVANQETKEDLPAENGETKTEESPASDEAGEKEAKSDSGSETPGTSESATPESLFVPEEGSSEKESEDAPKTSPPTPGKHGLEQTGEEKVMVTVPDKNPPCPCCGTRVNSVLNLIEHLKVSHGKRGVCFRCAKCGKENSNYHSVVCHFKKCRGPETEKAPAGEWICEVCNRDFTTKIGLGQHKRLAHPAVRNQERIVASQPKETSNRGAHKRCWTKEEEELLIRLEAQFEGNKNINKLIAEHITTKTAKQISDKRRLLSRKPAEEPREEPGTCHHTRRAAASLRTEPEMSHHAQAEDRDNGPGRRPLPGRAAAGGRTMDEIRRHPDKGNGQQRPTKQKSEEQLQAYYKKTLEERLSAGALNTFPRAFKQVMEGRDIKLVINQTAQDCFGCLESISQIRTATRDKKDTVTREKHPKKPFQKWMKKRAIKKGNYLRFQRLFYLDRGKLAKIILDDIECLSCDIPLSEIYSVFKTRWETTGSFKSLGDFKTYGKADNTAFRELITAKEIEKNVQEMSKGSAPGPDGITLGDVVKMDPEFSRTMEIFNLWLTTGKIPDMVRGCRTVLIPKSTQPDRLKDINNWRPITIGSILLRLFSRIITARMTKACPLNPRQRGFIRAAGCSENLKLLQTIIRSAKSEHRPLGVVFVDIAKAFDTVSHQHILHVLQQRGVDPHIIGLVSNMYKDISTFVTTKKDTHTDKIQIRVGVKQGDPLSPLLFNLAMDPLLCKLEESGNGFHRGGHTITAMAFADDLVLLSDSWENMEKNIEILEAFCDLTGLKTQGQKCHGFYIKPTKDSYTVNNCAAWTIYGTPLNMINPGDSEKYLGLQFDPWIGIARSGLSTKLDFWLQRIDQAPLKPLQKTDILKTYTIPRLIYIADHSEVKTALLETLDQKIRTAVKEWLHLPPCTCDAILYSSTRDGGLGITKLAGLIPSVQARRLHRIAQSSDDTMKCFMEKEKMEQLHKKLWIQAGGDRENIPSIWEAPPSSEPPNNVSTNSEWEAPTQKDKFPKPCNWRKNEFKKWTKLASQGRGIVNFERDKISNHWIQYYRRIPHRKLLTALQLRANVYPTREFLARGRQDQYIKACRHCDADIESCAHIIGNCPVTQDARIKRHNYICELLLEEAKKKDWVVFKEPHIRDSNKELYKPDLIFVKDARALVVDVTVRYEAAKSSLEEAAAEKVRKYKHLETEVRHLTNAKDVTFVGFPLGARGKWHQDNFKLLTELGLSKSRQVKMAETFSTVALFSSVDIVHMFASRARKSMVM

SEQ ID NO: 1394 - protein, 1834 aa, synthetic construct
MAPKKKRKVNISGSSCGSPNSADTSSDFKDLWTKLKECHDREVQGLQVKVTKLKQERILDAQRLEEFFTKNQQLREQQKVLHETIKVLEDRLRAGLCDRCAVTEEHMRKKQQEFENIRQQNLKLITELMNERNTLQEENKKLSEQLQQKIENDQQHQAAELECEEDVIPDSPITAFSFSGVNRLRRKENPHVRYIEQTHTKLEHSVCANEMRKVSKSSTHPQHNPNENEILVADTYDQSQSPMAKAHGTSSYTPDKSSFNLATVVAETLGLGVQEESETQGPMSPLGDELYHCLEGNHKKQPFESGSETPGTSESATPEGSPKRKVSSAEGAAKEEPKRRSARLSAKPPAKVEAKPKKAAAKDKSSDKKVQTKGKRGAKGKQAEVANQETKEDLPAENGETKTEESPASDEAGEKEAKSDSGSETPGTSESATPESASCPKPGPPVSAGAMSLESGLTTHSVLAIERGPNSLANSGSDFGGGGLGLPLRLLRVSVGTQTSRSDWVDLVSWSHPGPTSKSQQVDLVSLFPKHRVDLLSKNDQVDLVAQFLPSKFPPNLAENDLALLVNLEFYRSDLHVYECVHFAAHWEGLSGLPEVYEQLAPQPCVGETLHSSLPRDSELFVPEEGSSEKESEDAPKTSPPTPGKHGLEQTGEEKVMVTVPDKNPPCPCCGTRVNSVLNLIEHLKVSHGKRGVCFRCAKCGKENSNYHSVVCHFKKCRGPETEKAPAGEWICEVCNRDFTTKIGLGQHKRLAHPAVRNQERIVASQPKETSNRGAHKRCWTKEEEELLIRLEAQFEGNKNINKLIAEHITTKTAKQISDKRRLLSRKPAEEPREEPGTCHHTRRAAASLRTEPEMSHHAQAEDRDNGPGRRPLPGRAAAGGRTMDEIRRHPDKGNGQQRPTKQKSEEQLQAYYKKTLEERLSAGALNTFPRAFKQVMEGRDIKLVINQTAQDCFGCLESISQIRTATRDKKDTVTREKHPKKPFQKWMKKRAIKKGNYLRFQRLFYLDRGKLAKIILDDIECLSCDIPLSEIYSVFKTRWETTGSFKSLGDFKTYGKADNTAFRELITAKEIEKNVQEMSKGSAPGPDGITLGDVVKMDPEFSRTMEIFNLWLTTGKIPDMVRGCRTVLIPKSSKPDRLKDINNWRPITIGSILLRLFSRIVTARLSKACPLNPRQRGFIRAAGCSENLKLLQTIIWSAKREHRPLGVVFVDIAKAFDTVSHQHIIHALQQREVDPHIVGLVSNMYENISTYITTKRNTHTDKIQIRVGVKQGDPMSPLLFNLAMDPLLCKLEESGKGYHRGQSSITAMAFADDLVLLSDSWENMNTNISILETFCNLTGLKTQGQKCHGFYIKPTKDSYTINDCAAWTINGTPLNMIDPGESEKYLGLQFDPWIGIARSGLSTKLDFWLQRIDQAPLKPLQKTDILKTYTIPRLIYIADHSEVKSALLETLDQKIRTAVKEWLHLPPCTCDAILYSSTRDGGLGITKLAGLIPSVQARRLHRIAQSSDDTMKCFMEKEKMEQLHKKLWIQAGGDRENIPSIWEAPPSSEPPNNVSTNSEWEAPTQKDKFPKPCNWRKNEFKKWTKLASQGRGIVNFERDKISNHWIQYYRRIPHRKLLTALQLRANVYPTREFLARGRQDQYIKACRHCDADNESCAHIIGNCPVTQDARIKRHNYICELLLEEAKKKDWVVFKEPHIRDSNKELYKPDLIFVKDARALVVDVTVRYEAAKSSLEEAAAEKVRKYKHLETEVRHLTNAKDVTFVGFPLGARGKWHQDNFKLLTELGLSKSRQVKMAETFSTVALFSSVDIVHMFASRARKSMVMRKKRRQRRR

SEQ ID NO: 1395 - protein, 1390 aa, synthetic construct
MASCPKPGPPVSAGAMSLESGLTTHSVLAIERGPNSLANSGSDFGGGGLGLPLRLLRVSVGTQTSRSDWVDLVSWSHPGPTSKSQQVDLVSLFPKHRVDLLSKNDQVDLVAQFLPSKFPPNLAENDLALLVNLEFYRSDLHVYEGVHKAAHWEGLSGLPEVYEQLAPQPCVGETLHSSLPRDSELFVPEEGSSEKESEDAPKTSPPTPGKHGLEQTGEEKVMVTVPDKNPPCPCCGTRVNSVLNLIEHLKVSHGKRGVCFRCAKCGKENSNYHSVVCHFKKCRGPETEKAPAGEWICEVCNRDFTTKIGLGQHKRLAHPAVRNQERIVASQPKETSNRGAHKRCWTKEEEELLIRLEAQFEGNKNINKLIAEHITTKTAKQISDKRRLLSRKPAEEPRMEPGTCHHTRRAAASLRTEPEMSHHAQAEDRDNGPGRRPLPGRAAAGGRTMDEIRRHPDKGNGQQRPTKQKSEEQLQAYYKKTLEERLSAGALNTFPRAFKQVMEGRDIKLVINQTAQDCFGCLESISQIRTATRDKKDTVTREKHPKKPFQKWMKKRAIKKGNYLRFQRLFYLDRGKLAKIILDDIECLSCDIPLSEIYSVFKTRWETTGSFKSLGDFKTYGKADNTAFRELITAKEIEKNVQEMSKGSAPGPDGITLGDVVKMDPEFSRTMEIFNLWLTTGKIPDMVRGCRTVLIPKSSDPDRLKDINNWRPITIGSILLRLFSRIVTARLSKACPLNPRQRGFIRAAGCSENLKLLQTIIWSAKREHRPLGVVFVDIAKAFDTVSHQHIIHALQQREVDPHIVGLVSNMYENISTYITTKRNTHTDKIQIRVGVKQGDPMSPLLFNLAMDPLLCKLEESGKGYHRGQSSITAMAFADDLVLLSDSWENMNTNISILETFCNLTGLKTQGQKCHGFYIKPTKKSYTINDCAAWTINGTPLNMIDPGESEKYLGLQFDPWIGIARSGLSTKLDFWLQRIDQAPLKPLQKLDILKTYTIPRLIYIADHSEVKSALLETLDQKIRTAVKEWLHLPPCTCDAILYSSTRDGGLGITKLAGLIPSVQARRLHRIAQSSDDTMKCFMEKEKMEQLHKKLWIQAGGDRENIPSIWEAPPSSEPPNNVSTNSEWEAPTQKDKFPKPCNWRKNEFKKWTKLASQGRGIVNFERDKISNHWIQYYRRIPHRKLLTALQLRANVYPTREFLARGRQDQYIKACRHCDADNESCAHIIGNCPVTQDARIKRHNYICELLLEEAKKKDWVVFKEPHIRDSNKELYKPDLIFVKDGRALVVDVTVRYEAAKSSLEEAAAEKVRKYKHLETEVRHLTNAKDVTFVGFPLGARGKWHQDNFKLLTELGLSKSRQVKMAETFSTVALFSSVDIVHMFASRARKSMVM

SEQ ID NO: 1396 - protein, 1671 aa, synthetic construct
MGTALTPLLTKFATRYEMGTTPEEVANTLKQTCFKGQVNDSQMVALLIVADQYKLNPFTKELYAFPDKNNGIVPVVGVDGWARIINENPQFDGMEFSMDQQGTECTCKIYRKDRSHAISATEYMAECKRNTQPWQSHPRRMLRHKAMIQCARLAFGFAGIYDQDEAERIVERDVTPAEQYEDVSEAICLIKDSPTMEDLQAAFSNAWKAYKTKGARDQLTAAKDQRKKELLDAPIDVEFEETGDDRAASGGSSGGSSGSETPGTSESATPESSGGSSGGSSMASCPKPGPPVSAGAMSLESGLTTHSVLAIERGPNSLANSGSDFGGGGLGLPLRLLRVSVGTQTSRSDWVDLVSWSHPGPTSKSQQVDLVSLFPKHRVDLLSKNDQVDLVAQFLPSKFPPNLAENDLALLVNLEFYRSDLHVYECVHFAAHWEGLSGLPEVYEQLAPQPCVGETLHSSLPRDSELFVPEEGSSEKESEDAPKTSPPTPGKHGLEQTGEEKVMVTVPDKNPPCPCCGTRVNSVLNLIEHLKVSHGKRGVCFRCAKCGKENSNYHSVVCHFPKCRGPETEKAPAGEWICEVCNRDFTTKIGLGQHKRLAHPAVRNQERIVASQPKETSNRGAHKRCWTKEEEELLIRLEAQFEGNKNINKLIAEHITTKTAKQISDKRRLLSRKPAEEPREEPGTCHHTRRAAASLRTEPEMSHHAQAEDRDNGPGRRPLPGRAAAGGRTMDEIRRHPDKGNGQQRPTKQKSEEQLQAYYKKTLEERLSAGALNTFPRAFKQVMEGRDIKLVINQTAQDCFGCLESISQIRTATRDKKYTVTREKHPKKPFQKWMKDRAIKKGNYLRFQRLFYLDRGKLAKIILDDIECLSCDIPLSEIYSVFKTRWETTGSFKSLGDFKTYGKADNTAFRELITAKEIEKNVQEMSKGSAPGPDGITLGDVVKMDPEFSLTMEIFNLWLTTGKIPDMVRGCRTVLIPKSSKPDRLKDINNWRPITIGSILLRLFSRIVTARLSKACPLNPRQRGFIRAAGCSENLKLLQTIIWSAKREHRPLGVVFVDIAKAFDTVSHQHIIHALQQREVDPHIVGLVSNMYENISTYITTKRNTHTDKIQIRVGVKQGDPMSPLLFNLAMDPLLCKLEESGKGYHRGQSSITAMAFADDLVLLSDSWENMNTNISILETFCNLTGLKTQGQKCHGFYIKPTKDSYTINDCAAWTINGTPLNMIDPGESEKYLGLQFDPWIGIARSGLSTKLDFWLQRIDQAPLKPLQKTDILKTYTIPRLIYIADHSEVKTALLETLDQKIRTAVKEWLHLPPCTCDAILYSSTRDGGLGITKLAGLIPSVQARRLHRIAQSSDDTMKCFMEKEKMEQLHKKLWIQAGGDRENIPSIWEAPPSSEPPNNVSTNSEWEAPTQKPKFPKPCNWRKNEFKKWTKLASQGRGIVNFERDKISNHWIQYYRRIPHRKLLTALQLRANVYPTREFLARGRQDQYIKACRHCDADIESCAHIIGNCPVTQDARIKRHNYICELLLEEAKKKDWVVFKEPHIRDSNKELYKPDLIFVKDARALVVDVTVRYEAAKSSLEEAAAEKVRKYKHLETEVRHLTNAKDVTFVGFPLGARGKWHQDNFKLLTELGLSKSRQVKMAETFSTVALFSSVDIVHMFASRARKSMVM

SEQ ID NO: 1397 - protein, 1514 aa, synthetic construct
MPKRKVSSAEGAAKEEPKRRSARLSAKPPAKVEAKPKKAAAKDKSSDKKVQTKGKRGAKGKQAEVANQETKEDLPAENGETKTEESPASDEAGEKEAKSDSGSETPGTSESATPESASCPKPGPPVSAGAMSLESGLTTHSVLAIERGPNSLANSGSDFGGGGLGLPLRLLRVSVGTQTSRSDWVDLVSWSHPGPTSKSQQVDLVSLFPKHRVDLLSKNDQVDLVAQFLPSKFPPNLAENDLALLVNLEFYRSDLHVYECVHFAAHWEGLSGLPEVYEQLAPQPCVGETLHSSLPRDSELFVPEEGSSEKESEDAPKTSPPTPGKHGLEQTGEEKVMVTVPDKNPPCPCCGTRVNSVLNLIEHLKVSHGKRGVCFRCAKCGKENSNYHSVVCHFKKCRGPETEKAPAGEWICEVCNRDFTTKIGLGQHKRLAHPAVRNQERIVASQPKETSNRGAHKRCWTKEEEELLIRLEAQFEGNKNINKLIAEHITTKTAKQISDKRRLLSRKPAEEPREEPGTCHHTRRAAASLRTEPEMSHHAQAEDRDNGPGRRPLPGRAAAGGRTMDEIRRHPDKGNGQQRPTKQKSEEQLQAYYKKTLEERLSAGALNTFPRAFKQVMEGRDIKLVINQTAQDCFGCLESISQIRTATRDKKDTVTREKHPKKPFQKWMKKRAIKKGNYLRFQRLFYLDRGKLAKIILDDIECLSCDIPLSEIYSVFKTRWETTGSFKSLGDFKTYGKADNTAFRELITAKEIEKNVQEMSKGSAPGPDGITLGDVVKMDPEFSRTMEIFNLWLTTGKIPDMVRGCRTVLIPKSSKPDRLKDINNWRPITIGSILLRLFSRIVTARLSKACPLNPRQRGFIRAAGCSENLKLLQTIIWSAKREHRPLGVVFVDIAKAFDTVSHQHIIHALQQREVDPHIVGLVSNMYENISTYITTKRNTHTDKIQIRVGVKQGDPMSPLLFNLAMDPLLCKLEESGKGYHRGQSSITAMAFADDLVLLSDSWENMNTNISILETFCNLTGLKTQGQKCHGFYIKPTKDSYTINDCAAWTINGTPLNMIDPGESEKYLGLQFDPWIGIARSGLSTKLDFWLQRIDQAPLKPLQKTDILKTYTIPRLIYIADHSEVKTALLETLDQKIRTAVKEWLHLPPCTCDAILYSSTRDGGLGITKLAGLIPSVQARRLHRIAQSSDDTMKCFMEKEKMEQLHKKLWIQAGGDRENIPSIWEAPPSSEPPNNVSTNSEWEAPTQKDKFPKPCNWRKNEFKKWTKLASQGRGIVNFERDKISNHWIQYYRRIPHRKLLTALQLRANVYPTREFLARGRQDQYIKACRHCDADIESCAHIIGNCPVTQDARIKRHNYICELLLEEAKKKDWVVFKEPHIRDSNKELYKPDLIFVKDARALVVDVTVRYEAAKSSLEEAAAEKVRKYKHLETEVRHLTNAKDVTFVGFPLGARGKWHQDNFKLLTELGLSKSRQVKMAETFSTVALFSSVDIVHMFASRARKSMVMRKKRRQRRR

SEQ ID NO: 1398 - protein, 1834 aa, synthetic construct
MAPKKKRKVNISGSSCGSPNSADTSSDFKDLWTKLKECHDREVQGLQVKVTKLKQERILDAQRLEEFFTKNQQLREQQKVLHETIKVLEDRLRAGLCDRCAVTEEHMRKKQQEFENIRQQNLKLITELMNERNTLQEENKKLSEQLQQKIENDQQHQAAELECEEDVIPDSPITAFSFSGVNRLRRKENPHVRYIEQTHTKLEHSVCANEMRKVSKSSTHPQHNPNENEILVADTYDQSQSPMAKAHGTSSYTPDKSSFNLATVVAETLGLGVQEESETQGPMSPLGDELYHCLEGNHKKQPFESGSETPGTSESATPEGSPKRKVSSAEGAAKEEPKRRSARLSAKPPAKVEAKPKKAAAKDKSSDKKVQTKGKRGAKGKQAEVANQETKEDLPAENGETKTEESPASDEAGEKEAKSDSGSETPGTSESATPESASCPKPGPPVSAGAMSLESGLTTHSVLAIERGPNSLANSGSDFGGGGLGLPLRLLRVSVGTQTSRSDWVDLVSWSHPGPTSKSQQVDLVSLFPKHRVDLLSKNDQVDLVAQFLPSKFPPNLAENDLALLVNLEFYRSDLHVYECVHFAAHWEGLSGLPEVYEQLAPQPCVGETLHSSLPRDSELFVPEEGSSEKESEDAPKTSPPTPGKHGLEQTGEEKVMVTVPDKNPPCPCCGTRVNSVLNLIEHLKVSHGKRGVCFRCAKCGKENSNYHSVVCHFKKCRGPETEKAPAGEWICEVCNRDFTTKIGLGQHKRLAHPAVRNQERIVASQPKETSNRGAHKRCWTKEEEELLIRLEAQFEGNKNINKLIAEHITTKTAKQISDKRRLLSRKPAEEPREEPGTCHHTRRAAASLRTEPEMSHHAQAEDRDNGPGRRPLPGRAAAGGRTMDEIRRHPDKGNGQQRPTKQKSEEQLQAYYKKTLEERLSAGALNTFPRAFKQVMEGRDIKLVINQTAQDCFGCLESISQIRTATRDKKDTVTREKHPKKPFQKWMKKRAIKKGNYLRFQRLFYLDRGKLAKIILDDIECLSCDIPLSEIYSVFKTRWETTGSFKSLGDFKTYGKADNTAFRELITAKEIEKNVQEMSKGSAPGPDGITLGDVVKMDPEFSRTMEIFNLWLTTGKIPDMVRGCRTVLIPKSSKPDRLKDINNWRPITIGSILLRLFSRIVTARLSKACPLNPRQRGFIRAAGCSENLKLLQTIIWSAKREHRPLGVVFVDIAKAFDTVSHQHIIHALQQREVDPHIVGLVSNMYENISTYITTKRNTHTDKIQIRVGVKQGDPMSPLLFNLAMDPLLCKLEESGKGYHRGQSSITAMAFADDLVLLSDSWENMNTNISILETFCNLTGLKTQGQKCHGFYIKPTKDSYTINDCAAWTINGTPLNMIDPGESEKYLGLQFDPWIGIARSGLSTKLDFWLQRIDQAPLKPLQKTDILKTYTIPRLIYIADHSEVKTALLETLDQKIRTAVKEWLHLPPCTCDAILYSSTRDGGLGITKLAGLIPSVQARRLHRIAQSSDDTMKCFMEKEKMEQLHKKLWIQAGGDRENIPSIWEAPPSSEPPNNVSTNSEWEAPTQKDKFPKPCNWRKNEFKKWTKLASQGRGIVNFERDKISNHWIQYYRRIPHRKLLTALQLRANVYPTREFLARGRQDQYIKACRHCDADIESCAHIIGNCPVTQDARIKRHNYICELLLEEAKKKDWVVFKEPHIRDSNKELYKPDLIFVKDARALVVDVTVRYEAAKSSLEEAAAEKVRKYKHLETEVRHLTNAKDVTFVGFPLGARGKWHQDNFKLLTELGLSKSRQVKMAETFSTVALFSSVDIVHMFASRARKSMVMRKKRRQRRR

SEQ ID NO: 1399 - DNA, 3159 bp, synthetic construct
  source 1..3159: mol_type = other DNA
agtaactatgactctcttaatgccggattggcgggaacagccgatcctagtaaggctggatgaattcatgcgggctgaagcagcggttctcccataaaataggggctttggggaaggtgggggacgtcgggggggcccctggagggacccctgtaccgataggggatccttgttttttcccctctacctggggcttttgtggggaggcgagggcacgtggtgagtgggggatggctgactggggaaagttaccaaggtatccccaaaacctgttttggtaggggtagggatacatactgggcacaactgtaattctctagcccaggaccgagaagttgggactcaccaacccaactttctcttgaaatttcggtgaaacaaatttaaggtataggtcatttgacttaatacccaaaacctggcccctgggtttttagagggcaaagtttggtagtttggcagggagggccgctactactcctgcttcaccctcccaccttgctaagactaatattttccggactaccgtacgtcgacgcggcctactcgacggatcgatccgaacaaacgacccaacacccgtgcgttttattctgtctttttattgccgatcccctcagaagaactcgtcaagaaggcgatagaaggcgatgcgctgcgaatcgggagcggcgataccgtaaagcacgaggaagcggtcagcccattcgccgccaagctcttcagcaatatcacgggtagccaacgctatgtcctgatagcggtcggccgctctacttgtacagctcgtccatgccgtacaggaacaggtggtggcggccctcggagcgctcgtactgttccacgatggtgtagtcctcgttgtgggaggtgatgtccagcttggtgtccacgtagtagtagccgggcagttgcacgggcttcttggccatgtagatggtcttgaactccaccaggtagtggccgccgtccttcagcttcagggcctggtggatctcgcccttcagcacgccgtcgcgggggtacaggcgctcggtggaggcctcccagcccatggttttcttctgcattacggggccgtcgggggggaagttggtgccgcgcatcttcaccttgtagatcagcgtgccgtcctgcagggaggagtcctgggtcacggtcaccagaccgccgtcctcgaagttcatcacgcgctcccacttgaagccctcggggaaggacagcttcttgtaatcggggatgtcggcggggtgcttcacgtacgccttggagccgtacatgaactggggggacaggatgtcccaggcgaagggcagggggccgcccttggtcaccttcagcttggcggtctgggtgccctcgtaggggcggccctcgccctcgccctcgatctcgaactcgtggccgttcatggagccctccatgcgcaccttgaagcgcatgaactctttgatgacggccatgttgttgtcctcggaggaggcggtgccggagctgccgctgccggtgctgccggtgccatgccccaggaacaggtggtggcggccctcggagcgctcgtactgttccacgatggtgtagtcctcgttgtgggaggtgatgtccagcttggtgtccacgtagtagtagccgggcagttgcacgggcttcttggccatgtagatggtcttgaactccaccaggtagtggccgccgtccttcagcttcagggcctggtggatctcgcccttcagcacgccgtcgcgggggtacaggcgctcggtggaggcctcccagcccatggttttcttctgcattacggggccgtcgggggggaagttggtgccgcgcatcttcaccttgtagatcagcgtgccgtcctgcagggaggagtcctgggtcacggtcaccagaccgccgtcctcgaagttcatcacgcgctcccacttgaagccctcggggaaggacagcttcttgtaatcggggatgtcggcggggtgcttcacgtacgccttggagccgtacatgaactggggggacaggatgtcccaggcgaagggcagggggccgcccttggtcaccttcagcttggcggtctgggtgccctcgtaggggcggccctcgccctcgccctcgatctcgaactcgtggccgttcatggagccctccatgcgcaccttgaagcgcatgaactctttgatgacctcctcgcccttgctcaccatggtggcgaattcgaagcttgagctcgagatctgagtccggtagcgctagcggatctgacggttcactaaaccagctctgcttatatagacctcccaccgtacacgcctaccgcccatttgcgtcaatggggcggagttgttacgacattttggaaagtcccgttgattttggtgccaaaacaaactcccattgacgtcaatggggtggagacttggaaatccccgtgagtcaaaccgctatccacgcccattgatgtactgccaaaaccgcatcaccatggtaatagcgatgactaatacgtagatgtactgccaagtaggaaagtcccataaggtcatgtactgggcataatgccaggcgggccatttaccgtcattgacgtcaatagggggcgtacttggcatatgatacacttgatgtactgccaagtgggcagtttaccgtaaatactccacccattgacgtcaatggaaagtccctattggcgttactatgggaacatacgtcattattgacgtcaatgggcgggggtcgttgggcggtcagccaggcgggccatttaccgtaagttatgtaacgcggaactccatatatgggctatgaactaatgaccccgtaattgattactattaaattcctgcaggaattcgaagcttgattgttgtttatttttgtacatattgttgttttatttatttccactgtacattcgattcaataaacttcgacgggtgctggggcgcggggcagccacaggccagatatcacaagccagaaggacgtggacagtaagtagggacgggacttattatttcataacgcgtcaattaccatctgatttggaccaatttaccgaatttgtccaaggtggacgggccacctttacttaacccggaaaaggagcatatatatttatatatatgtgttcgaaaaatagccaaatgcctcgtcatc

SEQ ID NO: 1400 - DNA, 2452 bp, synthetic construct
  source 1..2452: mol_type = other DNA
agtaactatgactctcttaatgccggattggcgggaacagccgatcctagtaaggctggatgaattcatgcgggctgaagcagcggttctcccataaaataggggctttggggaaggtgggggacgtcgggggggcccctggagggacccctgtaccgataggggatccttgttttttcccctctacctggggcttttgtggggaggcgagggcacgtggtgagtgggggatggctgactggggaaagttaccaaggtatccccaaaacctgttttggtaggggtagggatacatactgggcacaactgtaattctctagcccaggaccgagaagttgggactcaccaacccaactttctcttgaaatttcggtgaaacaaatttaaggtataggtcatttgacttaatacccaaaacctggcccctgggtttttagagggcaaagtttggtagtttggcagggagggccgctactactcctgcttcaccctcccaccttgctaagactaatattttccggactaccgtacgtcgacgcggcctactcgacggatcgatccgaacaaacgacccaacacccgtgcgttttattctgtctttttattgccgatcccctcagaagaactcgtcaagaaggcgatagaaggcgatgcgctgcgaatcgggagcggcgataccgtaaagcacgaggaagcggtcagcccattcgccgccaagctcttcagcaatatcacgggtagccaacgctatgtcctgatagcggtcggccgctcttcctactcaggctttattcaaagaccaagaggtacaggtgcaagggagagaagaagggcatggccagaaggcaagccccgcagaaggcagcggatctcagcgatcccctgtcctacacgcttcaccagtatacaatttcagctttccgcggaggaaattgctgtacactctaaaaagcttcctaaacgtgtccgcggtgatcgttcggaggggtgccgcggaggccgcgtcaggcggcgaaatagcctccttttgtgcgcccagagcccgaagcaacgtcgtcaagctgcggagccccgacaccgctttatcgacatgaagttggaggggctcccacggctgtgatgagttgacgaggagggcctgaccccgcaacaccgcctccgacaaaagcgcgagcccctgccacacttcgacggcctgctgtcctacttccattctcttccatgcatagaaattgacctttgtatccggtacagtaatgttctcattgagggagcagtgctcggcgcatccggttgtgatgttttcggcttctttggcttcaagaaggtacctctcaagtacccgtgagtcgcagatcaatctgggtggtgcccccagcacaggcagtcccagtgggaggctcaagagcgacagcagcaaccacaaccacgcgggacactcgtgcactcccatggtggcgaattctcttatatttcttcttactcttcttttctctcttatttgaattcgaagcttgagctcgagatctgagtccggtagcgctagcggatctgacggttcactaaaccagctctgcttatatagacctcccaccgtacacgcctaccgcccatttgcgtcaatggggcggagttgttacgacattttggaaagtcccgttgattttggtgccaaaacaaactcccattgacgtcaatggggtggagacttggaaatccccgtgagtcaaaccgctatccacgcccattgatgtactgccaaaaccgcatcaccatggtaatagcgatgactaatacgtagatgtactgccaagtaggaaagtcccataaggtcatgtactgggcataatgccaggcgggccatttaccgtcattgacgtcaatagggggcgtacttggcatatgatacacttgatgtactgccaagtgggcagtttaccgtaaatactccacccattgacgtcaatggaaagtccctattggcgttactatgggaacatacgtcattattgacgtcaatgggcgggggtcgttgggcggtcagccaggcgggccatttaccgtaagttatgtaacgcggaactccatatatgggctatgaactaatgaccccgtaattgattactattaaattcctgcaggaattcgaagcttgattgttgtttatttttgtacatattgttgttttatttatttccactgtacattcgattcaataaacttcgacgggtgctggggcgcggggcagccacaggccagatatcacaagccagaaggacgtggacagtaagtagggacgggacttattatttcataacgcgtcaattaccatctgatttggaccaatttaccgaatttgtccaaggtggacgggccacctttacttaacccggaaaaggagcatatatatttatatatatgtgttcgaaaaatagccaaatgcctcgtcatc

SEQ ID NO: 1401 - DNA, 5489 bp, synthetic construct
  source 1..5489: mol_type = other DNA
gaaataagagagaaaagaagagtaagaagaaatataagagaattcgccaccatggcccctaagaaaaagcggaaggtgaatatcagcggctctagctgcggcagccccaacagcgccgacaccagcagcgacttcaaggacctgtggaccaagctgaaggaatgccacgaccgggaagtgcagggactccaggtgaaggtcaccaaactcaagcaagaaagaatcctggacgcccagagactggaagaattcttcaccaagaaccagcagctgagagagcagcagaaagtgctgcacgagacaatcaaggttctggaagatagactgcgggccggcctgtgcgacagatgcgccgtgaccgaggaacacatgcgcaaaaagcagcaggagttcgagaacattagacagcaaaatctgaaattgatcacagagctgatgaacgagagaaacacactgcaggaggagaacaagaagctgagcgagcagctgcaacagaagatcgagaatgatcagcaacaccaggccgctgagctggaatgtgaagaggacgtgatccccgacagcccaatcacagctttcagcttttctggcgtgaacagactgaggcggaaggaaaacccccacgtgcggtacatcgagcagacccataccaagctggaacacagcgtgtgtgccaacgagatgagaaaggtgtccaagtcctccacccatccccagcacaaccctaacgaaaatgagatcctggtggctgatacctacgaccagtctcagagccctatggccaaggcccacggcaccagctcttatacccctgataagagctccttcaacctggccaccgtggtggccgagacactgggcctgggcgtgcaggaggaaagcgagacacagggcccaatgagccctctgggagatgagctgtaccactgcctggaaggcaaccacaagaaacagccttttgagtccggctccgagactcctggaacaagcgagagcgctacacctgagggcagccctaagagaaaggtgtccagcgccgagggcgctgccaaggaagagcctaaacggagaagcgccagactgagcgccaagccccccgccaaggtggaagccaagcctaagaaggccgccgctaaggacaagagcagcgataagaaagtccagaccaagggcaagcggggcgccaaaggcaaacaggccgaggtggccaaccaggagacaaaggaagatctgcctgctgagaacggcgaaaccaagaccgaggaatctccagcttctgacgaggccggagagaaggaggccaaaagcgacagcggctctgagacacctggaacaagcgagagcgccaccccggaatcctatgaacagccgactccgtttcaacctgaaggggagaaaatctgccccccaagagactgtgaagcagttttggtcggggaaggggaggggagcagtgaggaggtcacaccagaaccatcgccccctgaaccagagacaacctccgtggcagcatctccaactctgcctgtaaccaacgtggaacagtcgtcggagagccccatcacagtaattgtgccggataaaaatccttcatgtccctgctgtggtattcgagcgagcggggtatcgggtttgattgagcatttgcgggaggttcacaggaggagggaggtttgctttcggtgttctaaatgtgagaaagaaaatactaattaccatagcattatttgtcattttcctaaatgcaagggtaaagaggaaacatctgcgccagccggggaatggtcctgtgaggtatgtggacgagattttaatactaaaattggcttgggacaacataaaagattggcacacccagctgttagaaatcaggaaagggtcgctgcttcccacccaaaagaaaattctaaacgaggagctcataaaaaatgttggactgaagaagaggaaaaattattaatagaattaatagctcagttcgaggggcatgcaaatattaataaattaattgcggaacatattacaaccaaaacagctaaacaaattagtgaaaaaaggagactgctctccaaaaaactaatggtagtggaggcagaatgtgaacctgggccaagtcatcggaccaggagagcagctgcagagataaggaagggagctgagatgaatcaccataatgaggatgctgctgaggacaatggagctgggaggggtcccctgaccaggagagcagctgcccggggggaaacaaaagaagagataagccagtttcctgataaggccaacgatcagcaggaggccagtagcagtgggaggggcccagtgaccaggagagcagctgcaggaaagaaaacaaaaaagagtattgatcaccctactgataaggccaacggccagcaggtagccatcagcactagaaggggttgtttgaatagaggagtgactgccggggtagaaacaatagagggctcgagtcacctccctgataaggacagtgacggacagggcacccccagccgggagaaggagggacaattacaagatcactatcaagaagtcatcggagcctggttatcagatgggaggatcaatacctttccagaggcattcaaagggttgttagggaaacgagagatacaggcaacgatcaatcagtcaatactggattgttttgggggcattgattcaaaaagccaggtgaacaaaatgactcgagataagaaagataaaaagccagggagacctccccagaagtggatgaaaaagagagccatcaaaagaggtagctatcttcgcttccaacgtcttttccatcttgataggggaaaattagccaagattgttttggacaatatcgaatgtttgacgtgcgatatcccacccagtgaaatttattccgtttttaaggccaggtgggaaacagcaggcaaatttaccagtcttggggactttaaatttactgaaaaggtggacaatagtgcattcagggatttaattacagctaaggaagtagaaaagaacatgcaagaaatgagcaaaggctcggctcctggtccagatggaattactctgagagacattcaaaaaatggatcctaagctctccaggaccacagagattttcaacctttggttggctgcaggcaaaattccggatggggtgagggaatgcaggactgtcttaattccaaaatcaacaaaaccagaacgcttaaaggacattaacaattggagaccaattacaatcggatccaccttgcttagattattttccaggattttaacagccagactaagcaaggcatgccccctcaacccaagacagaagggcttcattcaagcagccggatgctcagaaaacctgcaactcctgcaatccataatttggtcagcaaaacgggaacacaggcccctgggtgtcgtatttgtggacatcgcaaaggcttttgacacagtaagccacaagcacattctacacgttctgcagcggaggggagtggatcctcacatcatcggcctggtgagtgatatgtatgaaaacattcatacttctatcaccacgaagaaagcacgtacggatcgcatccagatccgagttggagttaaacagggcgacccgatgtctccccttctattcaatctggcaatggaccccctgctgtgcgaactggaaacgaacggcaggggacaccaccgcggcacaaattgcatcacagccatggcgtttgctgacgacctggtcctactgagtgactcctgggaggacatgaagagcaacatcaagatattggaggccttctgcgatctcaccggcctcaaaacgcagggagagaagtgccacggcttttacatcaagccgacgaaggactcgtacacggtcaacgactgtgctgcttggactataaacggcactcccctgaacatgattcttcccggtgagtccgagaaatacctgggcctgcagatagacccatggactggattggcaaaatcggacctctctacaaaactcgactcatggctcgagcaaatcgatagagttccactcaaaccgctgcagaaaattgaactcctgaaaacatacaccatccctcggttgacatacgtggctgaccattcggacttgaaagttagtttcctggagacattggatcagaagattcggacaatagttaaagattggctacacctgcctgcatgtacctgcgatgccatcctatactctagcacgaaggatggcggcctgggcatcactaaattagcaaagctgattcctagcgtacaggctaggagactacacagaatagcccaatcatcggacgaaaccatgaagcaatttctccacagggacaagatggaagcaatgtaccagaaactgtgggttcaagcgggaggagatagggagaaagttcctgcaatctgggaagctagacctacgatcgagtcacctaatttacaagaggtaggggtttcttctgagtgggaagcaccgactctgaaaaacaaatttcccaagccgtgcaattggagaaagatagaatttgaaaaatggaccaatttgatatctcagggacggggaatagggaatttcaagggggaccaaataagtaacaattggctgcaacactataggaacatacctcacaggaaactccttactgctgtacagctgagggccaatgtatatccaactagggaatttttagccaggggtaggcaggataaatacatcagaacgtgcagacattgcgacgcggccaacgaaacgtgcgcacatattattggcaattgccccataactcaggacgcgagaatcaagaggcacaactatatttgtcaagtgttgtcggagaaagcaatagggaaggactggatagtatataaagaaccgcacatcagggactccaacaaagaactttataaaccggacctgatatttgtgaaagacaaccgagcgtacgtcgtggatgtgaccgtgcgatacgaatcggacgagacctctttggagatggcggccacggagaaagtggacaagtacaaacacctgaccaaagagatacgaacgatcaccaacgcgaaagacattgtttttatgggctttcccctcggagctcgggggaaatggtaccaagggaactttgaacttttgaaagcccttggactctccaaatcggatcgagaaaagactgcccggtccttgtcatccatagcactcatgtcatctgtggacatcgtccacatatttgccagcaaatccaggacttgcactacactgtgataataggctgccttctgcggggcttgccttctggccatgcccttcttctctcccttgcacctgtacctcttggtctttgaataaagcctgagtaggaaggaccggtaaaaaaaaaaaaaaaaaaaaaaaaaaaaaaacgttgactaaaaaaaaaaaaaaaaaaaaaaaaaaaaaaaaaaaaaaaaaaaaaaaaaaaaaaaaaaaaaaaaaaaaaa

SEQ ID NO: 1402 - DNA, 5111 bp, synthetic construct
  source 1..5111: mol_type = other DNA
gaaataagagagaaaagaagagtaagaagaaatataagagaattcgccaccatggcccctaagaaaaagcggaaggtgaatatcagcggctctagctgcggcagccccaacagcgccgacaccagcagcgacttcaaggacctgtggaccaagctgaaggaatgccacgaccgggaagtgcagggactccaggtgaaggtcaccaaactcaagcaagaaagaatcctggacgcccagagactggaagaattcttcaccaagaaccagcagctgagagagcagcagaaagtgctgcacgagacaatcaaggttctggaagatagactgcgggccggcctgtgcgacagatgcgccgtgaccgaggaacacatgcgcaaaaagcagcaggagttcgagaacattagacagcaaaatctgaaattgatcacagagctgatgaacgagagaaacacactgcaggaggagaacaagaagctgagcgagcagctgcaacagaagatcgagaatgatcagcaacaccaggccgctgagctggaatgtgaagaggacgtgatccccgacagcccaatcacagctttcagcttttctggcgtgaacagactgaggcggaaggaaaacccccacgtgcggtacatcgagcagacccataccaagctggaacacagcgtgtgtgccaacgagatgagaaaggtgtccaagtcctccacccatccccagcacaaccctaacgaaaatgagatcctggtggctgatacctacgaccagtctcagagccctatggccaaggcccacggcaccagctcttatacccctgataagagctccttcaacctggccaccgtggtggccgagacactgggcctgggcgtgcaggaggaaagcgagacacagggcccaatgagccctctgggagatgagctgtaccactgcctggaaggcaaccacaagaaacagccttttgagtccggctccgagactcctggaacaagcgagagcgctacacctgagggcagccctaagagaaaggtgtccagcgccgagggcgctgccaaggaagagcctaaacggagaagcgccagactgagcgccaagccccccgccaaggtggaagccaagcctaagaaggccgccgctaaggacaagagcagcgataagaaagtccagaccaagggcaagcggggcgccaaaggcaaacaggccgaggtggccaaccaggagacaaaggaagatctgcctgctgagaacggcgaaaccaagaccgaggaatctccagcttctgacgaggccggagagaaggaggccaaaagcgacagcggctctgagacacctggaacaagcgagagcgccaccccggaatcctccagccttctggctactttaccggaggtatatgaaactccgagggtgatgggcaaagtcaccagcccgagttctgtgctgaccgaacatgagggagatagaacatcttctcccccaagaacaccacctcctattcttgagaccggggcagaccttccacaggagggcacacctgtggtaaaggtcccggatgataatccagcgtgtccatgctgcggtaatcgaataggaaggatttcggggcttatcgatcacttaaagagaacccatggaaagaaaaagatcctctttcaatgtgccaaatgtgggagaacaaatctgaaacatcacagtatcgcttgtcacgttccaaagtgcaaaggcgccaaggggaccagcccattaaggggctgggcctgcgaggaatgcaatagaacatttgggactaaaattggcttaagtcagcataagcggcttgctcacccagttactaggaatatagagcgaataacagcttcccgcccgaaagaggaaagtgcacgaggtgcacaccgtcggtgttggtctgaagaggaagtggagttgctcaagaagttggaaaaacagtatgaagggaataagaatataaacaaactaattgcagaacaccttccatcaaaaacagcaaagcagataagtgacaaaagaaggggactgataaaaagtccatcaaagaaaaatgggaaagatctgacgttgcgggaacaactcacggaggaaggagaacatctaattgagagtggctcccaagaaggtgggggactacggtcccactaccgtaagtcgattgcagaatggataagatctcagaaaataacgtcactcaggaaaatctttgagagagtgattgaagggaaagaagatctcccatccatagtcgatgaagctgcccaggattgctatgcatgcctgaaaagagatctcactgaaggggaaggtcgacaaattcaaaagatccgagagatccgcaggacccacccacaaaaaccatcaaaacaatggacaaaaaaaagggccagaaaacgagggcagttcctacggttccagcggctgttctacttggatagagggaaattggccggtataatcctggacgacgtggaatccctcaaatgtggtattccacttgacgtggtgcatgaagtattcaagtcaagatgggaatcacccggaacattcaagggcctgggtacttttaagaccattggtcaggcagacaattctgctttccaagctatgattaccatgaaggagattaagaaaaacatccgagaaatgaataaaaatgcggctccagggccggatgggatttccttgcgggacctcatgaagattgatccccagtgtgcgaaattaatggaattatttaatttgtggttgttaaccgggtatataccggatggggttaaaaattgtagaacaatattgataccaaaatcaactgtaccagaaaagttaaatgatgtgaataattggagacctataacgattggctcgattatattgagactattttcaaaaatattaacggcacgattaactaaggcatgccctattaacatacgacagaggggttttataaagtcatctggttgttctgaaaatctgaaattattacaactgataattagatatgcaaaaagagaacacaggccccttggggtggtctttgtcgacctggctaaagcatttgatacggtgagccactctcacatactgtcggtattaaaacaaaagggtgtggatgaacatataataaaactaattgaaaactcgtattataacatcaaaacctatattgatttgaaaaatgaaaaatctgactctattggaattcgaattggcgtaaaacaaggcgatccaatgtctccaattttgtttaacttatctgtcgatcctctattatgtaaacttgaagaaatgggtaatggatttcaatgtcatagccaaaatgtaacagcactggccttcgccgacgatttagtattactaagtgggtcctgggagggcatgcaaaataatataacaattgtagagaccttttgtgagctcactggtctcaagatgcagggggaaaagtgccacggcttttatatcaagccaacaaaagattcctatacgatcaatgactgtcccgtgtggactatcaatggcaccccccttaatatgattgaaccaggtagttctgagaaatacttgggtctttatgtcgacccgtggataggaatatctaaaccagaactactggagaaagttgacagatggcttgtgaaagtgggcaaggcaccattaaaaccttttcagaaagtcgacatcttgaaaggatacctgatcccgagagtaatatacctcgcggatcaagcaaatttaaaaccaacatatttagaatccattgacttggctatacgaactggagtcaaggaatggttgcacctaccagcgtgcacgtgtgacgccatcctttattcgaatactcaggatggagggttaggaatcagcagattggcagcactgattccgagtgtgcaggttcggagactgcacagaattgcccaaacctctgacgaagttttaaaaactatcgtcaaaagagaaggaatagaaagagaatttgagaaattatggttgatggccggtggtgataaggaaaggataccatctatatgggacccaaaaactgttatgataatatcggaaacgggcggtgaccaaatattgtcggaatgggagattcccaatccaaaactaatttatccaaaaccctgtaactggagaaaaagggaatttaataattggactaaattactgagccaaggccgaggtattgtaaattttgaaaaagataaaataagtaataattggttaatacactataggggcattcctcaaaggaaattaattacagcattacaattacgggcgaatatatacccgacgagggaatttttagctagaggacggtcggaaacttatattaaatcctgccgtcactgtcaggccgataatgagacttgcgcacatataattggctactgtccatctgtacaagatgcgagaattaaaagacataatcaaatctgtcatatattggcagaagaagctaagagaaaagattggttggtatatcaagaaccattattaagagatcaacaaaatgaattatataaaccggatttaatttttgttaaagggaatcaagcaatagtaacggatataacaataagatatgaaacaactattacaacgttggaagaggctgccttagaaaaagcaaagaaatatgtacatctagaatcgcaagtccaggatctgacaaatacatctgttataaattttacaggctttcctttgggatctcgtggcaaatggtaccaaggtaactacaaaatactaaatgaactgggtctctccaactcccgacaggagaaggtcgccagacgattatcaaactatgctttattcagctcggtggatatcattcacatgtttgcgagtaaagcgagaacggaggtaagatgataataggctgccttctgcggggcttgccttctggccatgcccttcttctctcccttgcacctgtacctcttggtctttgaataaagcctgagtaggaaggaccggtaaaaaaaaaaaaaaaaaaaaaaaaaaaaaaacgttgactaaaaaaaaaaaaaaaaaaaaaaaaaaaaaaaaaaaaaaaaaaaaaaaaaaaaaaaaaaaaaaaaaaaaaa

SEQ ID NO: 1403 - DNA, 5162 bp, synthetic construct
  source 1..5162: mol_type = other DNA
gaaataagagagaaaagaagagtaagaagaaatataagagaattcgccaccatggcccctaagaaaaagcggaaggtgaatatcagcggctctagctgcggcagccccaacagcgccgacaccagcagcgacttcaaggacctgtggaccaagctgaaggaatgccacgaccgggaagtgcagggactccaggtgaaggtcaccaaactcaagcaagaaagaatcctggacgcccagagactggaagaattcttcaccaagaaccagcagctgagagagcagcagaaagtgctgcacgagacaatcaaggttctggaagatagactgcgggccggcctgtgcgacagatgcgccgtgaccgaggaacacatgcgcaaaaagcagcaggagttcgagaacattagacagcaaaatctgaaattgatcacagagctgatgaacgagagaaacacactgcaggaggagaacaagaagctgagcgagcagctgcaacagaagatcgagaatgatcagcaacaccaggccgctgagctggaatgtgaagaggacgtgatccccgacagcccaatcacagctttcagcttttctggcgtgaacagactgaggcggaaggaaaacccccacgtgcggtacatcgagcagacccataccaagctggaacacagcgtgtgtgccaacgagatgagaaaggtgtccaagtcctccacccatccccagcacaaccctaacgaaaatgagatcctggtggctgatacctacgaccagtctcagagccctatggccaaggcccacggcaccagctcttatacccctgataagagctccttcaacctggccaccgtggtggccgagacactgggcctgggcgtgcaggaggaaagcgagacacagggcccaatgagccctctgggagatgagctgtaccactgcctggaaggcaaccacaagaaacagccttttgagtccggctccgagactcctggaacaagcgagagcgctacacctgagggcagccctaagagaaaggtgtccagcgccgagggcgctgccaaggaagagcctaaacggagaagcgccagactgagcgccaagccccccgccaaggtggaagccaagcctaagaaggccgccgctaaggacaagagcagcgataagaaagtccagaccaagggcaagcggggcgccaaaggcaaacaggccgaggtggccaaccaggagacaaaggaagatctgcctgctgagaacggcgaaaccaagaccgaggaatctccagcttctgacgaggccggagagaaggaggccaaaagcgacagcggctctgagacacctggaacaagcgagagcgccaccccggaatccactgactacctggctttacttcctgaggtgtatgagatatctaactctttgagtctcagggacgagaacacctgtccaactccggtggagatcgagaacgaagaggaggagtcctcacctctcggggctacggccaggacctctccattgccatcgactccggtctcgcgatcccgtgacgatctcccgacggagagtactcctgtggtgaagatcccggacaggaatacatcatgtccgtgttgcggtaatgtgaccggtaaattgtcgggtttaattgaacatctgaaaagagcacatgggaagaaaaagatcttattccaatgcgctcggtgtgggagaactgatgtaagacaccatagtattgcctgtcattttcctaaatgtaaggggcctgtggaagcctctcccgagaggagttggaagtgtgaggtctgtgagaaaacatttgaaacaaaaatcggcctggggcagcataagcgcttggtccatccagtcacaagaaatctcgagcggattgccactacacgccccaaggcaggtacaatgaggggggcacatcgtcggtgctggaccgaggatgagattgaactattgaggaagttggataaacaatatgaggggcagaaaaacatcaacaagttgattgcggagcatattccgaccaagacaacgaagcagataagcgataaaagacgggaccttcataagagcccggtgaagaagggaaaagaccatgggcggaagaaacatctagaattggaaggggaacaccttgccgaaggagaacatctcgtgtgcattggatcggagttggaggagggactgcggtcccgataccggaaaacaatcgctgagtgggttacatctggaaaattgtccattctccatggaatgtttgagcaggtgatcgaaggggaagaagatccagcaatagttgctgacagggcaatgaaagactgtttcgcatgccttgcctctaagtccgtcgagttgaaagctggccagggtcgaccgtgccagagggcccaaactgctcggccttcggaaccaccaaaggggtggatgaagaagagagctgtgaaacgggggcggttcctacggttccagcggctgttctacctggatagggggaaactggccggtattatcctggacgacgtggaatccctgaagtgtggtatcccacaagacgagatacacgacgtgttcaagtcgagatgggaatcaccgggaacattcaagggcctgggtgcgttccggtccaagggccaggcggacaactcggcattcgaagccatgatcacggcaagagaaatctctaagaacatcacagagatgaataagaacagtgcgccaggaccggacagactaagtctgcgggatatcattaagatagacccccattgtgtccagttaatggaagtattcaatctatggctggtgactggcatcgtaccggacgtggtgaaagaatgtcggactgtgttaatatcaaagtcatctctgccggagcgccaaatggacatcaataactggcgaccaattaccatcggatcgatcatcttgaggctgttctcaaggatcctgacggcaaggctggcgaaggcatgccctattaacccacgacaaaagggctttattagatcagcgggatgtgcggaaaacctgaagctgttacaactattgataaagaatgcaaaaaaggaacatcgacccttgggcgttgtctttattgacctggccaaagccttcgacacagtaagtcaccatcacctgattgcagtgcttaagcaaaagggtgtggaccatcacattatcaccctgatttcaaacatgtatcaaaataccagaactcgcattaccatgaagaatgaacagtcggatcccattgggattcaaattggtgttaaacaaggcgatccaatgtcacctttactatttaacttatctgtggaccctctgttgtgtaagttagaggaagaagggaatgggtaccatcacggctcgaagtgtgtaacatctatggcttttgcagacgatctggtgttgctaagtggatcatgggaaggaatgcaaagtaatattaaaatcctagaggccttttgcgatctgaccggcctcaggactcaaggggagaaatgccatggcttttatatacaacctactaaggactcgtataccatcaatgactgtcccccatggcagattaacgataccccactaaatatgatcgaacccggtagttcggaaaaatacctgggactgagaatagacccatggactggaatatcgaaacccgaactactcatgaaaataagagattggctacaacggattggagaagcgccactgaaaccgtttcagaaagttgacatcttgaagggatatactatcccgcgactgatttacttagcagaccaggctgatgtaaaagcaatgtacttagaagaacttgacctggcaattcgaactacggtcaaggagtggttacatctacctcctagtacctgcgatgccatcctgtattccagcacacgcgatggaggcctaggcatcactagactctcgggtctgatccccagtatacaagctcgaaggctgcacaggattgcgcagtctccggacgatgtgataagatcaatagtgaaacaagaggggatcgataaagagtttgaaaaattgtggttgatagctggaggtgataaaagtaaaataccatctatttgggacccgagtgcgattagggtaacatctgaagaattgggcgaggaggaacttgtttcagaatgggaaataccaactcccaaaaccatctttcctaaaccttgtgactggcgtaaacaggaatttaaaaactggaccaagctacagtcccagggccgtggtattgccaactttgagaaggacaaaatcagtaataattggctcgaacgatacagaggcattcctcaccgaaaactcctcacggcactacaattgagagctaacgtgtaccccactagggaattcctggcaagggggagacaggagtcgcatataaaatcctgtcgacactgtcaagcagaaaacgaatcaagcgctcatataattgggtactgccccgcagtgcaagatgccagaattaaaagacacaaccaattgtgtgatttacttacagttgaagttaaaaggaaggattggatcgtatttcatgagcccatactaaaagatgaacaaaatgagatttacaagcctgatcttgtatttgtaaaaggagaccaggcgatagttattgatgtaacaattcggtatgaaagtaaattgtcatcattggcagacgcggcggcagaaaaagttaaaaaatattgccatctcaaaagtcaaattcaggaattgacgaatgctaaaaatattacatttaagggattccctgtgggcgcacgaggtaaatggtactctggcaattacgaagtgttgaaagcattaggaatctcaaactcccgacaagacaaaatagcacgatgtatgtcaagaaaagctttatttacctctgttgatatcatacatatgtttgtgagtcattcgagatctattgtaagaacctgataataggctgccttctgcggggcttgccttctggccatgcccttcttctctcccttgcacctgtacctcttggtctttgaataaagcctgagtaggaaggaccggtaaaaaaaaaaaaaaaaaaaaaaaaaaaaaaacgttgactaaaaaaaaaaaaaaaaaaaaaaaaaaaaaaaaaaaaaaaaaaaaaaaaaaaaaaaaaaaaaaaaaaaaaa

SEQ ID NO: 1404 - DNA, 5078 bp, synthetic construct
  source 1..5078: mol_type = other DNA
gaaataagagagaaaagaagagtaagaagaaatataagagaattcgccaccatggcccctaagaaaaagcggaaggtgaatatcagcggctctagctgcggcagccccaacagcgccgacaccagcagcgacttcaaggacctgtggaccaagctgaaggaatgccacgaccgggaagtgcagggactccaggtgaaggtcaccaaactcaagcaagaaagaatcctggacgcccagagactggaagaattcttcaccaagaaccagcagctgagagagcagcagaaagtgctgcacgagacaatcaaggttctggaagatagactgcgggccggcctgtgcgacagatgcgccgtgaccgaggaacacatgcgcaaaaagcagcaggagttcgagaacattagacagcaaaatctgaaattgatcacagagctgatgaacgagagaaacacactgcaggaggagaacaagaagctgagcgagcagctgcaacagaagatcgagaatgatcagcaacaccaggccgctgagctggaatgtgaagaggacgtgatccccgacagcccaatcacagctttcagcttttctggcgtgaacagactgaggcggaaggaaaacccccacgtgcggtacatcgagcagacccataccaagctggaacacagcgtgtgtgccaacgagatgagaaaggtgtccaagtcctccacccatccccagcacaaccctaacgaaaatgagatcctggtggctgatacctacgaccagtctcagagccctatggccaaggcccacggcaccagctcttatacccctgataagagctccttcaacctggccaccgtggtggccgagacactgggcctgggcgtgcaggaggaaagcgagacacagggcccaatgagccctctgggagatgagctgtaccactgcctggaaggcaaccacaagaaacagccttttgagtccggctccgagactcctggaacaagcgagagcgctacacctgagggcagccctaagagaaaggtgtccagcgccgagggcgctgccaaggaagagcctaaacggagaagcgccagactgagcgccaagccccccgccaaggtggaagccaagcctaagaaggccgccgctaaggacaagagcagcgataagaaagtccagaccaagggcaagcggggcgccaaaggcaaacaggccgaggtggccaaccaggagacaaaggaagatctgcctgctgagaacggcgaaaccaagaccgaggaatctccagcttctgacgaggccggagagaaggaggccaaaagcgacagcggctctgagacacctggaacaagcgagagcgccaccccggaatccttcgagtctccgaaggtgtcgggcaggactatcagcccaagctctgtgcagaccgaatatacaggagaaagaacatcatctcctccaataacaccacctcccatcttggaagccggggcagatcctccgcaggagggcacacctgtggtaaagatcccagacaaaaatccagcttgtccatgctgcggcaaccgaatgggaaagattacgggactggttgatcatctgaagagaacccatgggaagagaaagatcttattccagtgtgcccgttgtgggagaacgaacccgaaacatcatagtatcgcttgccacatcccaaagtgtaaaggcgctgaggagcccagcatatcgatgggctgggcctgtgaggaatgcaatagaacatttgggacaaaaattggtttgagtcaacataaaaggttggcccatccagttacaaggaatgtggaacgtataacagcaacccgcccgaaagaggaaagtgcaagaggtgcacaccgtcggtgttggtcggaggaggaagtggaattacttaagaagctggaaaaacaatatgaagggaacaaaaacatcaataaattaattgcggaacatcttccattgaaaacaacaaagcagataagtgacaaaagaaggggactggtgagaagtccatctaaaaagaaggtgaaagagctggggataagagaagaacttatgaaagagggagaatatctggaaaggagtggctcccaagaagaggggggactaaggtcccgatatcgaaagtcgattgcagaatggttaagaactcggaaaataaccactctcagggagatctacgagagagtgatgaaagggaaaaaagatcttcccgcgctagtggatgaagctgcccagggccactatgcatgcctgaaaaaagatcttttggaaggggaaagacggcaaattcagaagatccgagaaatccgcagatcccgtccacagaaaccatcaaagcaatggacaataaagagggccagaaaaagggggcagttcctacggttccagcggctattccatctggatagaaggaaactggccggtattatcctggacgatgtagaatccctccaatgtggtattccacttgatgcgatacatgaggtattcaagtcaagatgggaatcacccggaacattcaagggcctgggtacattctgtaccaatggacttgcagataattcagcattccaacctatgattactgtgaaggagattgagaagaatatcagagaaatgaacaaaaatacagcaccaggaccggatggggtcactctgcgggatctcatgaaagccgatccccaatgtgtcaatttaatggaattatttaatttatggttattaaccgggtatataccggatggcattaaaaattgtagaacaatattgatacctaaatcaaatgtaccagaaaagttaaacgatgtgaacaattggagacctataacaattggctcgattatattaagattgttttctaaaatattaacggcacgattaagtaaggcatgcccaattaatacccggcagagggggtttataaaatcgcctggatgctccgaaaatttaaaattattacagcttgtgattcagtatgcaaaaagggagcaccgccctctcggggtagtctttgttgatctggcgaaagcatttgatacggtgagccatgctcatataatagcagtattaaagcaaaaaggtgtggatgaacatataataaatttgattgaaaattcttatcataatattaagacttatattgatatgaaaaaggaaaaatctgactcaattggaattcgaattggagtaaaacaaggcgatccaatgtctccaattttgtttaacttatctgtcgatcctctattatgtaaactggatgagattggtaatgggtttgagtgtcatacgaaagttgtaacatcactggccttcgccgacgatttagtattattaagtgggtcctgggaaggcatgcagaaaaacatagaaattgtcgagaccttttgtgaacttacgggtctcaaaatgcagggggaaaaatgtcacggcttttacatcaagccaacaaaagattcatatactatcaatgattgtcctccttggactattaatggcaccccccttaatatgattgaacccggtagctctgagaaatatttgggtctccgtatagacccatggacaggaatatctaaaccagaactactggagaaagttgatagatggcttgcgaaagtgggaaaggctcctttgaaaccttttcagaaggttgatatcttgaaagggcacttgatcccaagattgatataccttgcggaccaagcaaatttaaaaccaactcatttggaaaatattgatttggccatacgaaacggagtcaaggagtggttgcacttaccagcgtgcacatgtgatgccatcctgtattctaatactcaggatggaggattgggaattaatagattggcagcattaattcctaatgttcaaactcgacgattacatagaattgcccagacaacggatgatgtattgaaagagattgtgaaacaagaaggaattgagagagaatatgagaaattgtgggtaatggctggtggtgataaggaaaagataccatctatatgggacccgaaatcaataatggtaatatcagaaacgggcggggaagaactatcggaatgggagtcccccaatccaaaattgatttatccaaaaccttgtaactggagaaaaagggaatttaacaattgggtcaaattgtcaacacagggtcgaggtattagtaattttgaaaaagataaaataagtaataattggatacaacaatataggggcattcctcaaaggaaagtaattacagcattacaattacgtgctaatatctatccaacaagggaatttttagcgagaggacaatcagaaacatatattaaatcttgtcgtcattgtcaggctgatatagaaacgtgtgcacatataattggctattgtccatctgtacaggatgcaagaattaaaagacataatcaaatttgtaatatattggcagaggaagctaagagtaaagattggcttgtgtatcaagaaccattattaagagatgaatcaaatgaattatataaacctgatttaatttttgttaaggagaatcaggctattgtgacggatgtaactataagatatgaaataactacaaaaacattggaagaagcagcattggcgaaagcaaaaaagtatgctcatttaaaatcacaaattcaggacttgaccaatacttctattataaattttacaggctttcctttgggatcccgtggtaaatggtaccagggtaattacaatatattaaaggatttgggtctctccagttcccgacaagagaaggtcgccagacgattgtcgaattacgctttatttagctcggtggacattgttcacatgtttgcaagtaaagcgaggacagaggtaagatgataataggctgccttctgcggggcttgccttctggccatgcccttcttctctcccttgcacctgtacctcttggtctttgaataaagcctgagtaggaaggaccggtaaaaaaaaaaaaaaaaaaaaaaaaaaaaaaacgttgactaaaaaaaaaaaaaaaaaaaaaaaaaaaaaaaaaaaaaaaaaaaaaaaaaaaaaaaaaaaaaaaaaaaaaa

SEQ ID NO: 1405 - DNA, 5099 bp, synthetic construct
  source 1..5099: mol_type = other DNA
gaaataagagagaaaagaagagtaagaagaaatataagagaattcgccaccatggcccctaagaaaaagcggaaggtgaatatcagcggctctagctgcggcagccccaacagcgccgacaccagcagcgacttcaaggacctgtggaccaagctgaaggaatgccacgaccgggaagtgcagggactccaggtgaaggtcaccaaactcaagcaagaaagaatcctggacgcccagagactggaagaattcttcaccaagaaccagcagctgagagagcagcagaaagtgctgcacgagacaatcaaggttctggaagatagactgcgggccggcctgtgcgacagatgcgccgtgaccgaggaacacatgcgcaaaaagcagcaggagttcgagaacattagacagcaaaatctgaaattgatcacagagctgatgaacgagagaaacacactgcaggaggagaacaagaagctgagcgagcagctgcaacagaagatcgagaatgatcagcaacaccaggccgctgagctggaatgtgaagaggacgtgatccccgacagcccaatcacagctttcagcttttctggcgtgaacagactgaggcggaaggaaaacccccacgtgcggtacatcgagcagacccataccaagctggaacacagcgtgtgtgccaacgagatgagaaaggtgtccaagtcctccacccatccccagcacaaccctaacgaaaatgagatcctggtggctgatacctacgaccagtctcagagccctatggccaaggcccacggcaccagctcttatacccctgataagagctccttcaacctggccaccgtggtggccgagacactgggcctgggcgtgcaggaggaaagcgagacacagggcccaatgagccctctgggagatgagctgtaccactgcctggaaggcaaccacaagaaacagccttttgagtccggctccgagactcctggaacaagcgagagcgctacacctgagggcagccctaagagaaaggtgtccagcgccgagggcgctgccaaggaagagcctaaacggagaagcgccagactgagcgccaagccccccgccaaggtggaagccaagcctaagaaggccgccgctaaggacaagagcagcgataagaaagtccagaccaagggcaagcggggcgccaaaggcaaacaggccgaggtggccaaccaggagacaaaggaagatctgcctgctgagaacggcgaaaccaagaccgaggaatctccagcttctgacgaggccggagagaaggaggccaaaagcgacagcggctctgagacacctggaacaagcgagagcgccaccccggaatcctatgagactccgatgttgcagggcaatgtcatcagcccacgttctgagccggccgaacaggaaggagaaagaccatcttctcctccgataacacctccacctcccattctggaaaccgaggcagacctcccgcaagagggcacacctgtggtgaaggtcccggacgaaaatccagcatgtccatgctgcgggaaccggatgggaaggatctcggggcttattgaccatcttaagaggacccatggaaagagaaagatcttatttcaatgtgcccgatgtggaaaaacaaatttgaaacatcaaagtatcgcttgccacgtcccaaagtgtaaaggcgtagagggattgagtccagtaagagcttggacttgcgaggaatgcaatagatcatttgggacaaaaattggtctgagccagcacaaacggctcgctcacccagttacaaggaatcttgaacgaataacagcttcccgcccaaaagaggagagtgcaagaggtgcacaccgtcggtgttggtcggaagaggaagtggaattacttaaaaagctggaaaaacaatatgaagggaacagaaacatcaataaattaattgcagaacatttaccatcaaaaacggctaaacagataagtgacaaaagaaggggactggtgaaaagtccatctaagaaatctccatctaaaagaaaagggaaaaatctggcgctgcgagaacaacttatggaagaaggggaacatctaccagagagtggctcacaagatggagggggactgcggccccattaccgaaaggttattgctgaatggataagatctcagaaaataacctccctcaaggatgtctttgagagagtgatcaaagggaaagaagatctcccattactagtggacaaagctgcccaggaccactatgcatgcctgaaaatggatttgattgaagagggggatcggcaaagtcaaaagatccgagaaatccgcaggccccgtccacagaaaccatcaaaacaatggactaaaagaagggccagaaaaagggggcagttcctacggttccagcggctgttccacctagatagagggaaacttgccggtattatcctggacgacgtggaatccctccaatgtggtattccacttgacgtggtgcatgaagtattcaagtcaagatgggaatcacccggtacattcaagggcctgggaacattcaatactattggacacgcggacaattccgcatttcaaaccttgattactgcaaaggagatcgtgaaaaacatccgagaaatgaataaaaacgcagcaccaggaccggacgggatttccctgcgggatctcatgaaaaccgacccccattgtactaaattaatggaattatttaatttgtggttgactactggttatataccagagggaataaaaaattgtagaacaatattgataccgaaatcatctgtaccagaaaagttaaatgatgtaaataattggagacctataactattggctcgattgtattaagattgttttcaaaaatcttgactgctcgattaactaaggcatgtcctattaacactcggcaaagagggtttataagatctcctggttgttccgaaaatttgaagttattacaattattaattcgatatgcaaaaagggaacaccttcccctcggggttgtctttgttgacttggcaaaagcatttgatacggtgagccactcccatataattgcagttcttaaacaaaagggagtcgatgagcatataataagactaattgaaaattcatatgaaaatattaatacatatattgatatgaaaaatgttaaatctgaccttattggaatacaaattggtgtgaaacaaggcgatccgatgtctccaattttgtttaacttgtctgtggaccctcttttatgtaaacttgaagaaatgggtaacggatttcaatattatacgaaagatgtaacatcactggccttcgctgacgatttagtattagtaagtgggtcctgggaaggtatgcaaagaaatatagaaatcgtcgagaccttttgtgaacttactggtctcaaaatgcaaggggaaaagtgccatggcttttacatcaagccaacaaaggactcatatacgatcaatgactgtccaccatggactattaacggcacccccctcaatatgattgaacctggtagctctgagaaatacctgggtctatatattgacccatggacaggaatatctaaacccgagctactcgagaaagtcgatagatggttgtcgaaagtgggaaaggcaccattaaaaccttttcagaaggttgacatcttgaaggggcacctgatcccaagattaatttatcttgcggaccaagcaaatttgaaatcaactcacttagagtcccttgacttagccatacgaattggagtcaaggagtggttgcacttaccatcgtgcacctgtgattccatcctttattctaatactcaggatggaggattagggatcagtagattggcggcactgatccccagtgtgcaagctcggagactgcacagaattgcccaaactacggacgatgttttaagaactgtagtcgaaagagaaggaatagaaggagaatttaagaaattatgggtgacggctggtggtgacaaagaaaagattccatctatatgggaccccaaaacaattatggtaatatctgaaacgggcggtgaccaatcactatcggaatgggagactcccaatccaaaaattttctatccaaaaccttgtaactggcgaaaaagggaatttaacaattggactaaattattaactcaaggtcggggtatcgctaactttgaaaaagataaaataagtaacaattggattatacattacaggggcattcctcaaaggaaattgattactgcattacaactgcgtgctaatatttatccaacaagggaatttttatctagaggacggtcagaaacttatattaaatcttgccgtcactgtcaggctgacaatgaaacttgttcacatataattggctattgtccatctgtacaagacgcaagaatcaaaaggcataatcaaatttgtcatatattggcagaagaagccaaaagtaaggattggctggtttaccaagaaccgttattaagggatcagcaaaatgaattatataaacctgatttgatttttgttaaagggaatcaggcaatagttaccgatataacaattagatatgaaacatctttaacaactttggaggaggcagcattggaaaaagcaaagaagtatgcacatttagttactcaaattcaggacctgacgaatacatctgttataaattttacaggctttcctttgggatctcgtggtaaatggtaccagaacaacttcaaaatattaaaggaattgggtctctccagctcccgacaagaaaaggtcgccagacgattgtcaaactatgctttatttagctcggtggacattgttcacatgtttgctagtaaagcgaggacagaggtaagatgataataggctgccttctgcggggcttgccttctggccatgcccttcttctctcccttgcacctgtacctcttggtctttgaataaagcctgagtaggaaggaccggtaaaaaaaaaaaaaaaaaaaaaaaaaaaaaaacgttgactaaaaaaaaaaaaaaaaaaaaaaaaaaaaaaaaaaaaaaaaaaaaaaaaaaaaaaaaaaaaaaaaaaaaaa

SEQ ID NO: 1406 - DNA, 5489 bp, synthetic construct
  source 1..5489: mol_type = other DNA
gaaataagagagaaaagaagagtaagaagaaatataagagaattcgccaccatggcccctaagaaaaagcggaaggtgaatatcagcggctctagctgcggcagccccaacagcgccgacaccagcagcgacttcaaggacctgtggaccaagctgaaggaatgccacgaccgggaagtgcagggactccaggtgaaggtcaccaaactcaagcaagaaagaatcctggacgcccagagactggaagaattcttcaccaagaaccagcagctgagagagcagcagaaagtgctgcacgagacaatcaaggttctggaagatagactgcgggccggcctgtgcgacagatgcgccgtgaccgaggaacacatgcgcaaaaagcagcaggagttcgagaacattagacagcaaaatctgaaattgatcacagagctgatgaacgagagaaacacactgcaggaggagaacaagaagctgagcgagcagctgcaacagaagatcgagaatgatcagcaacaccaggccgctgagctggaatgtgaagaggacgtgatccccgacagcccaatcacagctttcagcttttctggcgtgaacagactgaggcggaaggaaaacccccacgtgcggtacatcgagcagacccataccaagctggaacacagcgtgtgtgccaacgagatgagaaaggtgtccaagtcctccacccatccccagcacaaccctaacgaaaatgagatcctggtggctgatacctacgaccagtctcagagccctatggccaaggcccacggcaccagctcttatacccctgataagagctccttcaacctggccaccgtggtggccgagacactgggcctgggcgtgcaggaggaaagcgagacacagggcccaatgagccctctgggagatgagctgtaccactgcctggaaggcaaccacaagaaacagccttttgagtccggctccgagactcctggaacaagcgagagcgctacacctgagggcagccctaagagaaaggtgtccagcgccgagggcgctgccaaggaagagcctaaacggagaagcgccagactgagcgccaagccccccgccaaggtggaagccaagcctaagaaggccgccgctaaggacaagagcagcgataagaaagtccagaccaagggcaagcggggcgccaaaggcaaacaggccgaggtggccaaccaggagacaaaggaagatctgcctgctgagaacggcgaaaccaagaccgaggaatctccagcttctgacgaggccggagagaaggaggccaaaagcgacagcggctctgagacacctggaacaagcgagagcgccaccccggaatcctatgaacagccgactccgtttcaacctgaaggggagaaaatctgccccccaagagactgtgaagcagttttggtcggggaaggggaggggagcagtgaggaggtcacaccagaaccatcgccccctgaaccagagacaacctccgtggcagcatctccaactctgcctgtaaccaacgtggaacagtcgtcggagagccccatcacagtaattgtgccggataaaaatccttcatgtccctgctgtggtattcgagcgagcggggtatcgggtttgattgagcatttgcgggaggttcacaggaggagggaggtttgctttcggtgttctaaatgtgagaaagaaaatactaattaccatagcattatttgtcattttaaaaaatgcaagggtaaagaggaaacatctgcgccagccggggaatggtcctgtgaggtatgtggacgagattttaatactaaaattggcttgggacaacataaaagattggcacacccagctgttagaaatcaggaaagggtcgctgcttcccacccaaaagaaaattctaaacgaggagctcataaaaaatgttggactgaagaagaggaaaaattattaatagaattaatagctcagttcgaggggcatgcaaatattaataaattaattgcggaacatattacaaccaaaacagctaaacaaattagtgaaaaaaggagactgctctccaaaaaactaatggtagtggaggcagaatgtgaacctgggccaagtcatcggaccaggagagcagctgcagagataaggaagggagctgagatgaatcaccataatgaggatgctgctgaggacaatggagctgggaggggtcccctgaccaggagagcagctgcccggggggaaacaaaagaagagataagccagtttcctgataaggccaacgatcagcaggaggccagtagcagtgggaggggcccagtgaccaggagagcagctgcaggaaagaaaacaaaaaagagtattgatcaccctactgataaggccaacggccagcaggtagccatcagcactagaaggggttgtttgaatagaggagtgactgccggggtagaaacaatagagggctcgagtcacctccctgataaggacagtgacggacagggcacccccagccgggagaaggagggacaattacaagatcactatcaagaagtcatcggagcctggttatcagatgggaggatcaatacctttccagaggcattcaaagggttgttagggaaacgagagatacaggcaacgatcaatcagtcaatactggattgttttgggggcattgattcaaaaagccaggtgaacaaaatgactcgagataagaaagataaaaagccagggagacctccccagaagtggatgaaaaagagagccatcaaaagaggtagctatcttcgcttccaacgtcttttccatcttgataggggaaaattagccaagattgttttggacaatatcgaatgtttgacgtgcgatatcccacccagtgaaatttattccgtttttaaggccaggtgggaaacagcaggcaaatttaccagtcttggggactttaaatttactgaaaaggtggacaatagtgcattcagggatttaattacagctaaggaagtagaaaagaacatgcaagaaatgagcaaaggctcggctcctggtccagatggaattactctgagagacattcaaaaaatggatcctaagctctccaggaccacagagattttcaacctttggttggctgcaggcaaaattccggatggggtgagggaatgcaggactgtcttaattccaaaatcaacaaaaccagaacgcttaaaggacattaacaattggagaccaattacaatcggatccaccttgcttagattattttccaggattttaacagccagactaagcaaggcatgccccctcaacccaagacagaagggcttcattcaagcagccggatgctcagaaaacctgcaactcctgcaatccataatttggtcagcaaaacgggaacacaggcccctgggtgtcgtatttgtggacatcgcaaaggcttttgacacagtaagccacaagcacattctacacgttctgcagcggaggggagtggatcctcacatcatcggcctggtgagtgatatgtatgaaaacattcatacttctatcaccacgaagaaagcacgtacggatcgcatccagatccgagttggagttaaacagggcgacccgatgtctccccttctattcaatctggcaatggaccccctgctgtgcgaactggaaacgaacggcaggggacaccaccgcggcacaaattgcatcacagccatggcgtttgctgacgacctggtcctactgagtgactcctgggaggacatgaagagcaacatcaagatattggaggccttctgcgatctcaccggcctcaaaacgcagggagagaagtgccacggcttttacatcaagccgacgaaggactcgtacacggtcaacgactgtgctgcttggactataaacggcactcccctgaacatgattcttcccggtgagtccgagaaatacctgggcctgcagatagacccatggactggattggcaaaatcggacctctctacaaaactcgactcatggctcgagcaaatcgatagagttccactcaaaccgctgcagaaaattgaactcctgaaaacatacaccatccctcggttgacatacgtggctgaccattcggacttgaaagttagtttcctggagacattggatcagaagattcggacaatagttaaagattggctacacctgcctgcatgtacctgcgatgccatcctatactctagcacgaaggatggcggcctgggcatcactaaattagcaaagctgattcctagcgtacaggctaggagactacacagaatagcccaatcatcggacgaaaccatgaagcaatttctccacagggacaagatggaagcaatgtaccagaaactgtgggttcaagcgggaggagatagggagaaagttcctgcaatctgggaagctagacctacgatcgagtcacctaatttacaagaggtaggggtttcttctgagtgggaagcaccgactctgaaaaacaaatttcccaagccgtgcaattggagaaagatagaatttgaaaaatggaccaatttgatatctcagggacggggaatagggaatttcaagggggaccaaataagtaacaattggctgcaacactataggaacatacctcacaggaaactccttactgctgtacagctgagggccaatgtatatccaactagggaatttttagccaggggtaggcaggataaatacatcagaacgtgcagacattgcgacgcggccaacgaaacgtgcgcacatattattggcaattgccccataactcaggacgcgagaatcaagaggcacaactatatttgtcaagtgttgtcggagaaagcaatagggaaggactggatagtatataaagaaccgcacatcagggactccaacaaagaactttataaaccggacctgatatttgtgaaagacggccgagcgtacgtcgtggatgtgaccgtgcgatacgaatcggacgagacctctttggagatggcggccacggagaaagtggacaagtacaaacacctgaccaaagagatacgaacgatcaccaacgcgaaagacattgtttttatgggctttcccctcggagctcgggggaaatggtaccaagggaactttgaacttttgaaagcccttggactctccaaatcggatcgagaaaagactgcccggtccttgtcatccatagcactcatgtcatctgtggacatcgtccacatatttgccagcaaatccaggacttgcactacactgtgataataggctgccttctgcggggcttgccttctggccatgcccttcttctctcccttgcacctgtacctcttggtctttgaataaagcctgagtaggaaggaccggtaaaaaaaaaaaaaaaaaaaaaaaaaaaaaaacgttgactaaaaaaaaaaaaaaaaaaaaaaaaaaaaaaaaaaaaaaaaaaaaaaaaaaaaaaaaaaaaaaaaaaaaaa

SEQ ID NO: 1407 - DNA, 5111 bp, synthetic construct
  source 1..5111: mol_type = other DNA
gaaataagagagaaaagaagagtaagaagaaatataagagaattcgccaccatggcccctaagaaaaagcggaaggtgaatatcagcggctctagctgcggcagccccaacagcgccgacaccagcagcgacttcaaggacctgtggaccaagctgaaggaatgccacgaccgggaagtgcagggactccaggtgaaggtcaccaaactcaagcaagaaagaatcctggacgcccagagactggaagaattcttcaccaagaaccagcagctgagagagcagcagaaagtgctgcacgagacaatcaaggttctggaagatagactgcgggccggcctgtgcgacagatgcgccgtgaccgaggaacacatgcgcaaaaagcagcaggagttcgagaacattagacagcaaaatctgaaattgatcacagagctgatgaacgagagaaacacactgcaggaggagaacaagaagctgagcgagcagctgcaacagaagatcgagaatgatcagcaacaccaggccgctgagctggaatgtgaagaggacgtgatccccgacagcccaatcacagctttcagcttttctggcgtgaacagactgaggcggaaggaaaacccccacgtgcggtacatcgagcagacccataccaagctggaacacagcgtgtgtgccaacgagatgagaaaggtgtccaagtcctccacccatccccagcacaaccctaacgaaaatgagatcctggtggctgatacctacgaccagtctcagagccctatggccaaggcccacggcaccagctcttatacccctgataagagctccttcaacctggccaccgtggtggccgagacactgggcctgggcgtgcaggaggaaagcgagacacagggcccaatgagccctctgggagatgagctgtaccactgcctggaaggcaaccacaagaaacagccttttgagtccggctccgagactcctggaacaagcgagagcgctacacctgagggcagccctaagagaaaggtgtccagcgccgagggcgctgccaaggaagagcctaaacggagaagcgccagactgagcgccaagccccccgccaaggtggaagccaagcctaagaaggccgccgctaaggacaagagcagcgataagaaagtccagaccaagggcaagcggggcgccaaaggcaaacaggccgaggtggccaaccaggagacaaaggaagatctgcctgctgagaacggcgaaaccaagaccgaggaatctccagcttctgacgaggccggagagaaggaggccaaaagcgacagcggctctgagacacctggaacaagcgagagcgccaccccggaatcctccagccttctggctactttaccggaggtatatgaaactccgagggtgatgggcaaagtcaccagcccgagttctgtgctgaccgaacatgagggagatagaacatcttctcccccaagaacaccacctcctattcttgagaccggggcagaccttccacaggagggcacacctgtggtaaaggtcccggatgataatccagcgtgtccatgctgcggtaatcgaataggaaggatttcggggcttatcgatcacttaaagagaacccatggaaagaaaaagatcctctttcaatgtgccaaatgtgggagaacaaatctgaaacatcacagtatcgcttgtcacgttaaaaagtgcaaaggcgccaaggggaccagcccattaaggggctgggcctgcgaggaatgcaatagaacatttgggactaaaattggcttaagtcagcataagcggcttgctcacccagttactaggaatatagagcgaataacagcttcccgcccgaaagaggaaagtgcacgaggtgcacaccgtcggtgttggtctgaagaggaagtggagttgctcaagaagttggaaaaacagtatgaagggaataagaatataaacaaactaattgcagaacaccttccatcaaaaacagcaaagcagataagtgacaaaagaaggggactgataaaaagtccatcaaagaaaaatgggaaagatctgacgttgcgggaacaactcacggaggaaggagaacatctaattgagagtggctcccaagaaggtgggggactacggtcccactaccgtaagtcgattgcagaatggataagatctcagaaaataacgtcactcaggaaaatctttgagagagtgattgaagggaaagaagatctcccatccatagtcgatgaagctgcccaggattgctatgcatgcctgaaaagagatctcactgaaggggaaggtcgacaaattcaaaagatccgagagatccgcaggacccacccacaaaaaccatcaaaacaatggacaaaaaaaagggccagaaaacgagggcagttcctacggttccagcggctgttctacttggatagagggaaattggccggtataatcctggacgacgtggaatccctcaaatgtggtattccacttgacgtggtgcatgaagtattcaagtcaagatgggaatcacccggaacattcaagggcctgggtacttttaagaccattggtcaggcagacaattctgctttccaagctatgattaccatgaaggagattaagaaaaacatccgagaaatgaataaaaatgcggctccagggccggatgggatttccttgcgggacctcatgaagattgatccccagtgtgcgaaattaatggaattatttaatttgtggttgttaaccgggtatataccggatggggttaaaaattgtagaacaatattgataccaaaatcaactgtaccagaaaagttaaatgatgtgaataattggagacctataacgattggctcgattatattgagactattttcaaaaatattaacggcacgattaactaaggcatgccctattaacatacgacagaggggttttataaagtcatctggttgttctgaaaatctgaaattattacaactgataattagatatgcaaaaagagaacacaggccccttggggtggtctttgtcgacctggctaaagcatttgatacggtgagccactctcacatactgtcggtattaaaacaaaagggtgtggatgaacatataataaaactaattgaaaactcgtattataacatcaaaacctatattgatttgaaaaatgaaaaatctgactctattggaattcgaattggcgtaaaacaaggcgatccaatgtctccaattttgtttaacttatctgtcgatcctctattatgtaaacttgaagaaatgggtaatggatttcaatgtcatagccaaaatgtaacagcactggccttcgccgacgatttagtattactaagtgggtcctgggagggcatgcaaaataatataacaattgtagagaccttttgtgagctcactggtctcaagatgcagggggaaaagtgccacggcttttatatcaagccaacaaaagattcctatacgatcaatgactgtcccgtgtggactatcaatggcaccccccttaatatgattgaaccaggtagttctgagaaatacttgggtctttatgtcgacccgtggataggaatatctaaaccagaactactggagaaagttgacagatggcttgtgaaagtgggcaaggcaccattaaaaccttttcagaaagtcgacatcttgaaaggatacctgatcccgagagtaatatacctcgcggatcaagcaaatttaaaaccaacatatttagaatccattgacttggctatacgaactggagtcaaggaatggttgcacctaccagcgtgcacgtgtgacgccatcctttattcgaatactcaggatggagggttaggaatcagcagattggcagcactgattccgagtgtgcaggttcggagactgcacagaattgcccaaacctctgacgaagttttaaaaactatcgtcaaaagagaaggaatagaaagagaatttgagaaattatggttgatggccggtggtgataaggaaaggataccatctatatgggacccaaaaactgttatgataatatcggaaacgggcggtgaccaaatattgtcggaatgggagattcccaatccaaaactaatttatccaaaaccctgtaactggagaaaaagggaatttaataattggactaaattactgagccaaggccgaggtattgtaaattttgaaaaagataaaataagtaataattggttaatacactataggggcattcctcaaaggaaattaattacagcattacaattacgggcgaatatatacccgacgagggaatttttagctagaggacggtcggaaacttatattaaatcctgccgtcactgtcaggccgataatgagacttgcgcacatataattggctactgtccatctgtacaagatgcgagaattaaaagacataatcaaatctgtcatatattggcagaagaagctaagagaaaagattggttggtatatcaagaaccattattaagagatcaacaaaatgaattatataaaccggatttaatttttgttaaagggggccaagcaatagtaacggatataacaataagatatgaaacaactattacaacgttggaagaggctgccttagaaaaagcaaagaaatatgtacatctagaatcgcaagtccaggatctgacaaatacatctgttataaattttacaggctttcctttgggatctcgtggcaaatggtaccaaggtaactacaaaatactaaatgaactgggtctctccaactcccgacaggagaaggtcgccagacgattatcaaactatgctttattcagctcggtggatatcattcacatgtttgcgagtaaagcgagaacggaggtaagatgataataggctgccttctgcggggcttgccttctggccatgcccttcttctctcccttgcacctgtacctcttggtctttgaataaagcctgagtaggaaggaccggtaaaaaaaaaaaaaaaaaaaaaaaaaaaaaaacgttgactaaaaaaaaaaaaaaaaaaaaaaaaaaaaaaaaaaaaaaaaaaaaaaaaaaaaaaaaaaaaaaaaaaaaaa

SEQ ID NO: 1408 - DNA, 5162 bp, synthetic construct
  source 1..5162: mol_type = other DNA
gaaataagagagaaaagaagagtaagaagaaatataagagaattcgccaccatggcccctaagaaaaagcggaaggtgaatatcagcggctctagctgcggcagccccaacagcgccgacaccagcagcgacttcaaggacctgtggaccaagctgaaggaatgccacgaccgggaagtgcagggactccaggtgaaggtcaccaaactcaagcaagaaagaatcctggacgcccagagactggaagaattcttcaccaagaaccagcagctgagagagcagcagaaagtgctgcacgagacaatcaaggttctggaagatagactgcgggccggcctgtgcgacagatgcgccgtgaccgaggaacacatgcgcaaaaagcagcaggagttcgagaacattagacagcaaaatctgaaattgatcacagagctgatgaacgagagaaacacactgcaggaggagaacaagaagctgagcgagcagctgcaacagaagatcgagaatgatcagcaacaccaggccgctgagctggaatgtgaagaggacgtgatccccgacagcccaatcacagctttcagcttttctggcgtgaacagactgaggcggaaggaaaacccccacgtgcggtacatcgagcagacccataccaagctggaacacagcgtgtgtgccaacgagatgagaaaggtgtccaagtcctccacccatccccagcacaaccctaacgaaaatgagatcctggtggctgatacctacgaccagtctcagagccctatggccaaggcccacggcaccagctcttatacccctgataagagctccttcaacctggccaccgtggtggccgagacactgggcctgggcgtgcaggaggaaagcgagacacagggcccaatgagccctctgggagatgagctgtaccactgcctggaaggcaaccacaagaaacagccttttgagtccggctccgagactcctggaacaagcgagagcgctacacctgagggcagccctaagagaaaggtgtccagcgccgagggcgctgccaaggaagagcctaaacggagaagcgccagactgagcgccaagccccccgccaaggtggaagccaagcctaagaaggccgccgctaaggacaagagcagcgataagaaagtccagaccaagggcaagcggggcgccaaaggcaaacaggccgaggtggccaaccaggagacaaaggaagatctgcctgctgagaacggcgaaaccaagaccgaggaatctccagcttctgacgaggccggagagaaggaggccaaaagcgacagcggctctgagacacctggaacaagcgagagcgccaccccggaatccactgactacctggctttacttcctgaggtgtatgagatatctaactctttgagtctcagggacgagaacacctgtccaactccggtggagatcgagaacgaagaggaggagtcctcacctctcggggctacggccaggacctctccattgccatcgactccggtctcgcgatcccgtgacgatctcccgacggagagtactcctgtggtgaagatcccggacaggaatacatcatgtccgtgttgcggtaatgtgaccggtaaattgtcgggtttaattgaacatctgaaaagagcacatgggaagaaaaagatcttattccaatgcgctcggtgtgggagaactgatgtaagacaccatagtattgcctgtcattttaaaaaatgtaaggggcctgtggaagcctctcccgagaggagttggaagtgtgaggtctgtgagaaaacatttgaaacaaaaatcggcctggggcagcataagcgcttggtccatccagtcacaagaaatctcgagcggattgccactacacgccccaaggcaggtacaatgaggggggcacatcgtcggtgctggaccgaggatgagattgaactattgaggaagttggataaacaatatgaggggcagaaaaacatcaacaagttgattgcggagcatattccgaccaagacaacgaagcagataagcgataaaagacgggaccttcataagagcccggtgaagaagggaaaagaccatgggcggaagaaacatctagaattggaaggggaacaccttgccgaaggagaacatctcgtgtgcattggatcggagttggaggagggactgcggtcccgataccggaaaacaatcgctgagtgggttacatctggaaaattgtccattctccatggaatgtttgagcaggtgatcgaaggggaagaagatccagcaatagttgctgacagggcaatgaaagactgtttcgcatgccttgcctctaagtccgtcgagttgaaagctggccagggtcgaccgtgccagagggcccaaactgctcggccttcggaaccaccaaaggggtggatgaagaagagagctgtgaaacgggggcggttcctacggttccagcggctgttctacctggatagggggaaactggccggtattatcctggacgacgtggaatccctgaagtgtggtatcccacaagacgagatacacgacgtgttcaagtcgagatgggaatcaccgggaacattcaagggcctgggtgcgttccggtccaagggccaggcggacaactcggcattcgaagccatgatcacggcaagagaaatctctaagaacatcacagagatgaataagaacagtgcgccaggaccggacagactaagtctgcgggatatcattaagatagacccccattgtgtccagttaatggaagtattcaatctatggctggtgactggcatcgtaccggacgtggtgaaagaatgtcggactgtgttaatatcaaagtcatctctgccggagcgccaaatggacatcaataactggcgaccaattaccatcggatcgatcatcttgaggctgttctcaaggatcctgacggcaaggctggcgaaggcatgccctattaacccacgacaaaagggctttattagatcagcgggatgtgcggaaaacctgaagctgttacaactattgataaagaatgcaaaaaaggaacatcgacccttgggcgttgtctttattgacctggccaaagccttcgacacagtaagtcaccatcacctgattgcagtgcttaagcaaaagggtgtggaccatcacattatcaccctgatttcaaacatgtatcaaaataccagaactcgcattaccatgaagaatgaacagtcggatcccattgggattcaaattggtgttaaacaaggcgatccaatgtcacctttactatttaacttatctgtggaccctctgttgtgtaagttagaggaagaagggaatgggtaccatcacggctcgaagtgtgtaacatctatggcttttgcagacgatctggtgttgctaagtggatcatgggaaggaatgcaaagtaatattaaaatcctagaggccttttgcgatctgaccggcctcaggactcaaggggagaaatgccatggcttttatatacaacctactaaggactcgtataccatcaatgactgtcccccatggcagattaacgataccccactaaatatgatcgaacccggtagttcggaaaaatacctgggactgagaatagacccatggactggaatatcgaaacccgaactactcatgaaaataagagattggctacaacggattggagaagcgccactgaaaccgtttcagaaagttgacatcttgaagggatatactatcccgcgactgatttacttagcagaccaggctgatgtaaaaagcatgtacttagaagaacttgacctggcaattcgaactacggtcaaggagtggttacatctacctcctagtacctgcgatgccatcctgtattccagcacacgcgatggaggcctaggcatcactagactctcgggtctgatccccagtatacaagctcgaaggctgcacaggattgcgcagtctccggacgatgtgataagatcaatagtgaaacaagaggggatcgataaagagtttgaaaaattgtggttgatagctggaggtgataaaagtaaaataccatctatttgggacccgagtgcgattagggtaacatctgaagaattgggcgaggaggaacttgtttcagaatgggaaataccaactcccaaaaccatctttcctaaaccttgtgactggcgtaaacaggaatttaaaaactggaccaagctacagtcccagggccgtggtattgccaactttgagaaggacaaaatcagtaataattggctcgaacgatacagaggcattcctcaccgaaaactcctcacggcactacaattgagagctaacgtgtaccccactagggaattcctggcaagggggagacaggagtcgcatataaaatcctgtcgacactgtcaagcagaaaacgaatcaagcgctcatataattgggtactgccccgcagtgcaagatgccagaattaaaagacacaaccaattgtgtgatttacttacagttgaagttaaaaggaaggattggatcgtatttcatgagcccatactaaaagatgaacaaaatgagatttacaagcctgatcttgtatttgtaaaaggagaccaggcgatagttattgatgtaacaattcggtatgaaagtaaattgtcatcattggcagacgcggcggcagaaaaagttaaaaaatattgccatctcaaaagtcaaattcaggaattgacgaatgctaaaaatattacatttaagggattccctgtgggcgcacgaggtaaatggtactctggcaattacgaagtgttgaaagcattaggaatctcaaactcccgacaagacaaaatagcacgatgtatgtcaagaaaagctttatttacctctgttgatatcatacatatgtttgtgagtcattcgagatctattgtaagaacctgataataggctgccttctgcggggcttgccttctggccatgcccttcttctctcccttgcacctgtacctcttggtctttgaataaagcctgagtaggaaggaccggtaaaaaaaaaaaaaaaaaaaaaaaaaaaaaaacgttgactaaaaaaaaaaaaaaaaaaaaaaaaaaaaaaaaaaaaaaaaaaaaaaaaaaaaaaaaaaaaaaaaaaaaaa

SEQ ID NO: 1409 - DNA, 5078 bp, synthetic construct
  source 1..5078: mol_type = other DNA
gaaataagagagaaaagaagagtaagaagaaatataagagaattcgccaccatggcccctaagaaaaagcggaaggtgaatatcagcggctctagctgcggcagccccaacagcgccgacaccagcagcgacttcaaggacctgtggaccaagctgaaggaatgccacgaccgggaagtgcagggactccaggtgaaggtcaccaaactcaagcaagaaagaatcctggacgcccagagactggaagaattcttcaccaagaaccagcagctgagagagcagcagaaagtgctgcacgagacaatcaaggttctggaagatagactgcgggccggcctgtgcgacagatgcgccgtgaccgaggaacacatgcgcaaaaagcagcaggagttcgagaacattagacagcaaaatctgaaattgatcacagagctgatgaacgagagaaacacactgcaggaggagaacaagaagctgagcgagcagctgcaacagaagatcgagaatgatcagcaacaccaggccgctgagctggaatgtgaagaggacgtgatccccgacagcccaatcacagctttcagcttttctggcgtgaacagactgaggcggaaggaaaacccccacgtgcggtacatcgagcagacccataccaagctggaacacagcgtgtgtgccaacgagatgagaaaggtgtccaagtcctccacccatccccagcacaaccctaacgaaaatgagatcctggtggctgatacctacgaccagtctcagagccctatggccaaggcccacggcaccagctcttatacccctgataagagctccttcaacctggccaccgtggtggccgagacactgggcctgggcgtgcaggaggaaagcgagacacagggcccaatgagccctctgggagatgagctgtaccactgcctggaaggcaaccacaagaaacagccttttgagtccggctccgagactcctggaacaagcgagagcgctacacctgagggcagccctaagagaaaggtgtccagcgccgagggcgctgccaaggaagagcctaaacggagaagcgccagactgagcgccaagccccccgccaaggtggaagccaagcctaagaaggccgccgctaaggacaagagcagcgataagaaagtccagaccaagggcaagcggggcgccaaaggcaaacaggccgaggtggccaaccaggagacaaaggaagatctgcctgctgagaacggcgaaaccaagaccgaggaatctccagcttctgacgaggccggagagaaggaggccaaaagcgacagcggctctgagacacctggaacaagcgagagcgccaccccggaatccttcgagtctccgaaggtgtcgggcaggactatcagcccaagctctgtgcagaccgaatatacaggagaaagaacatcatctcctccaataacaccacctcccatcttggaagccggggcagatcctccgcaggagggcacacctgtggtaaagatcccagacaaaaatccagcttgtccatgctgcggcaaccgaatgggaaagattacgggactggttgatcatctgaagagaacccatgggaagagaaagatcttattccagtgtgcccgttgtgggagaacgaacccgaaacatcatagtatcgcttgccacatcaaaaagtgtaaaggcgctgaggagcccagcatatcgatgggctgggcctgtgaggaatgcaatagaacatttgggacaaaaattggtttgagtcaacataaaaggttggcccatccagttacaaggaatgtggaacgtataacagcaacccgcccgaaagaggaaagtgcaagaggtgcacaccgtcggtgttggtcggaggaggaagtggaattacttaagaagctggaaaaacaatatgaagggaacaaaaacatcaataaattaattgcggaacatcttccattgaaaacaacaaagcagataagtgacaaaagaaggggactggtgagaagtccatctaaaaagaaggtgaaagagctggggataagagaagaacttatgaaagagggagaatatctggaaaggagtggctcccaagaagaggggggactaaggtcccgatatcgaaagtcgattgcagaatggttaagaactcggaaaataaccactctcagggagatctacgagagagtgatgaaagggaaaaaagatcttcccgcgctagtggatgaagctgcccagggccactatgcatgcctgaaaaaagatcttttggaaggggaaagacggcaaattcagaagatccgagaaatccgcagatcccgtccacagaaaccatcaaagcaatggacaataaagagggccagaaaaagggggcagttcctacggttccagcggctattccatctggatagaaggaaactggccggtattatcctggacgatgtagaatccctccaatgtggtattccacttgatgcgatacatgaggtattcaagtcaagatgggaatcacccggaacattcaagggcctgggtacattctgtaccaatggacttgcagataattcagcattccaacctatgattactgtgaaggagattgagaagaatatcagagaaatgaacaaaaatacagcaccaggaccggatggggtcactctgcgggatctcatgaaagccgatccccaatgtgtcaatttaatggaattatttaatttatggttattaaccgggtatataccggatggcattaaaaattgtagaacaatattgatacctaaatcaaatgtaccagaaaagttaaacgatgtgaacaattggagacctataacaattggctcgattatattaagattgttttctaaaatattaacggcacgattaagtaaggcatgcccaattaatacccggcagagggggtttataaaatcgcctggatgctccgaaaatttaaaattattacagcttgtgattcagtatgcaaaaagggagcaccgccctctcggggtagtctttgttgatctggcgaaagcatttgatacggtgagccatgctcatataatagcagtattaaagcaaaaaggtgtggatgaacatataataaatttgattgaaaattcttatcataatattaagacttatattgatatgaaaaaggaaaaatctgactcaattggaattcgaattggagtaaaacaaggcgatccaatgtctccaattttgtttaacttatctgtcgatcctctattatgtaaactggatgagattggtaatgggtttgagtgtcatacgaaagttgtaacatcactggccttcgccgacgatttagtattattaagtgggtcctgggaaggcatgcagaaaaacatagaaattgtcgagaccttttgtgaacttacgggtctcaaaatgcagggggaaaaatgtcacggcttttacatcaagccaacaaaagattcatatactatcaatgattgtcctccttggactattaatggcaccccccttaatatgattgaacccggtagctctgagaaatatttgggtctccgtatagacccatggacaggaatatctaaaccagaactactggagaaagttgatagatggcttgcgaaagtgggaaaggctcctttgaaaccttttcagaaggttgatatcttgaaagggcacttgatcccaagattgatataccttgcggaccaagcaaatttaaaaccaactcatttggaaaatattgatttggccatacgaaacggagtcaaggagtggttgcacttaccagcgtgcacatgtgatgccatcctgtattctaatactcaggatggaggattgggaattaatagattggcagcattaattcctaatgttcaaactcgacgattacatagaattgcccagacaacggatgatgtattgaaagagattgtgaaacaagaaggaattgagagagaatatgagaaattgtgggtaatggctggtggtgataaggaaaagataccatctatatgggacccgaaatcaataatggtaatatcagaaacgggcggggaagaactatcggaatgggagtcccccaatccaaaattgatttatccaaaaccttgtaactggagaaaaagggaatttaacaattgggtcaaattgtcaacacagggtcgaggtattagtaattttgaaaaagataaaataagtaataattggatacaacaatataggggcattcctcaaaggaaagtaattacagcattacaattacgtgctaatatctatccaacaagggaatttttagcgagaggacaatcagaaacatatattaaatcttgtcgtcattgtcaggctgataacgaaacgtgtgcacatataattggctattgtccatctgtacaggatgcaagaattaaaagacataatcaaatttgtaatatattggcagaggaagctaagagtaaagattggcttgtgtatcaagaaccattattaagagatgaatcaaatgaattatataaacctgatttaatttttgttaaggagggccaggctattgtgacggatgtaactataagatatgaaataactacaaaaacattggaagaagcagcattggcgaaagcaaaaaagtatgctcatttaaaatcacaaattcaggacttgaccaatacttctattataaattttacaggctttcctttgggatcccgtggtaaatggtaccagggtaattacaatatattaaaggatttgggtctctccagttcccgacaagagaaggtcgccagacgattgtcgaattacgctttatttagctcggtggacattgttcacatgtttgcaagtaaagcgaggacagaggtaagatgataataggctgccttctgcggggcttgccttctggccatgcccttcttctctcccttgcacctgtacctcttggtctttgaataaagcctgagtaggaaggaccggtaaaaaaaaaaaaaaaaaaaaaaaaaaaaaaacgttgactaaaaaaaaaaaaaaaaaaaaaaaaaaaaaaaaaaaaaaaaaaaaaaaaaaaaaaaaaaaaaaaaaaaaaa

SEQ ID NO: 1410 - DNA, 5099 bp, synthetic construct
  source 1..5099: mol_type = other DNA
gaaataagagagaaaagaagagtaagaagaaatataagagaattcgccaccatggcccctaagaaaaagcggaaggtgaatatcagcggctctagctgcggcagccccaacagcgccgacaccagcagcgacttcaaggacctgtggaccaagctgaaggaatgccacgaccgggaagtgcagggactccaggtgaaggtcaccaaactcaagcaagaaagaatcctggacgcccagagactggaagaattcttcaccaagaaccagcagctgagagagcagcagaaagtgctgcacgagacaatcaaggttctggaagatagactgcgggccggcctgtgcgacagatgcgccgtgaccgaggaacacatgcgcaaaaagcagcaggagttcgagaacattagacagcaaaatctgaaattgatcacagagctgatgaacgagagaaacacactgcaggaggagaacaagaagctgagcgagcagctgcaacagaagatcgagaatgatcagcaacaccaggccgctgagctggaatgtgaagaggacgtgatccccgacagcccaatcacagctttcagcttttctggcgtgaacagactgaggcggaaggaaaacccccacgtgcggtacatcgagcagacccataccaagctggaacacagcgtgtgtgccaacgagatgagaaaggtgtccaagtcctccacccatccccagcacaaccctaacgaaaatgagatcctggtggctgatacctacgaccagtctcagagccctatggccaaggcccacggcaccagctcttatacccctgataagagctccttcaacctggccaccgtggtggccgagacactgggcctgggcgtgcaggaggaaagcgagacacagggcccaatgagccctctgggagatgagctgtaccactgcctggaaggcaaccacaagaaacagccttttgagtccggctccgagactcctggaacaagcgagagcgctacacctgagggcagccctaagagaaaggtgtccagcgccgagggcgctgccaaggaagagcctaaacggagaagcgccagactgagcgccaagccccccgccaaggtggaagccaagcctaagaaggccgccgctaaggacaagagcagcgataagaaagtccagaccaagggcaagcggggcgccaaaggcaaacaggccgaggtggccaaccaggagacaaaggaagatctgcctgctgagaacggcgaaaccaagaccgaggaatctccagcttctgacgaggccggagagaaggaggccaaaagcgacagcggctctgagacacctggaacaagcgagagcgccaccccggaatcctatgagactccgatgttgcagggcaatgtcatcagcccacgttctgagccggccgaacaggaaggagaaagaccatcttctcctccgataacacctccacctcccattctggaaaccgaggcagacctcccgcaagagggcacacctgtggtgaaggtcccggacgaaaatccagcatgtccatgctgcgggaaccggatgggaaggatctcggggcttattgaccatcttaagaggacccatggaaagagaaagatcttatttcaatgtgcccgatgtggaaaaacaaatttgaaacatcaaagtatcgcttgccacgtcaaaaagtgtaaaggcgtagagggattgagtccagtaagagcttggacttgcgaggaatgcaatagatcatttgggacaaaaattggtctgagccagcacaaacggctcgctcacccagttacaaggaatcttgaacgaataacagcttcccgcccaaaagaggagagtgcaagaggtgcacaccgtcggtgttggtcggaagaggaagtggaattacttaaaaagctggaaaaacaatatgaagggaacagaaacatcaataaattaattgcagaacatttaccatcaaaaacggctaaacagataagtgacaaaagaaggggactggtgaaaagtccatctaagaaatctccatctaaaagaaaagggaaaaatctggcgctgcgagaacaacttatggaagaaggggaacatctaccagagagtggctcacaagatggagggggactgcggccccattaccgaaaggttattgctgaatggataagatctcagaaaataacctccctcaaggatgtctttgagagagtgatcaaagggaaagaagatctcccattactagtggacaaagctgcccaggaccactatgcatgcctgaaaatggatttgattgaagagggggatcggcaaagtcaaaagatccgagaaatccgcaggccccgtccacagaaaccatcaaaacaatggactaaaagaagggccagaaaaagggggcagttcctacggttccagcggctgttccacctagatagagggaaacttgccggtattatcctggacgacgtggaatccctccaatgtggtattccacttgacgtggtgcatgaagtattcaagtcaagatgggaatcacccggtacattcaagggcctgggaacattcaatactattggacacgcggacaattccgcatttcaaaccttgattactgcaaaggagatcgtgaaaaacatccgagaaatgaataaaaacgcagcaccaggaccggacgggatttccctgcgggatctcatgaaaaccgacccccattgtactaaattaatggaattatttaatttgtggttgactactggttatataccagagggaataaaaaattgtagaacaatattgataccgaaatcatctgtaccagaaaagttaaatgatgtaaataattggagacctataactattggctcgattgtattaagattgttttcaaaaatcttgactgctcgattaactaaggcatgtcctattaacactcggcaaagagggtttataagatctcctggttgttccgaaaatttgaagttattacaattattaattcgatatgcaaaaagggaacaccttcccctcggggttgtctttgttgacttggcaaaagcatttgatacggtgagccactcccatataattgcagttcttaaacaaaagggagtcgatgagcatataataagactaattgaaaattcatatgaaaatattaatacatatattgatatgaaaaatgttaaatctgaccttattggaatacaaattggtgtgaaacaaggcgatccgatgtctccaattttgtttaacttgtctgtggaccctcttttatgtaaacttgaagaaatgggtaacggatttcaatattatacgaaagatgtaacatcactggccttcgctgacgatttagtattagtaagtgggtcctgggaaggtatgcaaagaaatatagaaatcgtcgagaccttttgtgaacttactggtctcaaaatgcaaggggaaaagtgccatggcttttacatcaagccaacaaaggactcatatacgatcaatgactgtccaccatggactattaacggcacccccctcaatatgattgaacctggtagctctgagaaatacctgggtctatatattgacccatggacaggaatatctaaacccgagctactcgagaaagtcgatagatggttgtcgaaagtgggaaaggcaccattaaaaccttttcagaaggttgacatcttgaaggggcacctgatcccaagattaatttatcttgcggaccaagcaaatttgaaatcaactcacttagagtcccttgacttagccatacgaattggagtcaaggagtggttgcacttaccatcgtgcacctgtgattccatcctttattctaatactcaggatggaggattagggatcagtagattggcggcactgatccccagtgtgcaagctcggagactgcacagaattgcccaaactacggacgatgttttaagaactgtagtcgaaagagaaggaatagaaggagaatttaagaaattatgggtgacggctggtggtgacaaagaaaagattccatctatatgggaccccaaaacaattatggtaatatctgaaacgggcggtgaccaatcactatcggaatgggagactcccaatccaaaaattttctatccaaaaccttgtaactggcgaaaaagggaatttaacaattggactaaattattaactcaaggtcggggtatcgctaactttgaaaaagataaaataagtaacaattggattatacattacaggggcattcctcaaaggaaattgattactgcattacaactgcgtgctaatatttatccaacaagggaatttttatctagaggacggtcagaaacttatattaaatcttgccgtcactgtcaggctgacaatgaaacttgttcacatataattggctattgtccatctgtacaagacgcaagaatcaaaaggcataatcaaatttgtcatatattggcagaagaagccaaaagtaaggattggctggtttaccaagaaccgttattaagggatcagcaaaatgaattatataaacctgatttgatttttgttaaagggggccaggcaatagttaccgatataacaattagatatgaaacatctttaacaactttggaggaggcagcattggaaaaagcaaagaagtatgcacatttagttactcaaattcaggacctgacgaatacatctgttataaattttacaggctttcctttgggatctcgtggtaaatggtaccagaacaacttcaaaatattaaaggaattgggtctctccagctcccgacaagaaaaggtcgccagacgattgtcaaactatgctttatttagctcggtggacattgttcacatgtttgctagtaaagcgaggacagaggtaagatgataataggctgccttctgcggggcttgccttctggccatgcccttcttctctcccttgcacctgtacctcttggtctttgaataaagcctgagtaggaaggaccggtaaaaaaaaaaaaaaaaaaaaaaaaaaaaaaacgttgactaaaaaaaaaaaaaaaaaaaaaaaaaaaaaaaaaaaaaaaaaaaaaaaaaaaaaaaaaaaaaaaaaaaaaa

SEQ ID NO: 1411 - DNA, 2483 bp, synthetic construct
  source 1..2483: mol_type = other DNA
gagtaactatgactctcttaatgccggattggcgggaacagccgatcctagtaaggctggatgaattcatgcgggctgaagcagcggttctcccataaaataggggctttggggaaggtgggggacgtcgggggggcccctggagggacccctgtaccgataggggatccttgttttttcccctctacctggggcttttgtggggaggcgagggcacgtggtgagtgggggatggctgactggggaaagttaccaaggtatccccaaaacctgttttggtaggggtagggatacatactgggcacaactgtaattctctagcccaggaccgagaagttgggactcaccaacccaactttctcttgaaatttcggtgaaacaaatttaaggtataggtcatttgacttaatacccaaaacctggcccctgggtttttagagggcaaagtttggtagtttggcagggagggccgctactactcctgcttcaccctcccaccttgctaagactaatattttccggactaccgtacgtcgacgcggcctactcgacggatcgatccgaacaaacgacccaacacccgtgcgttttattctgtctttttattgccgatcccctcagaagaactcgtcaagaaggcgatagaaggcgatgcgctgcgaatcgggagcggcgataccgtaaagcacgaggaagcggtcagcccattcgccgccaagctcttcagcaatatcacgggtagccaacgctatgtcctgatagcggtcggccgctttacttgtacagctcgtccatgccgagagtgatcccggcggcggtcacgaactccagcaggaccatgtgatcgcgcttctcgttggggtctttgctcagggcggactgggtgctcaggtagtggttgtcgggcagcagcacggggccgtcgccgatgggggtgttctgctggtagtggtcggccagctgcacgctgccgtcctcgatgttgtggcggatcttgaagttcaccttgatgccgttcttctgcttgtcggccatgatatagacgttgtggctgttgtagttgtactccagcttgtgccccaggatgttgccgtcctccttgaagtcgatgcccttcagctcgatgcggttcaccagggtgtcgccctcgaacttcacctcggcgcgggtcttgtagttgccgtcgtccttgaagaagatggtgcgctcctggacgtagccttcgggcatggcggacttgaagaagtcgtgctgcttcatgtggtcggggtagcggctgaagcactgcacgccgtaggtcagggtggtcacgagggtgggccagggcacgggcagcttgccggtggtgcagatgaacttcagggtcagcttgccgtaggtggcatcgccctcgccctcgccggacacgctgaacttgtggccgtttacgtcgccgtccagctcgaccaggatgggcaccaccccggtgaacagctcctcgcccttgctcaccatggtggctcgagaactagatcgcgccgagtgagggttgtgggctcttttattgagctcggggagcagaagcgcgcgaacagaagcgagaagcgaactgattggttagttcaaataaggcacagggtcatttcaggtccttggggcaccctggaaacatctgatggttctctagaaactgctgagggcgggaccgcatctggggaccatctgttcttggccctgagccggggcaggaactgcttaccacagatatcctgtttggcccatattctgctgttccaactgttcttggccctgagccggggcaggaactgcttaccacagatatcctgtttggcccatattctgctgtctctctgttcctaaccttgatcctagcttgccaaacctacaggtggggtctttcattcccccctttttctggagactaaataaaatcttttattctatctatggctcgtactctataggcttcagctggtgatattgttgagtcaaaactagagcctggaccactgatatcctgtctttaacaaattggactaatcgaattcgaagcttgattgttgtttatttttgtacatattgttgttttatttatttccactgtacattcgattcaataaacttcgacgggtgctggggcgcggggcagccacaggccagatatcacaagccagaaggacgtggacagtaagtagggacgggacttattatttcataacgcgtcaattaccatctgatttggaccaatttaccgaatttgtccaaggtggacgggccacctttacttaacccggaaaaggagcatatatatttatatatatgtgttcgaaaaatagccaaatgcctcgtcatcccggtagcgctagcaccggtaaaaaaaaaaaaaaaaaaaaaaaaaaaaaaaacgttgactaaaaaaaaaaaaaaaaaaaaaaaaaaaaaaaaaaaaaaaaaaaaaaaaaaaaaaaaaaaaaaaaaaaaaa

SEQ ID NO: 1412 - DNA, 2230 bp, synthetic construct
  source 1..2230: mol_type = other DNA
gagtaactatgactctcttaagacgggatcatagttacaactgggcatagctgcggggggtcacacctccacgtggtcccgccggatactccttgtgggtaaccgagttgaccccctgccccagtgtgaacggagctatggttacttccaccctatcaagtggcctcaccaaccacttgatagtatctccctaaggtgaaacaaagttcagacttctgtctaaattcctcagcccacggtaatagttgggcacgaccgacaagttcggtggggtactgtcggtcctaccaaagccccacaattggacattcgaataccgtacgtcgacgcggcctactcgacggatcgatccgaacaaacgacccaacacccgtgcgttttattctgtctttttattgccgatcccctcagaagaactcgtcaagaaggcgatagaaggcgatgcgctgcgaatcgggagcggcgataccgtaaagcacgaggaagcggtcagcccattcgccgccaagctcttcagcaatatcacgggtagccaacgctatgtcctgatagcggtcggccgctttacttgtacagctcgtccatgccgagagtgatcccggcggcggtcacgaactccagcaggaccatgtgatcgcgcttctcgttggggtctttgctcagggcggactgggtgctcaggtagtggttgtcgggcagcagcacggggccgtcgccgatgggggtgttctgctggtagtggtcggccagctgcacgctgccgtcctcgatgttgtggcggatcttgaagttcaccttgatgccgttcttctgcttgtcggccatgatatagacgttgtggctgttgtagttgtactccagcttgtgccccaggatgttgccgtcctccttgaagtcgatgcccttcagctcgatgcggttcaccagggtgtcgccctcgaacttcacctcggcgcgggtcttgtagttgccgtcgtccttgaagaagatggtgcgctcctggacgtagccttcgggcatggcggacttgaagaagtcgtgctgcttcatgtggtcggggtagcggctgaagcactgcacgccgtaggtcagggtggtcacgagggtgggccagggcacgggcagcttgccggtggtgcagatgaacttcagggtcagcttgccgtaggtggcatcgccctcgccctcgccggacacgctgaacttgtggccgtttacgtcgccgtccagctcgaccaggatgggcaccaccccggtgaacagctcctcgcccttgctcaccatggtggctcgagaactagatcgcgccgagtgagggttgtgggctcttttattgagctcggggagcagaagcgcgcgaacagaagcgagaagcgaactgattggttagttcaaataaggcacagggtcatttcaggtccttggggcaccctggaaacatctgatggttctctagaaactgctgagggcgggaccgcatctggggaccatctgttcttggccctgagccggggcaggaactgcttaccacagatatcctgtttggcccatattctgctgttccaactgttcttggccctgagccggggcaggaactgcttaccacagatatcctgtttggcccatattctgctgtctctctgttcctaaccttgatcctagcttgccaaacctacaggtggggtctttcattcccccctttttctggagactaaataaaatcttttattctatctatggctcgtactctataggcttcagctggtgatattgttgagtcaaaactagagcctggaccactgatatcctgtctttaacaaattggactaatcgaattcgaagcttgatattactttgaatttgcttaattgtaatgtttagatatgataagtagatgtattagtggtagtataagtagtatatagaattgtagcttgtattgtagtatgttaataaaaacggactgggatctcgtgatgattacctttaatcatgacgctcactggatggacttggtaggtggacgggccaccttcataaaacccggaaaaagttcacatacttgttatgtgttcgtaaatagccaaatgcctcgtcatcccggtagcgctagcaccggtaaaaaaaaaaaaaaaaaaaaaaaaaaaaaaaacgttgactaaaaaaaaaaaaaaaaaaaaaaaaaaaaaaaaaaaaaaaaaaaaaaaaaaaaaaaaaaaaaaaaaaaaaa

SEQ ID NO: 1413 - DNA, 2242 bp, synthetic construct
  source 1..2242: mol_type = other DNA
gagtaactatgactctcttaagacgggatcatagttacaactgggcatagctgcggggggtcacacctccccgtggtcccgccggatacctcttgtgggtaaccgagttgaccccctgccccagtgcgaacggagttatggttacttcctccctatcaattggcctcaccaaccaattgatagtaatatcccaaggtgaaacaaagttctgaccttgcgtctaaattcctagcccacggtaatagttgggcttgtccggcaagttctgttggggtactgtcggacttgtcgaaatccccacaaatttggatatacgaataccgtacgtcgacgcggcctactcgacggatcgatccgaacaaacgacccaacacccgtgcgttttattctgtctttttattgccgatcccctcagaagaactcgtcaagaaggcgatagaaggcgatgcgctgcgaatcgggagcggcgataccgtaaagcacgaggaagcggtcagcccattcgccgccaagctcttcagcaatatcacgggtagccaacgctatgtcctgatagcggtcggccgctttacttgtacagctcgtccatgccgagagtgatcccggcggcggtcacgaactccagcaggaccatgtgatcgcgcttctcgttggggtctttgctcagggcggactgggtgctcaggtagtggttgtcgggcagcagcacggggccgtcgccgatgggggtgttctgctggtagtggtcggccagctgcacgctgccgtcctcgatgttgtggcggatcttgaagttcaccttgatgccgttcttctgcttgtcggccatgatatagacgttgtggctgttgtagttgtactccagcttgtgccccaggatgttgccgtcctccttgaagtcgatgcccttcagctcgatgcggttcaccagggtgtcgccctcgaacttcacctcggcgcgggtcttgtagttgccgtcgtccttgaagaagatggtgcgctcctggacgtagccttcgggcatggcggacttgaagaagtcgtgctgcttcatgtggtcggggtagcggctgaagcactgcacgccgtaggtcagggtggtcacgagggtgggccagggcacgggcagcttgccggtggtgcagatgaacttcagggtcagcttgccgtaggtggcatcgccctcgccctcgccggacacgctgaacttgtggccgtttacgtcgccgtccagctcgaccaggatgggcaccaccccggtgaacagctcctcgcccttgctcaccatggtggctcgagaactagatcgcgccgagtgagggttgtgggctcttttattgagctcggggagcagaagcgcgcgaacagaagcgagaagcgaactgattggttagttcaaataaggcacagggtcatttcaggtccttggggcaccctggaaacatctgatggttctctagaaactgctgagggcgggaccgcatctggggaccatctgttcttggccctgagccggggcaggaactgcttaccacagatatcctgtttggcccatattctgctgttccaactgttcttggccctgagccggggcaggaactgcttaccacagatatcctgtttggcccatattctgctgtctctctgttcctaaccttgatcctagcttgccaaacctacaggtggggtctttcattcccccctttttctggagactaaataaaatcttttattctatctatggctcgtactctataggcttcagctggtgatattgttgagtcaaaactagagcctggaccactgatatcctgtctttaacaaattggactaatcgaattcgaagcttgatacattttcattatattactcttgatgtattaggtaatagattagtataagtagtatgtagatgtattagattgtaatgtagtattgtagtattgtagaaatgtagtattgcaataaactggactgggatctcgtgatgattacctttaatcatgacgctcactggacatgacttggtaggtggacgggccaccttcataaaacccggaaaaagtacacatactcgtaatgtgttcgtaaatagccaaatgcctcgtcatcccggtagcgctagcaccggtaaaaaaaaaaaaaaaaaaaaaaaaaaaaaaaacgttgactaaaaaaaaaaaaaaaaaaaaaaaaaaaaaaaaaaaaaaaaaaaaaaaaaaaaaaaaaaaaaaaaaaaaaa

SEQ ID NO: 1414 - DNA, 2396 bp, synthetic construct
  source 1..2396: mol_type = other DNA
gagtaactatgactctcttaagacgggatcatagttactaactgggcagagctgcagaggttacacctcctcgtggtcccgctggatgcccttcggggtaaccaagttaacctctgccccagtctgggaattatagctacttcccccctatcgtctggcctcaccaaccattcgatagattcggcctggtgatccaaattcctggcaacgatttttcgtcgctgcccaaagccttgcctacgggcacagttgggctcagtcatacagcacttgagggggtgttgtttgacttatactactcctctaactggactggcaaataccgtacgtcgacgcggcctactcgacggatcgatccgaacaaacgacccaacacccgtgcgttttattctgtctttttattgccgatcccctcagaagaactcgtcaagaaggcgatagaaggcgatgcgctgcgaatcgggagcggcgataccgtaaagcacgaggaagcggtcagcccattcgccgccaagctcttcagcaatatcacgggtagccaacgctatgtcctgatagcggtcggccgctttacttgtacagctcgtccatgccgagagtgatcccggcggcggtcacgaactccagcaggaccatgtgatcgcgcttctcgttggggtctttgctcagggcggactgggtgctcaggtagtggttgtcgggcagcagcacggggccgtcgccgatgggggtgttctgctggtagtggtcggccagctgcacgctgccgtcctcgatgttgtggcggatcttgaagttcaccttgatgccgttcttctgcttgtcggccatgatatagacgttgtggctgttgtagttgtactccagcttgtgccccaggatgttgccgtcctccttgaagtcgatgcccttcagctcgatgcggttcaccagggtgtcgccctcgaacttcacctcggcgcgggtcttgtagttgccgtcgtccttgaagaagatggtgcgctcctggacgtagccttcgggcatggcggacttgaagaagtcgtgctgcttcatgtggtcggggtagcggctgaagcactgcacgccgtaggtcagggtggtcacgagggtgggccagggcacgggcagcttgccggtggtgcagatgaacttcagggtcagcttgccgtaggtggcatcgccctcgccctcgccggacacgctgaacttgtggccgtttacgtcgccgtccagctcgaccaggatgggcaccaccccggtgaacagctcctcgcccttgctcaccatggtggctcgagaactagatcgcgccgagtgagggttgtgggctcttttattgagctcggggagcagaagcgcgcgaacagaagcgagaagcgaactgattggttagttcaaataaggcacagggtcatttcaggtccttggggcaccctggaaacatctgatggttctctagaaactgctgagggcgggaccgcatctggggaccatctgttcttggccctgagccggggcaggaactgcttaccacagatatcctgtttggcccatattctgctgttccaactgttcttggccctgagccggggcaggaactgcttaccacagatatcctgtttggcccatattctgctgtctctctgttcctaaccttgatcctagcttgccaaacctacaggtggggtctttcattcccccctttttctggagactaaataaaatcttttattctatctatggctcgtactctataggcttcagctggtgatattgttgagtcaaaactagagcctggaccactgatatcctgtctttaacaaattggactaatcgaattcgaagcttgatttatctatactgttctgctttatatattgtttctgctgtattactatatgttgttttattgtaattattgttttgtttcatattggtcttgctctgttatatattgctcttgtcgcatggttacttattgttttgctgtgttactatcaattctttaataaaactacccctggtactcctgctctgttaccttggcactggaaaggtcgagacagtaagttggaactcgtattcatgacgtgtcacattcacctaaatttacacaaaatactaattggacttgtcaaaattttctaccaaattggacaattttaccggattggacataggtggacgggccacctttacttaactcggaaaagaaacatatataattttatgtgtttgttaaatagccaaatgcctcgtcatcccggtagcgctagcaccggtaaaaaaaaaaaaaaaaaaaaaaaaaaaaaaaacgttgactaaaaaaaaaaaaaaaaaaaaaaaaaaaaaaaaaaaaaaaaaaaaaaaaaaaaaaaaaaaaaaaaaaaaaa

SEQ ID NO: 1415 - DNA, 2211 bp, synthetic construct
  source 1..2211: mol_type = other DNA
gagtaactatgactctcttaagacgggatcatagttactaactgggcacagctgcggggggtcacacctccacgtggtcccgctggataccccttgtgggtaaccgagttgaccccctgccccagtggcacggagctatggttacttcctccctatcgagtggactcaccaaccacttgatagtatctcccaaaggtgaaacaaagttctgaaacgctccgtttctaaattccttagcccacggtaatagttgggcacctccgacaagttcggtggggtactgtcggattgatcaaatcctcacaattggcacttcgaataccgtacgtcgacgcggcctactcgacggatcgatccgaacaaacgacccaacacccgtgcgttttattctgtctttttattgccgatcccctcagaagaactcgtcaagaaggcgatagaaggcgatgcgctgcgaatcgggagcggcgataccgtaaagcacgaggaagcggtcagcccattcgccgccaagctcttcagcaatatcacgggtagccaacgctatgtcctgatagcggtcggccgctttacttgtacagctcgtccatgccgagagtgatcccggcggcggtcacgaactccagcaggaccatgtgatcgcgcttctcgttggggtctttgctcagggcggactgggtgctcaggtagtggttgtcgggcagcagcacggggccgtcgccgatgggggtgttctgctggtagtggtcggccagctgcacgctgccgtcctcgatgttgtggcggatcttgaagttcaccttgatgccgttcttctgcttgtcggccatgatatagacgttgtggctgttgtagttgtactccagcttgtgccccaggatgttgccgtcctccttgaagtcgatgcccttcagctcgatgcggttcaccagggtgtcgccctcgaacttcacctcggcgcgggtcttgtagttgccgtcgtccttgaagaagatggtgcgctcctggacgtagccttcgggcatggcggacttgaagaagtcgtgctgcttcatgtggtcggggtagcggctgaagcactgcacgccgtaggtcagggtggtcacgagggtgggccagggcacgggcagcttgccggtggtgcagatgaacttcagggtcagcttgccgtaggtggcatcgccctcgccctcgccggacacgctgaacttgtggccgtttacgtcgccgtccagctcgaccaggatgggcaccaccccggtgaacagctcctcgcccttgctcaccatggtggctcgagaactagatcgcgccgagtgagggttgtgggctcttttattgagctcggggagcagaagcgcgcgaacagaagcgagaagcgaactgattggttagttcaaataaggcacagggtcatttcaggtccttggggcaccctggaaacatctgatggttctctagaaactgctgagggcgggaccgcatctggggaccatctgttcttggccctgagccggggcaggaactgcttaccacagatatcctgtttggcccatattctgctgttccaactgttcttggccctgagccggggcaggaactgcttaccacagatatcctgtttggcccatattctgctgtctctctgttcctaaccttgatcctagcttgccaaacctacaggtggggtctttcattcccccctttttctggagactaaataaaatcttttattctatctatggctcgtactctataggcttcagctggtgatattgttgagtcaaaactagagcctggaccactgatatcctgtctttaacaaattggactaatcgaattcgaagcttgatacttattctgacttatttagatttgtaatgtttagatgtagtattgtagcatgtagttttgtagattgtaatgtagaatgtaataaaatggactgggatctcgtgatgattaccttaatcatgacgctcactggactgacttggttggtggacgggccaccttataaaacccggaaaaagtacacataccctgttatgtgttcgtaagtagccaaatgcctcgtcatcccggtagcgctagcaccggtaaaaaaaaaaaaaaaaaaaaaaaaaaaaaaaacgttgactaaaaaaaaaaaaaaaaaaaaaaaaaaaaaaaaaaaaaaaaaaaaaaaaaaaaaaaaaaaaaaaaaaaaaa

SEQ ID NO: 1416 - protein, 150 aa, synthetic construct; identical to SEQ ID NO: 787

SEQ ID NO: 1417 - protein, 1434 aa, synthetic construct; identical to SEQ ID NO: 471

SEQ ID NO: 1418 - protein, 1434 aa, synthetic construct; identical to SEQ ID NO: 471

SEQ ID NO: 1419 - protein, 1434 aa, synthetic construct; identical to SEQ ID NO: 471

SEQ ID NO: 1420 - protein, 1239 aa, synthetic construct; identical to SEQ ID NO: 410

SEQ ID NO: 1421 - protein, 1239 aa, synthetic construct; identical to SEQ ID NO: 410

SEQ ID NO: 1422 - protein, 1390 aa, synthetic construct
MASCPKPGPPVSAGAMSLESGLTTHSVLAIERGPNSLANSGSDFGGGGLGLPLRLLRVSVGTQTSRSDWVDLVSWSHPGPTSKSQQVDLVSLFPKHRVDLLSKNDQVDLVAQFLPSKFPPNLAENDLALLVNLEFYRSDLHVYECVHKAAHWEGLSGLPEVYEQLAPQPCVGETLHSSLPRDSELFVPEEGSSEKESEDAPKTSPPTPGKHGLEQTGEEKVMVTVPDKNPPCPCCGTRVNSVLNLIEHLKVSHGKRGVCFRCAKCGKENSNYHSVVCHFKKCRGPETEKAPAGEWICEVCNRDFTTKIGLGQHKRLAHPAVRNQERIVASQPKETSNRGAHKRCWTKEEEELLIRLEAQFEGNKNINKLIAEHITTKTAKQISDKRRLLSRKPAEEPRMEPGTCHHTRRAAASLRTEPEMSHHAQAEDRDNGPGRRPLPGRAAAGGRTMDEIRRHPDKGNGQQRPTKQKSEEQLQAYYKKTLEERLSAGALNTFPRAFKQVMEGRDIKLVINQTAQDCFGCLESISQIRTATRDKKDTVTREKHPKKPFQKWMKKRAIKKGNYLRFQRLFYLDRGKLAKIILDDIECLSCDIPLSEIYSVFKTRWETTGSFKSLGDFKTYGKADNTAFRELITAKEIEKNVQEMSKGSAPGPDGITLGDVVKMDPEFSRTMEIFNLWLTTGKIPDMVRGCRTVLIPKSSKPDRLKDINNWRPITIGSILLRLFSRIVTARLSKACPLNPRQRGFIRAAGCSENLKLLQTIIWSAKREHRPLGVVFVDIAKAFDTVSHQHIIHALQQREVDPHIVGLVSNMYENISTYITTKRNTHTDKIQIRVGVKQGDPMSPLLFNLAMDPLLCKLEESGKGYHRGQSSITAMAFADDLVLLSDSWENMNTNISILETFCNLTGLKTQGQKCHGFYIKPTKKSYTINDCAAWTINGTPLNMIDPGESEKYLGLQFDPWIGIARSGLSTKLDFWLQRIDQAPLKPLQKTDILKTYTIPRLIYIADHSEVKSALLETLDQKIRTAVKEWLHLPPCTCDAILYSSTRDGGLGITKLAGLIPSVQARRLHRIAQSSDDTMKCFMEKEKMEQLHKKLWIQAGGDRENIPSIWEAPPSSEPPNNVSTNSEWEAPTQKDKFPKPCNWRKNEFKKWTKLASQGRGIVNFERDKISNHWIQYYRRIPHRKLLTALQLRANVYPTREFLARGRQDQYIKACRHCDADNESCAHIIGNCPVTQDARIKRHNYICELLLEEAKKKDWVVFKEPHIRDSNKELYKPDLIFVKDGRALVVDVTVRYEAAKSSLEEAAAEKVRKYKHLETEVRHLTNAKDVTFVGFPLGARGKWHQDNFKLLTELGLSKSRQVKMAETFSTVALFSSVDIVHMFASRARKSMVM

SEQ ID NO: 1423 - protein, 1390 aa, synthetic construct
MASCPKPGPPVSAGAMSLESGLTTHSVLAIERGPNSLANSGSDFGGGGLGLPLRLLRVSVGTQTSRSDWVDLVSWSHPGPTSKSQQVDLVSLFPKHRVDLLSKNDQVDLVAQFLPSKFPPNLAENDLALLVNLEFYRSDLHVYEGVHKAAHWEGLSGLPEVYEQLAPQPCVGETLHSSLKRDSELFVPEEGSSEKESEDAPKTSPPTPGKHGKRQTGEEKVMVTVPDKNPPCPCCGTRVNSVLNLIEHLKVSHGKRGVCFRCAKCGKENSNYHSVVCHFKKCRGPETEKAPAGEWICEVCNRDFTTKIGLGQHKRRAHPAVRNQERIVASQPKETSNRGAHKRCWTKEERELLIRLEAQFEGNKNINKLIAEHITTKTAKQISDKRRLLSRKPAEEPREMPGTCHHTRRAAASLRTEPEMSHHAQAEDRDNGPGRRPLPGRAAAGGRTMDEIRRHPDKGNGQQRPTKQKSEEQLQAYYKKTLEERLSAGALNTFPRAFKQVMEGRDIKLVINQTAQDYFGCLESISQIRTATRDKKDTVTRKKHPKKPFQKWMKKRAIKKGNYLRFQRLFHLDRGKLAKIILDDIECLSCDIPLSEIYSVFKTRWETTGSFKSLGDFKTYGKADNTAFRDLITAKEIEKNVQEMSKGSAPGPDGITLGDVVKMDPEYSRTAEIFNLWLTTGKIPDMVRGCRTVLIPKSSDPDRLKDINNWRPITIGSILLRLFSRIVTARLSKACPLNPRQRGFIRAAGCSENLKLLQTIIWSAKREHRPLGVVFVDIAKAFDTVSHQHIIHALQQREVDPHIVGLVSNMYENISTYITTKRNTHTDKIQIRVGVKQGDPMSPLLFNLAMDPLLCKLEESGKGYHRGQSSITAMAFADDLVLLSDSWEGMNTNISILETFCNLTGLKTQGQKCHGFYIKPTKKSYTINDCAAWTINGTPLNMIDPGESEKYLGLQFDPWIGIARSGLSTKLDFWLQRIDQAPLKPLQKLDILKTYTIPRLIYIADHSEVKTALLELLDQKIRTAVKEWLHLPPCTCDAILYSSTRDGGLGITKLAGLIPSVQARRLHRIAQSSDETMKCFMEKEKMEQLHKKLWIQAGGDRENIPSIWEAPPSSEPPNNVSTNSEWEAPTQKDKFPKPCNWRKNEFKKWTKLASQGRGIVNFERDKISNHWIQYYRRIPHRKLLTALQLRANVYPTREFLARGRQDQYIKACRHCDADIESCAHIIGNCPVTQDARIKRHNKICELLLEEAKKKDWVVFKEPHIRDSNKELYKPDLIFVKDARALVVDVTVRYEAAKSSLEEAAAEKVRKYKHLETEVRHLTNAKDVTFVGFPLGARGKWHQDNFKLLTELGLSKSRQVKMAETFSTVALFSSVDIVHMFASRARKSMVM

SEQ ID NO: 1424 - protein, 1390 aa, synthetic construct
MASCPKPGPPVSAGAMSLESGLTTHSVLAIERGPNSLANSGSDFGGGGLGLPLRLLRVSVGTQTSRSDWVDLVSWSHPGPTSKSQQVDLVSLFPKHRVDLLSKNDQVDLVAQFLPSKFPPNLAENDLALLVNLEFYRSDLHVYEGVHKAAHWEGLSGLPEVYEQLAPQPCVGETLHSSLPRDSELFVPEEGSSEKESEDAPKTSPPTPGKHGKRQTGEEKVMVTVPDKNPPCPCCGTRVNSVLNLIEHLKVSHGKRRVCFRCAKCGKENSNYHSVVCHFKKCRGPETEKAPAGEWICEVCNRDFTTKIGLGQHKRRAHPAVRNQERIVASQPKETSNRGAHKRCWTKEEEELLIRLEAQFEGNKNINKLIAEHITTKTAKQISDKRRLLSRKPAEEPREMPGTCHHTRRAAASLRTEPEMSHHAQAEDRDNGPGRRPLPGRAAAGGRTMDEIRRHPDKGNGQQRPTKQKSEEQLQAYYKKTLEERLSAGALNTFPRAFKQVMEGRDIKLVINQTAQDYFGCLESISQIRTATRDKKYTVTRKKHPKKPFQKWMKKRAIKKGNYLRFQRLFHLDRGKLAKIILDDIECLSCDIPLSEIYSVFKTRWETTGSFKSLGDFKTYGKADNTAFRDLITAKEIEKNVQEMSKGSAPGPDGITLGDVVKMDPEGSRTMEIFNLWLTTGKIPDMVRGCRTVLIPKSSDPDRLKDINNWRPITIGSILLRLFSRIVTARLSKACPLNPRQRGFIRAAGCSENLKLLQTIIWSAKREHRPLGVVFVDIAKAFDTVSHQHIIHALQQREVDPHIVGLVSNMYENISTYITTKRNTHTDKIQIRVGVKQGDPMSPLLFNLAMDPLLCKLEESGKGYHRGQSSITAMAFADDLVLLSDSWEGMNTNISILETFCNLTGLKTQGQKCHGFYIKPTKKSYTINDCAAWTINGTPLNMIDPGESEKYLGLQFDPWIGIARSGLSTKLDFWLQRIDQAPLKPLQKLDILKTYTIPRLIYIADHSEVKTALLETLDQKIRTAVKEWLHLPPCTCDAILYSSTRDGGLGITKLAGLIPSVQARRLHRIAQSSDDTMKCFMEKEKMEQLHKKLWIQAGGDRENIPSIWEAPPSSEPPNNVSTNSEWEAPTQKDKFPKPCNWRKNEFKKWTKLASQGRGIVNFERDKISNHWIQYYRRIPHRKLLTALQLRANVYPTREFLARGRQDQYIKACRHCDADIESCAHIIGNCPVTQDARIKRHNKICELLLEEAKKKDWVVFKEPHIRDSNKELYKPDLIFVKDGRALVVDVTVRYEAAKSSLEEAAAEKVRKYKHLETEVRHLTNAKDVTFVGFPLGARGKWHQDNFKLLTELGLSKSRQVKMAETFSTVALFSSVDIVHMFASRARKSMVM

SEQ ID NO: 1425 - protein, 1671 aa, synthetic construct
MGTALTPLLTKFATRYEMGTTPEEVANTLKQTCFKGQVNDSQMVALLIVADQYKLNPFTKELYAFPDKNNGIVPVVGVDGWARIINENPQFDGMEFSMDQQGTECTCKIYRKDRSHAISATEYMAECKRNTQPWQSHPRRMLRHKAMIQCARLAFGFAGIYDQDEAERIVERDVTPAEQYEDVSEAICLIKDSPTMEDLQAAFSNAWKAYKTKGARDQLTAAKDQRKKELLDAPIDVEFEETGDDRAASGGSSGGSSGSETPGTSESATPESSGGSSGGSSMASCPKPGPPVSAGAMSLESGLTTHSVLAIERGPNSLANSGSDFGGGGLGLPLRLLRVSVGTQTSRSDWVDLVSWSHPGPTSKSQQVDLVSLFPKHRVDLLSKNDQVDLVAQFLPSKFPPNLAENDLALLVNLEFYRSDLHVYECVHKAAHWEGLSGLPEVYEQLAPQPCVGETLHSSLPRDSELFVPEEGSSEKESEDAPKTSPPTPGKHGLEQTGEEKVMVTVPDKNPPCPCCGTRVNSVLNLIEHLKVSHGKRRVCFRCAKCGKENSNYHSVVCHFPKCRGPETEKAPAGEWICEVCNRDFTTKIGLGQHKRLAHPAVRNQERIVASQPKETSNRGAHKRCWTKEEEELLIRLEAQFEGHKNINKLIAEHITTKTAKQISDKRRLLSRKPAEEPRMEPGTCHHTRRAAASLRTEPEMSHQAQAEDRDNGPGRRPLPGRPAAGGRTMDEIRRHPDKGNGQQRPTKQKSEEQLQAYYKKTLEERLSAGALNTFPRAFKQVMEGRDIKLVINQTAQDCFGCLESISQIRTATRDKKYTGTREKHPKRPFQKWMKKRAIKKGNYLRFQRLFYLDRGKLAKIILDDIECLSCDIPLSEIYSVFKTRWETTGSFKSLGDFKTYGKADNTAFRELITAKEIEKNVQEMSKGSAPGPDGITLGDVVKMDPEFSLTMEIFNLWLTTGKIPDMVRGCRTVLIPKSSKPDRLKDINNWRPITIGSILLRLFSRIVTARLSKACPLNPRQRGFIRAAGCSENLKLLQTIIWSAKREHRPLGVVFVDIAKAFDTVSHQHIIHALQQREVDPHIVGLVSNMYENISTYITTKRNTHTDKIQIRVGVKQGDPMSPLLFNLAMDPLLCKLEESGKGYHRGQSSITAMAFADDLVLLSDSWEGMNTNISILETFCNLTGLKTQGQKCHGFYIKPTKDSYTINDCAAWTINGTPLNMIDPGESEKYLGLQFDPWIGIARSGLSTKLDEWLQRIDQAPLKPLQKTDILKTYTIPRLIYIADHSEVKAALLETLDRKIRTAVKEWLHLPPCTCDAILYSSTRDGGLGITKLAGLIPSVQARRLHRIAQSSDDTMKCFMEKERMEQLHKKLWIQAGGDRENIPSIWEAPPSSEPPNNVSTNSEWEAPTQKPKFPKPCNWRKNEFKKWTKLASQGRGIVNFERDKISNHWIQYYRGIPHRKLLTALQLRANVYPTREFLARGRQDQYIKACRHCDADIESCAHIIGNCPVTQDARIKRHNKICELLLEEAKKKDWVVFKEPHIRDSNKELYKPDLIFVKDGRALVVDVTVRYEAAKSSLEEAAAEKVRKYKHLETEVRHLTNAKDVTFVGFPLGARGKWHQDNFKLLTELGLSKSRQVKMAETFSTVALFSSVDIVHMFASRARKSMVM

SEQ ID NO: 1426 - protein, 1665 aa, synthetic construct
MAPKKKRKVNISGSSCGSPNSADTSSDFKDLWTKLKECHDREVQGLQVKVTKLKQERILDAQRLEEFFTKNQQLREQQKVLHETIKVLEDRLRAGLCDRCAVTEEHMRKKQQEFENIRQQNLKLITELMNERNTLQEENKKLSEQLQQKIENDQQHQAAELECEEDVIPDSPITAFSFSGVNRLRRKENPHVRYIEQTHTKLEHSVCANEMRKVSKSSTHPQHNPNENEILVADTYDQSQSPMAKAHGTSSYTPDKSSFNLATVVAETLGLGVQEESETQGPMSPLGDELYHCLEGNHKKQPFESGSETPGTSESATPEGSPKRKVSSAEGAAKEEPKRRSARLSAKPPAKVEAKPKKAAAKDKSSDKKVQTKGKRGAKGKQAEVANQETKEDLPAENGETKTEESPASDEAGEKEAKSDSGSETPGTSESATPESYEQLAPQPCVGETLHSSLPRDSELFVPEEGSSEKESEDAPKTSPPTPGKHGLEQTGEEKVMVTVPDKNPPCPCCGTRVNSVLNLIEHLKVSHGKRGVCFRCAKCGKENSNYHSVVCHFKKCRGPETEKAPAGEWICEVCNRDFTTKIGLGQHKRLAHPAVRNQERIVASQPKETSNRGAHKRCWTKEEEELLIRLEAQFEGNKNINKLIAEHITTKTAKQISDKRRLLSRKPAEEPREEPGTCHHTRRAAASLRTEPEMSHHAQAEDRDNGPGRRPLPGRAAAGGRTMDEIRRHPDKGNGQQRPTKQKSEEQLQAYYKKTLEERLSAGALNTFPRAFKQVMEGRDIKLVINQTAQDCFGCLESISQIRTATRDKKDTVTREKHPKKPFQKWMKKRAIKKGNYQRFLRLFYLDRGKLAKIILDDIECLSCDIPLSEIYSVFKTRWETTGSFKSLGDFKTYGKADNTAFRELITAKEIEKNVQEMSKGSAPGPDGITLGDVVKMDPEFSRTMEIFNLWLTTGKIPDMVRGCRTVLIPKSSKPDRLKDINNWRPITIGSILLRLFSRIVTARLSKACPLNPRQRGFIRAAGCSENLKLLQTIIWSAKREHRPLGVVFVDIAKAFDTVSHQHIIHALQQREVDPHIVGLVSNMYENISTYITTKRNTHTDKIQIRVGVKQGDPMSPLLFNLAMDPLLCKLEESGKGYHRGQSSITAMAFADDLVLLSDSWENMNTNISILETFCNLTGLKTQGQKCHGFYIKPTKDSYTINDCAAWTINGTPLNMIDPGESEKYLGLQFDPWIGIARSGLSTKLDFWLQRIDQAPLKPLQKTDILKTYTIPRLIYIADHSEVKSALLETLDQKIRTAVKEWLHLPPCTCDAILYSSTRDGGLGITKLAGLIPSVQARRLHRIAQSSDDTMKCFMEKEKMEQLHKKLWIQAGGDRENIPSIWEAPPSSEPPNNVSTNSEWEAPTQKDKFPKPCNWRKNEFKKWTKLASQGRGIVNFERDKISNHWIQYYRRIPHRKLLTALQLRANVYPTREFLARGRQDQYIKACRHCDADNESCAHIIGNCPVTQDARIKRHNYICELLLEEAKKKDWVVFKEPHIRDSNKELYKPDLIFVKDGRALVVDVTVRYEAAKSSLEEAAAEKVRKYKHLETEVRHLTNAKDVTFVGFPLGARGKWHQDNFKLLTELGLSKSRQVKMAETFSTVALFSSVDIVHMFASRARKSMVM

SEQ ID NO: 1427 - protein, 1665 aa, synthetic construct; identical to SEQ ID NO: 784

SEQ ID NO: 1428 - protein, 1390 aa, synthetic construct
MASCPKPGPPVSAGAMSLESGLTTHSVLAIERGPNSLANSGSDFGGGGLGLPLRLLRVSVGTQTSRSDWVDLVSWSHVGPTSKSQQVDLVSLFPKHRVDLLSKNDQVDLVAQFLPSKFPPNLAENDLALLVNLEFYRSDLHVYEGVHKAAHWEGLSGLPEVYEQLAPQPCVGETLHSSLKRDSELFVPEEGSSEKESEDAPKTSPPTPGKHGKRQTGEEKVMVTVPDKNPPCPCCGTRVNSVLNLIEHLKVSHGKRGVCFRCAKCGKENSNYHSVVCHFKKCRGPETEKAPAGEWICEVCNRDFTTKIGLGQHKRRAHPAVRNQERIVASQPKETSNRGAHKRCWTKEERELLIRLEAQFEGNKNINKLIAEHITTKTAKQISDKRRLLSRKPAEEPREMPGTCHHTRRAAASLRTEPEMSHHAQAEDRDNGPGRRPLPGRAAAGGRTMDEIRRHPDKGNGQQRPTKQKSEEQLQAYYKKTLEERLSAGALNTFPRAFKQVMEGRDIKLVINQTAQDYFGCLESISQIRTATRDKKDTVTRKKHPKKPFQKWMKKRAIKKGNYLRFQRLFHLDRGKLAKIILDDIECLSCDIPLSEIYSVFKTRWETTGSFKSLGDFKTYGKADNTAFRDLITAKEIEKNVQEMSKGSAPGPDGITLGDVVKMDPEYSRTAEIFNLWLTTGKIPDMVRGCRTVLIPKSSDPDRLKDINNWRPITIGSILLRLFSRIVTARLSKACPLNPRQRGFIRAAGCSENLKLLQTIIWSAKREHRPLGVVFVDIAKAFDTVSHQHIIHALQQREVDPHIVGLVSNMYENISTYITTKRNTHTDKIQIRVGVKQGDPMSPLLFNLAMDPLLCKLEESGKGYHRGQSSITAMAFADDLVLLSDSWEGMNTNISILETFCNLTGLKTQGQKCHGFYIKPTKKSYTINDCAAWTINGTPLNMIDPGESEKYLGLQFDPWIGIARSGLSTKLDFWLQRIDQAPLKPLQKLDILKTYTIPRLIYIADHSEVKTALLELLDQKIRTAVKEWLHLPPCTCDAILYSSTRDGGLGITKLAGLIPSVQARRLHRIAQSSDETMKCFMEKEKMEQLHKKLWIQAGGDRENIPSIWEAPPSSEPPNNVSTNSEWEAPTQKDKFPKPCNWRKNEFKKWTKLASQGRGIVNFERDKISNHWIQYYRRIPHRKLLTALQLRANVYPTREFLARGRQDQYIKACRHCDADIESCAHIIGNCPVTQDARIKRHNKICELLLEEAKKKDWVVFKEPHIRDSNKELYKPDLIFVKDARALVVDVTVRYEAAKSSLEEAAAEKVRKYKHLETEVRHLTNAKDVTFVGFPLGARGKWHQDNFKLLTELGLSKSRQVKMAETFSTVALFSSVDIVHMFASRARKSMVM

SEQ ID NO: 1429 - protein, 1390 aa, synthetic construct
MASCPKPGPPVSAGAMSLESGLTTHSVLAIERGPNSLANSGSDFGGGGLGLPLRLLRVSVGTQTSRSDWVDLVSWSHPGPTSKSQQVDLVSLFPKHRVDLLSKNDQVDLVAQFLPSKFPPNLAENDLALLVNLEFYRSDLHVYEGVHKAAHWEGLSGLPEVYEQLAPQPCVGETLHSSLPRDSELFVPEEGSSEKESEDAPKTSPPTPGKHGKRQTGEEKVMVTVPDKNPPCPCCGTRVNSVLNLIEHLKVSHGKRRVCFRCAKCGKENSNYHSVVCHFKKCRGPETEKAPAGEWICEVCNRDFTTKIGLGQHKRRAHPAVRNQERIVASQPKETSNRGAHKRCWTKEEEELLIRLEAQFEGNKNINKLIAEHITTKTAKQISDKRRLLSRKPAEEPREMPGTCHHTRRAAASLRTEPEMSHHAQAEDRDNGPGRRPLPGRAAAGGRTMDEIRRHPDKGNGQQRPTKQKSEEQLQAYYKKTLEERLSAGALNTFPRAFKQVMEGRDIKLVINQTAQDYFGCLESISQIRTATRDKKYTVTRKKHPKKPFQKWMKKRAIKKGNYLRFQRLFHLDRGKLAKIILDDIECLSCDIPLSEIYSVFKTRWETTGSFKSLGDFKTYGKADNTAFRDLITAKEIEKNVQEMSKGSAPGPDGITLGDVVKMDPEGSRTMEIFNLWLTTGKIPDMVRGCRTVLIPKSSDPDRLKDINNWRPITIGSILLRLFSRIVTARLSKACPLNPRQRGFIRAAGCSENLKLLQTIIWSAKREHRPLGVVFVDIAKAFDTVSHQHIIHALQQREVDPHIVGLVSNMYENISTYITTKRNTHTDKIQIRVGVKQGDPMSPLLFNLAMDPLLCKLEESGKGYHRGQSSITAMAFADDLVLLSDSWEGMNTNISILETFCNLTGLKTQGQKCHGFYIKPTKKSYTINDCAAWTINGTPLNMIDPGESEKYLGLQFDPWIGIARSGLSTKLDFWLQRIDQAPLKPLQKLDILKTYTIPRLIYIADHSEVKTALLETLDQKIRTAVKEWLHLPPCTCDAILYSSTRDGGLGITKLAGLIPSVQARRLHRIAQSSDETMKCFMEKEKMEQLHKKLWIQAGGDRENIPSIWEAPPSSEPPNNVSTNSEWEAPTQKDKFPKPCNWRKNEFKKWTKLASQGRGIVNFERDKISNHWIQYYRRIPHRKLLTALQLRANVYPTREFLARGRQDQYIKACRHCDADIESCAHIIGNCPVTQDARIKRHNKICELLLEEAKKKDWVVFKEPHIRDSNKELYKPDLIFVKDGRALVVDVTVRYEAAKSSLEEAAAEKVRKYKHLETEVRHLTNAKDVTFVGFPLGARGKWHQDNFKLLTELGLSKSRQVKMAETFSTVALFSSVDIVHMFASRARKSMVM

SEQ ID NO: 1430 - protein, 1390 aa, synthetic construct
MASCPKPGPPVSAGAMSLESGLTTHSVLAIERGPNSLANSGSDFGGGGLGLPLRLLRVSVGTQTSRSDWVDLVSWSHPGPTSKSQQVDLVSLFPKHRVDLLSKNDQVDLVAQFLPSKFPPNLAENDLALLVNLEFYRSDLHVYECVHKAAHWEGLSGLPEVYEQLAPQPCVGETLHSSLPRDSELFVPEEGSSEKESEDAPKTSPPTPGKHGLEQTGEEKVMVTVPDKNPPCPCCGTRVNSVLNLIEHLKVSHGKRRVCFRCAKCGKENSNYHSVVCHFPKCRGPETEKAPAGEWICEVCNRDFTTKIGLGQHKRLAHPAVRNQERIVASQPKETSNRGAHKRCWTKEEEELLIRLEAQFEGHKNINKLIAEHITTKTAKQISDKRRLLSRKPAEEPRMEPGTCHHTRRAAASLRTEPEMSHQAQAEDRDNGPGRRPLPGRPAAGGRTMDEIRRHPDKGNGQQRPTKQKSEEQLQAYYKKTLEERLSAGALNTFPRAFKQVMEGRDIKLVINQTAQDCFGCLESISQIRTATRDKKYTGTREKHPKRPFQKWMKKRAIKKGNYLRFQRLFYLDRGKLAKIILDDIECLSCDIPLSEIYSVFKTRWETTGSFKSLGDFKTYGKADNTAFRELITAKEIEKNVQEMSKGSAPGPDGITLGDVVKMDPEFSLTMEIFNLWLTTGKIPDMVRGCRTVLIPKSSKPDRLKDINNWRPITIGSILLRLFSRIVTARLSKACPLNPRQRGFIRAAGCSENLKLLQTIIWSAKREHRPLGVVFVDIAKAFDTVSHQHIIHALQQREVDPHIVGLVSNMYENISTYITTKRNTHTDKIQIRVGVKQGDPMSPLLFNLAMDPLLCKLEESGKGYHRGQSSITAMAFADDLVLLSDSWEGMNTNISILETFCNLTGLKTQGQKCHGFYIKPTKDSYTINDCAAWTINGTPLNMIDPGESEKYLGLQFDPWIGIARSGLSTKLDEWLQRIDQAPLKPLQKTDILKTYTIPRLIYIADHSEVKAALLETLDQKIRTAVKEWLHLPPCTCDAILYSSTRDGGLGITKLAGLIPSVQARRLHRIAQSSDDTMKCFMEKERMEQLHKKLWIQAGGDRENIPSIWEAPPSSEPPNNVSTNSEWEAPTQKPKFPKPCNWRKNEFKKWTKLASQGRGIVNFERDKISNHWIQYYRGIPHRKLLTALQLRANVYPTREFLARGRQDQYIKACRHCDADIESCAHIIGNCPVTQDARIKRHNYICELLLEEAKKKDWVVFKEPHIRDSNKELYKPDLIFVKDGRALVVDVTVRYEAAKSSLEEAAAEKVRKYKHLETEVRHLTNAKDVTFVGFPLGARGKWHQDNFKLLTELGLSKSRQVKMAETFSTVALFSSVDIVHMFASRARKSMVM

SEQ ID NO: 1431 - protein, 1971 aa, synthetic construct; identical to SEQ ID NO: 782

SEQ ID NO: 1432 - protein, 1981 aa, synthetic construct
MAPKKKRKVPVDFHYGVRVDVTLLSKIRRVNEHIKSATKTGVVQVHGSACTPTLSVLSSVGTAGVLGLRIKNALTPLVGHTEGSGDVSFSFRNTSVGSGFTHTRELFGANVLDAGIAFYRKGEACDTGAQPQFVRTTISYGDNLTSTVHKSVVDQKGILPFHDRMEAGGRTTRLLLCGKTGAFLLKWLRQQKTKEDQTVTVSVSETLSIVTFSLGGVSKIIDFKPETKPVSGWDGLKGKKSVDVGVVHTDALSRVSLESLIAALRLCKVPGWFTPGLIWHSNEILEVEGVPTGCQSGDVKLSVLLLEVSGSETPGTSESATPEGSNISGSSCGSPNSADTSSDFKDLWTKLKECHDREVQGLQVKVTKLKQERILDAQRLEEFFTKNQQLREQQKVLHETIKVLEDRLRAGLCDRCAVTEEHMRKKQQEFENIRQQNLKLITELMNERNTLQEENKKLSEQLQQKIENDQQHQAAELECEEDVIPDSPITAFSFSGVNRLRRKENPHVRYIEQTHTKLEHSVCANEMRKVSKSSTHPQHNPNENEILVADTYDQSQSPMAKAHGTSSYTPDKSSFNLATVVAETLGLGVQEESETQGPMSPLGDELYHCLEGNHKKQPFESGSETPGTSESATPEGSPKRKVSSAEGAAKEEPKRRSARLSAKPPAKVEAKPKKAAAKDKSSDKKVQTKGKRGAKGKQAEVANQETKEDLPAENGETKTEESPASDEAGEKEAKSDSGSETPGTSESATPESYEQLAPQPCVGETLHSSLPRDSELFVPEEGSSEKESEDAPKTSPPTPGKHGLEQTGEEKVMVTVPDKNPPCPCCGTRVNSVLNLIEHLKVSHGKRGVCFRCAKCGKENSNYHSVVCHFKKCRGPETEKAPAGEWICEVCNRDFTTKIGLGQHKRLAHPAVRNQERIVASQPKETSNRGAHKRCWTKEEEELLIRLEAQFEGNKNINKLIAEHITTKTAKQISDKRRLLSRKPAEEPREEPGTCHHTRRAAASLRTEPEMSHHAQAEDRDNGPGRRPLPGRAAAGGRTMDEIRRHPDKGNGQQRPTKQKSEEQLQAYYKKTLEERLSAGALNTFPRAFKQVMEGRDIKLVINQTAQDCFGCLESISQIRTATRDKKDTVTREKHPKKPFQKWMKKRAIKKGNYLRFQRLFYLDRGKLAKIILDDIECLSCDIPLSEIYSVFKTRWETTGSFKSLGDFKTYGKADNTAFRELITAKEIEKNVQEMSKGSAPGPDGITLGDVVKMDPEFSRTMEIFNLWLTTGKIPDMVRGCRTVLIPKSSKPDRLKDINNWRPITIGSILLRLFSRIVTARLSKACPLNPRQRGFIRAAGCSENLKLLQTIIWSAKREHRPLGVVFVDIAKAFDTVSHQHIIHALQQREVDPHIVGLVSNMYENISTYITTKRNTHTDKIQIRVGVKQGDPMSPLLFNLAMDPLLCKLEESGKGYHRGQSSITAMAFADDLVLLSDSWENMNTNISILETFCNLTGLKTQGQKCHGFYIKPTKDSYTINDCAAWTINGTPLNMIDPGESEKYLGLQFDPWIGIARSGLSTKLDFWLQRIDQAPLKPLQKTDILKTYTIPRLIYIADHSEVKSALLETLDQKIRTAVKEWLHLPPCTCDAILYSSTRDGGLGITKLAGLIPSVQARRLHRIAQSSDDTMKCFMEKEKMEQLHKKLWIQAGGDRENIPSIWEAPPSSEPPNNVSTNSEWEAPTQKDKFPKPCNWRKNEFKKWTKLASQGRGIVNFERDKISNHWIQYYRRIPHRKLLTALQLRANVYPTREFLARGRQDQYIKACRHCDADNESCAHIIGNCPVTQDARIKRHNYICELLLEEAKKKDWVVFKEPHIRDSNKELYKPDLIFVKDGRALVVDVTVRYEAAKSSLEEAAAEKVRKYKHLETEVRHLTNAKDVTFVGFPLGARGKWHQDNFKLLTELGLSKSRQVKMAETFSTVALFSSVDIVHMFASRARKSMVM

SEQ ID NO: 1433 - protein, 1665 aa, synthetic construct
MAPKKKRKVNISGSSCGSPNSADTSSDFKDLWTKLKECHDREVQGLQVKVTKLKQERILDAQRLEEFFTKNQQLREQQKVLHETIKVLEDRLRAGLCDRCAVTEEHMRKKQQEFENIRQQNLKLITELMNERNTLQEENKKLSEQLQQKIENDQQHQAAELECEEDVIPDSPITAFSFSGVNRLRRKENPHVRYIEQTHTKLEHSVCANEMRKVSKSSTHPQHNPNENEILVADTYDQSQSPMAKAHGTSSYTPDKSSFNLATVVAETLGLGVQEESETQGPMSPLGDELYHCLEGNHKKQPFESGSETPGTSESATPEGSPKRKVSSAEGAAKEEPKRRSARLSAKPPAKVEAKPKKAAAKDKSSDKKVQTKGKRGAKGKQAEVANQETKEDLPAENGETKTEESPASDEAGEKEAKSDSGSETPGTSESATPESYEQLAPQPCVGETLHSSLPRDSELFVPEEGSSEKESEDAPKTSPPTPGKHGLEQTGEEKVMVTVPDKNPPCPCCGTRVNSVLNLIEHLKVSHGKRGVCFRCAKCGKENSNYHSVVCHFKKCRGPETEKAPAGEWICEVCNRDFTTKIGLGQHKRLAHPAVRNQERIVASQPKETSNRGAHKRCWTKEEEELLIRLEAQFEGNKNINKLIAEHITTKTAKQISDKRRLLSRKPAEEPREEPGTCHHTRRAAASLRTEPEMSHHAQAEDRDNGPGRRPLPGRAAAGGRTMDEIRRHPDKGNGQQRPTKQKSEEQLQAYYKKTLEERLSAGALNTFPRAFKQVMEGRDIKLVINQTAQDCFGCLESISQIRTATRDKKDTVTREKHPKKPFQKWMKKRAIKKGNYQTSMTDFYLDRGKLAKIILDDIECLSCDIPLSEIYSVFKTRWETTGSFKSLGDFKTYGKADNTAFRELITAKEIEKNVQEMSKGSAPGPDGITLGDVVKMDPEFSRTMEIFNLWLTTGKIPDMVRGCRTVLIPKSSKPDRLKDINNWRPITIGSILLRLFSRIVTARLSKACPLNPRQRGFIRAAGCSENLKLLQTIIWSAKREHRPLGVVFVDIAKAFDTVSHQHIIHALQQREVDPHIVGLVSNMYENISTYITTKRNTHTDKIQIRVGVKQGDPMSPLLFNLAMDPLLCKLEESGKGYHRGQSSITAMAFADDLVLLSDSWENMNTNISILETFCNLTGLKTQGQKCHGFYIKPTKDSYTINDCAAWTINGTPLNMIDPGESEKYLGLQFDPWIGIARSGLSTKLDFWLQRIDQAPLKPLQKTDILKTYTIPRLIYIADHSEVKSALLETLDQKIRTAVKEWLHLPPCTCDAILYSSTRDGGLGITKLAGLIPSVQARRLHRIAQSSDDTMKCFMEKEKMEQLHKKLWIQAGGDRENIPSIWEAPPSSEPPNNVSTNSEWEAPTQKDKFPKPCNWRKNEFKKWTKLASQGRGIVNFERDKISNHWIQYYRRIPHRKLLTALQLRANVYPTREFLARGRQDQYIKACRHCDADNESCAHIIGNCPVTQDARIKRHNYICELLLEEAKKKDWVVFKEPHIRDSNKELYKPDLIFVKDGRALVVDVTVRYEAAKSSLEEAAAEKVRKYKHLETEVRHLTNAKDVTFVGFPLGARGKWHQDNFKLLTELGLSKSRQVKMAETFSTVALFSSVDIVHMFASRARKSMVM

SEQ ID NO: 1434 - protein, 1390 aa, synthetic construct
MASCPKPGPPVSAGAMSLESGLTTHSVLAIERGPNSLANSGSDFGGGGLGLPLRLLRVSVGTQTSRSDWVDLVSWSHVGPTSKSQQVDLVSLFPKHRVDLLSKNDQVDLVAQFLPSKFPPNLAENDLALLVNLEFYRSDLHVYEGVHKAAHWEGLSGLPEVYEQLAPQPCVGETLHSSLKRDSELFVPEEGSSEKESEDAPKTSPPTPGKHGKRQTGEEKVMVTVPDKNPPCPCCGTRVNSVLNLIEHLKVSHGKRGVCFRCAKCGKENSNYHSVVCHFKKCRGPETEKAPAGEWICEVCNRDFTTKIGLGQHKRRAHPAVRNQERIVASQPKETSNRGAHKRCWTKEERELLIRLEAQFEGNKNINKLIAEHITTKTAKQISDKRRLLSRKPAEEPREMPGTCHHTRRAAASLRTEPEMSHHAQAEDRDNGPGRRPLPGRAAAGGRTMDEIRRHPDKGNGQQRPTKQKSEEQLQAYYKKTLEERLSAGALNTFPRAFKQVMEGRDIKLVINQTAQDYFGCLESISQIRTATRDKKDTVTRKKHPKKPFQKWMKKRAIKKGNYLRFQRLFHLDRGKLAKIILDDIECLSCDIPLSEIYSVFKTRWETTGSFKSLGDFKTYGKADNTAFRDLITAKEIEKNVQEMSKGSAPGPDGITLGDVVKMDPEYSITAEIFNLWLTTGKIPDMVRGCRTVLIPKSSDPDRLKDINNWRPITIGSILLRLFSRIVTARLSKACPLNPRQRGFIRAAGCSENLKLLQTIIWSAKREHRPLGVVFVDIAKAFDTVSHQHIIHALQQREVDPHIVGLVSNMYENISTYITTKRNTHTDKIQIRVGVKQGDPMSPLLFNLAMDPLLCKLEESGKGYHRGQSSITAMAFADDLVLLSDSWEGMNTNISILETFCNLTGLKTQGQKCHGFYIKPTKKSYTINDCAAWTINGTPLNMIDPGESEKYLGLQFDPWIGIARSGLSTKLDFWLQRIDQAPLKPLQKLDILKTYTIPRLIYIADHSEVKTALLELLDQKIRTAVKEWLHLPPCTCDAILYSSTRDGGLGITKLAGLIPSVQARRLHRIAQSSDETMKCFMEKEKMEQLHKKLWIQAGGDRENIPSIWEAPPSSEPPNNVSTNSEWEAPTQKDKFPKPCNWRKNEFKKWTKLASQGRGIVNFERDKISNHWIQYYRRIPHRKLLTALQLRANVYPTREFLARGRQDQYIKACRHCDADIESCAHIIGNCPVTQDARIKRHNKICELLLEEAKKKDWVVFKEPHIRDSNKELYKPDLIFVKDARALVVDVTVRYEAAKSSLEEAAAEKVRKYKHLETEVRHLTNAKDVTFVGFPLGARGKWHQDNFKLLTELGLSKSRQVKMAETFSTVALFSSVDIVHMFASRARKSMVM

SEQ ID NO: 1435 - protein, 1390 aa, synthetic construct
MASCPKPGPPVSAGAMSLESGLTTHSVLAIERGPNSLANSGSDFGGGGLGLPLRLLRVSVGTQTSRSDWVDLVSWSHPGPTSKSQQVDLVSLFPKHRVDLLSKNDQVDLVAQFLPSKFPPNLAENDLALLVNLEFYRSDLHVYECVHKAAHWEGLSGLPEVYEQLAPQPCVGETLHSSLPRDSELFVPEEGSSEKESEDAPKTSPPTPGKHGLEQTGEEKVMVTVPDKNPPCPCCGTRVNSVLNLIEHLKVSHGKRRVCFRCAKCGKENSNYHSVVCHFPKCRGPETEKAPAGEWICEVCNRDFTTKIGLGQHKRLAHPAVRNQERIVASQPKETSNRGAHKRCWTKEEEELLIRLEAQFEGHKNINKLIAEHITTKTAKQISDKRRLLSRKPAEEPRMEPGTCHHTRRAAASLRTEPEMSHQAQAEDRDNGPGRRPLPGRPAAGGRTMDEIRRHPDKGNGQQRPTKQKSEEQLQAYYKKTLEERLSAGALNTFPRAFKQVMEGRDIKLVINQTAQDCFGCLESISQIRTATRDKKYTGTREKHPKRPFQKWMKKRAIKKGNYLRFQRLFYLDRGKLAKIILDDIECLSCDIPLSEIYSVFKTRWETTGSFKSLGDFKTYGKADNTAFRELITAKEIEKNVQEMSKGSAPGPDGITLGDVVKMDPEFSLTMEIFNLWLTTGKIPDMVRGCRTVLIPKSSKPDRLKDINNWRPITIGSILLRLFSRIVTARLSKACPLNPRQRGFIRAAGCSENLKLLQTIIWSAKREHRPLGVVFVDIAKAFDTVSHQHIIHALQQREVDPHIVGLVSNMYENISTYITTKRNTHTDKIQIRVGVKQGDPMSPLLFNLAMDPLLCKLEESGKGYHRGQSSITAMAFADDLVLLSDSWEGMNTNISILETFCNLTGLKTQGQKCHGFYIKPTKDSYTINDCAAWTINGTPLNMIDPGESEKYLGLQFDPWIGIARSGLSTKLDEWLQRIDQAPLKPLQKTDILKTYTIPRLIYIADHSEVKAALLETLDRKIRTAVKEWLHLPPCTCDAILYSSTRDGGLGITKLAGLIPSVQARRLHRIAQSSDDTMKCFMEKERMEQLHKKLWIQAGGDRENIPSIWEAPPSSEPPNNVSTNSEWEAPTQKPKFPKPCNWRKNEFKKWTKLASQGRGIVNFERDKISNHWIQYYRGIPHRKLLTALQLRANVYPTREFLARGRQDQYIKACRHCDADIESCAHIIGNCPVTQDARIKRHNKICELLLEEAKKKDWVVFKEPHIRDSNKELYKPDLIFVKDGRALVVDVTVRYEAAKSSLEEAAAEKVRKYKHLETEVRHLTNAKDVTFVGFPLGARGKWHQDNFKLLTELGLSKSRQVKMAETFSTVALFSSVDIVHMFASRARKSMVM

SEQ ID NO: 1436 - protein, 1390 aa, synthetic construct
MASCPKPGPPVSAGAMSLESGLTTHSVLAIERGPNSLANSGSDFGGGGLGLPLRLLRVSVGTQTSRSDWVDLVSWSHPGPTSKSQQVDLVSLFPKHRVDLLSKNDQVDLVAQFLPSKFPPNLAENDLALLVNLEFYRSDLHVYECVHKAAHWEGLSGLPEVYEQLAPQPCVGETLHSSLPRDSELFVPEEGSSEKESEDAPKTSPPTPGKHGLEQTGEEKVMVTVPDKNPPCPCCGTRVNSVLNLIEHLKVSHGKRRVCFRCAKCGKENSNYHSVVCHFKKCRGPETEKAPAGEWICEVCNRDFTTKIGLGQHKRLAHPAVRNQERIVASQPKETSNRGAHKRCWTKEEEELLIRLEAQFEGHKNINKLIAEHITTKTAKQISDKRRLLSRKPAEEPRMEPGTCHHTRRAAASLRTEPEMSHHAQAEDRDNGPGRRPLPGRPAAGGRTMDEIRRHPDKGNGQQRPTKQKSEEQLQAYYKKTLEERLSAGALNTFPRAFKQVMEGRDIKLVINQTAQDCFGCLESISQIRTATRDKKYTGTREKHPKRPFQKWMKKRAIKKGNYLRFQRLFYLDRGKLAKIILDDIECLSCDIPLSEIYSVFKTRWETTGSFKSLGDFKTYGKADNTAFRELITAKEIEKNVQEMSKGSAPGPDGITLGDVVKMDPEFSLTMEIFNLWLTTGKIPDMVRGCRTVLIPKSSKPDRLKDINNWRPITIGSILLRLFSRIVTARLSKACPLNPRQRGFIRAAGCSENLKLLQTIIWSAKREHRPLGVVFVDIAKAFDTVSHQHIIHALQQREVDPHIVGLVSNMYENISTYITTKRNTHTDKIQIRVGVKQGDPMSPLLFNLAMDPLLCKLEESGKGYHRGQSSITAMAFADDLVLLSDSWENMNTNISILETFCNLTGLKTQGQKCHGFYIKPTKDSYTINDCAAWTINGTPLNMIDPGESEKYLGLQFDPWIGIARSGLSTKLDEWLQRIDQAPLKPLQKTDILKTYTIPRLIYIADHSEVKAALLETLDQKIRTAVKEWLHLPPCTCDAILYSSTRDGGLGITKLAGLIPSVQARRLHRIAQSSDDTMKCFMEKERMEQLHKKLWIQAGGDRENIPSIWEAPPSSEPPNNVSTNSEWEAPTQKPKFPKPCNWRKNEFKKWTKLASQGRGIVNFERDKISNHWIQYYRGIPHRKLLTALQLRANVYPTREFLARGRQDQYIKACRHCDADIESCAHIIGNCPVTQDARIKRHNYICELLLEEAKKKDWVVFKEPHIRDSNKELYKPDLIFVKDGRALVVDVTVRYEAAKSSLEEAAAEKVRKYKHLETEVRHLTNAKDVTFVGFPLGARGKWHQDNFKLLTELGLSKSRQVKMAETFSTVALFSSVDIVHMFASRARKSMVM

SEQ ID NO: 1437 - protein, 1671 aa, synthetic construct
MGTALTPLLTKFATRYEMGTTPEEVANTLKQTCFKGQVNDSQMVALLIVADQYKLNPFTKELYAFPDKNNGIVPVVGVDGWARIINENPQFDGMEFSMDQQGTECTCKIYRKDRSHAISATEYMAECKRNTQPWQSHPRRMLRHKAMIQCARLAFGFAGIYDQDEAERIVERDVTPAEQYEDVSEAICLIKDSPTMEDLQAAFSNAWKAYKTKGARDQLTAAKDQRKKELLDAPIDVEFEETGDDRAASGGSSGGSSGSETPGTSESATPESSGGSSGGSSMASCPKPGPPVSAGAMSLESGLTTHSVLAIERGPNSLANSGSDFGGGGLGLPLRLLRVSVGTQTSRSDWVDLVSWSHPGPTSKSQQVDLVSLFPKHRVDLLSKNDQVDLVAQFLPSKFPPNLAENDLALLVNLEFYRSDLHVYECVHKAAHWEGLSGLPEVYEQLAPQPCVGETLHSSLPRDSELFVPEEGSSEKESEDAPKTSPPTPGKHGLEQTGEEKVMVTVPDKNPPCPCCGTRVNSVLNLIEHLKVSHGKRRVCFRCAKCGKENSNYHSVVCHFKKCRGPETEKAPAGEWICEVCNRDFTTKIGLGQHKRLAHPAVRNQERIVASQPKETSNRGAHKRCWTKEEEELLIRLEAQFEGHKNINKLIAEHITTKTAKQISDKRRLLSRKPAEEPRMEPGTCHHTRRAAASLRTEPEMSHHAQAEDRDNGPGRRPLPGRPAAGGRTMDEIRRHPDKGNGQQRPTKQKSEEQLQAYYKKTLEERLSAGALNTFPRAFKQVMEGRDIKLVINQTAQDCFGCLESISQIRTATRDKKYTGTREKHPKRPFQKWMKKRAIKKGNYLRFQRLFYLDRGKLAKIILDDIECLSCDIPLSEIYSVFKTRWETTGSFKSLGDFKTYGKADNTAFRELITAKEIEKNVQEMSKGSAPGPDGITLGDVVKMDPEFSLTMEIFNLWLTTGKIPDMVRGCRTVLIPKSSKPDRLKDINNWRPITIGSILLRLFSRIVTARLSKACPLNPRQRGFIRAAGCSENLKLLQTIIWSAKREHRPLGVVFVDIAKAFDTVSHQHIIHALQQREVDPHIVGLVSNMYENISTYITTKRNTHTDKIQIRVGVKQGDPMSPLLFNLAMDPLLCKLEESGKGYHRGQSSITAMAFADDLVLLSDSWENMNTNISILETFCNLTGLKTQGQKCHGFYIKPTKDSYTINDCAAWTINGTPLNMIDPGESEKYLGLQFDPWIGIARSGLSTKLDEWLQRIDQAPLKPLQKTDILKTYTIPRLIYIADHSEVKAALLETLDQKIRTAVKEWLHLPPCTCDAILYSSTRDGGLGITKLAGLIPSVQARRLHRIAQSSDDTMKCFMEKERMEQLHKKLWIQAGGDRENIPSIWEAPPSSEPPNNVSTNSEWEAPTQKPKFPKPCNWRKNEFKKWTKLASQGRGIVNFERDKISNHWIQYYRRIPHRKLLTALQLRANVYPTREFLARGRQDQYIKACRHCDADIESCAHIIGNCPVTQDARIKRHNYICELLLEEAKKKDWVVFKEPHIRDSNKELYKPDLIFVKDGRALVVDVTVRYEAAKSSLEEAAAEKVRKYKHLETEVRHLTNAKDVTFVGFPLGARGKWHQDNFKLLTELGLSKSRQVKMAETFSTVALFSSVDIVHMFASRARKSMVM

SEQ ID NO: 1438 - protein, 1928 aa, synthetic construct
MAPKKKRKVGTALTPLLTKFATRYEMGTTPEEVANTLKQTCFKGQVNDSQMVALLIVADQYKLNPFTKELYAFPDKNNGIVPVVGVDGWARIINENPQFDGMEFSMDQQGTECTCKIYRKDRSHAISATEYMAECKRNTQPWQSHPRRMLRHKAMIQCARLAFGFAGIYDQDEAERIVERDVTPAEQYEDVSEAICLIKDSPTMEDLQAAFSNAWKAYKTKGARDQLTAAKDQRKKELLDAPIDVEFEETGDDRAASGSETPGTSESATPESNISGSSCGSPNSADTSSDFKDLWTKLKECHDREVQGLQVKVTKLKQERILDAQRLEEFFTKNQQLREQQKVLHETIKVLEDRLRAGLCDRCAVTEEHMRKKQQEFENIRQQNLKLITELMNERNTLQEENKKLSEQLQQKIENDQQHQAAELECEEDVIPDSPITAFSFSGVNRLRRKENPHVRYIEQTHTKLEHSVCANEMRKVSKSSTHPQHNPNENEILVADTYDQSQSPMAKAHGTSSYTPDKSSFNLATVVAETLGLGVQEESETQGPMSPLGDELYHCLEGNHKKQPFESGSETPGTSESATPEGSPKRKVSSAEGAAKEEPKRRSARLSAKPPAKVEAKPKKAAAKDKSSDKKVQTKGKRGAKGKQAEVANQETKEDLPAENGETKTEESPASDEAGEKEAKSDSGSETPGTSESATPESYEQLAPQPCVGETLHSSLPRDSELFVPEEGSSEKESEDAPKTSPPTPGKHGLEQTGEEKVMVTVPDKNPPCPCCGTRVNSVLNLIEHLKVSHGKRGVCFRCAKCGKENSNYHSVVCHFKKCRGPETEKAPAGEWICEVCNRDFTTKIGLGQHKRLAHPAVRNQERIVASQPKETSNRGAHKRCWTKEEEELLIRLEAQFEGNKNINKLIAEHITTKTAKQISDKRRLLSRKPAEEPREEPGTCHHTRRAAASLRTEPEMSHHAQAEDRDNGPGRRPLPGRAAAGGRTMDEIRRHPDKGNGQQRPTKQKSEEQLQAYYKKTLEERLSAGALNTFPRAFKQVMEGRDIKLVINQTAQDCFGCLESISQIRTATRDKKDTVTREKHPKKPFQKWMKKRAIKKGNYLRFQRLFYLDRGKLAKIILDDIECLSCDIPLSEIYSVFKTRWETTGSFKSLGDFKTYGKADNTAFRELITAKEIEKNVQEMSKGSAPGPDGITLGDVVKMDPEFSRTMEIFNLWLTTGKIPDMVRGCRTVLIPKSSKPDRLKDINNWRPITIGSILLRLFSRIVTARLSKACPLNPRQRGFIRAAGCSENLKLLQTIIWSAKREHRPLGVVFVDIAKAFDTVSHQHIIHALQQREVDPHIVGLVSNMYENISTYITTKRNTHTDKIQIRVGVKQGDPMSPLLFNLAMDPLLCKLEESGKGYHRGQSSITAMAFADDLVLLSDSWENMNTNISILETFCNLTGLKTQGQKCHGFYIKPTKDSYTINDCAAWTINGTPLNMIDPGESEKYLGLQFDPWIGIARSGLSTKLDFWLQRIDQAPLKPLQKTDILKTYTIPRLIYIADHSEVKSALLETLDQKIRTAVKEWLHLPPCTCDAILYSSTRDGGLGITKLAGLIPSVQARRLHRIAQSSDDTMKCFMEKEKMEQLHKKLWIQAGGDRENIPSIWEAPPSSEPPNNVSTNSEWEAPTQKDKFPKPCNWRKNEFKKWTKLASQGRGIVNFERDKISNHWIQYYRRIPHRKLLTALQLRANVYPTREFLARGRQDQYIKACRHCDADNESCAHIIGNCPVTQDARIKRHNYICELLLEEAKKKDWVVFKEPHIRDSNKELYKPDLIFVKDGRALVVDVTVRYEAAKSSLEEAAAEKVRKYKHLETEVRHLTNAKDVTFVGFPLGARGKWHQDNFKLLTELGLSKSRQVKMAETFSTVALFSSVDIVHMFASRARKSMVM

SEQ ID NO: 1439 - protein, 2087 aa, synthetic construct; identical to SEQ ID NO: 783

SEQ ID NO: 1440 - protein, 8 aa, synthetic construct
QTSMTDFY

SEQ ID NO: 1441 - protein, 1390 aa, synthetic construct
MASCPKPGPPVSAGAMSLESGLTTHSVLAIERGPNSLANSGSDFGGGGLGLPLRLLRVSVGTQTSRSDWVDLVSWSHPGPTSKSQQVDLVSLFPKHRVDLLSKNDQVDLVAQFLPSKFPPNLAENDLALLVNLEFYRSDLHVYECVHFAAHWEGLSGLPEVYEQLAPQPCVGETLHSSLPRDSELFVPEEGSSEKESEDAPKTSPPTPGKHGLEQTGEEKVMVTVPDKNPPCPCCGTRVNSVLNLIEHLKVSHGKRGVCFRCAKCGKENSNYHSVVCHFPKCRGPETEKAPAGEWICEVCNRDFTTKIGLGQHKRLAHPAVRNQERIVASQPKETSNRGAHKRCWTKEEEELLIRLEAQFEGNKNINKLIAEHITTKTAKQISDKRRLLSRKPAEEPREEPGTCHHTRRAAASLRTEPEMSHHAQAEDRDNGPGRRPLPGRAAAGGRTMDEIRRHPDKGNGQQRPTKQKSEEQLQAYYKKTLEERLSAGALNTFPRAFKQVMEGRDIKLVINQTAQDCFGCLESISQIRTATRDKKDTVTREKHPKKPFQKWMKDRAIKKGNYLRFQRLFYLDRGKLAKIILDDIECLSCDIPLSEIYSVFKTRWETTGSFKSLGDFKTYGKADNTAFRELITAKEIEKNVQEMSKGSAPGPDGITLGDVVKMDPEFSRTMEIFNLWLTTGKIPDMVRGCRTVLIPKSSKPDRLKDINNWRPITIGSILLRLFSRIVTARLSKACPLNPRQRGFIRAAGCSENLKLLQTIIWSAKREHRPLGVVFVDIAKAFDTVSHQHIIHALQQREVDPHIVGLVSNMYENISTYITTKRNTHTDKIQIRVGVKQGDPMSPLLFNLAMDPLLCKLEESGKGYHRGQSSITAMAFADDLVLLSDSWENMNTNISILETFCNLTGLKTQGQKCHGFYIKPTKDSYTINDCAAWTINGTPLNMIDPGESEKYLGLQFDPWIGIARSGLSTKLDFWLQRIDQAPLKPLQKTDILKTYTIPRLIYIADHSEVKTALLETLDQKIRTAVKEWLHLPPCTCDAILYSSTRDGGLGITKLAGLIPSVQARRLHRIAQSSDDTMKCFMEKEKMEQLHKKLWIQAGGDREDIPSIWEAPPSSEPPNNVSTNSEWEAPTQKDKFPKPCNWRKNEFKKWTKLASQGRGIVNFERDKISNHWIQYYRRIPHRKLLTALQLRANVYPTREFLARGRQDQYIKACRHCDADIESCAHIIGNCPVTQDARIKRHNYICELLLEEAKKKDWVVFKEPHIRDSNKELYKPDLIFVKDARALVVDVTVRYEAAKSSLEEAAAEKVRKYKHLETEVRHLTNAKDVTFVGFPLGARGKWHQDNFKLLTELGLSKSRQVKMAETFSTVALFSSVDIVHMFASRARKSMVM

SEQ ID NO: 1442 - protein, 1390 aa, synthetic construct
MASCPKPGPPVSAGAMSLESGLTTHSVLAIERGPNSLANSGSDFGGGGLGLPLRLLRVSVGTQTSRSDWVDLVSWSHPGPTSKSQQVDLVSLFPKHRVDLLSKNDQVDLVAQFLPSKFPPNLAENDLALLVNLEFYRSDLHVYECVHFAAHWEGLSGLPEVYEQLAPQPCVGETLHSSLPRDSELFVPEEGSSEKESEDAPKTSPPTPGKHGLEQTGEEKVMVTVPDKNPPCPCCGTRVNSVLNLIEHLKVSHGKRGVCFRCAKCGKENSNYHSVVCHFPKCRGPETEKAPAGEWICEVCNRDFTTKIGLGQHKRLAHPAVRNQERIVASQPKETSNRGAHKRCWTKEEEELLIRLEAQFEGNKNINKLIAEHITTKTAKQISDKRRLLSRKPAEEPREEPGTCHHTRRAAASLRTEPEMSHHAQAEDRDNGPGRRPLPGRAAAGGRTMDEIRRHPDKGNGQQRPTKQKSEEQLQAYYKKTLEERLSAGALNTFPRAFKQVMEGRDIKLVINQTAQDCFGCLESISQIRTATRDKKDTVTREKHPKKPFQKWMKKRAIKKGNYLRFQRLFYLDRGKLAKIILDDIECLSCDIPLSEIYSVFKTRWETTGSFKSLGDFKTYGKADNTAFRELITAKEIEKNVQEMSKGSAPGPDGITLGDVVKMDPEFSRTMEIFNLWLTTGKIPDMVRGCRTVLIPKSSDPDRLKDINNWRPITIGSILLRLFSRIVTARLSKACPLNPRQRGFIRAAGCSENLKLLQTIIWSAKREHRPLGVVFVDIAKAFDTVSHQHIIHALQQREVDPHIVGLVSNMYENISTYITTKRNTHTDKIQIRVGVKQGDPMSPLLFNLAMDPLLCKLEESGKGYHRGQSSITAMAFADDLVLLSDSWENMNTNISILETFCNLTGLKTQGQKCHGFYIKPTKDSYTINDCAAWTINGTPLNMIDPGESEKYLGLQFDPWIGIARSGLSTKLDFWLQRIDQAPLKPLQKTDILKTYTIPRLIYIADHSEVKTALLETLDQKIRTAVKEWLHLPPCTCDAILYSSTRDGGLGITKLAGLIPSVQARRLHRIAQSSDDTMKCFMEKEKMEQLHKKLWIQAGGDRENIPSIWEAPPSSEPPNNVSTNSEWEAPTQKDKFPKPCNWRKNEFKKWTKLASQGRGIVNFERDKISNHWIQYYRRIPHRKLLTALQLRANVYPTREFLARGRQDQYIKACRHCDADIESCAHIIGNCPVTQDARIKRHNYICELLLEEAKKKDWVVFKEPHIRDSNKELYKPDLIFVKDARALVVDVTVRYEAAKSSLEEAAAEKVRKYKHLETEVRHLTNAKDVTFVGFPLGARGKWHQDNFKLLTELGLSKSRQVKMAETFSTVALFSSVDIVHMFASRARKSMVM

SEQ ID NO: 1443 - protein, 1390 aa, synthetic construct
MASCPKPGPPVSAGAMSLESGLTTHSVLAIERGPNSLANSGSDFGGGGLGLPLRLLRVSVGTQTSRSDWVDLVSWSHPGPTSKSQQVDLVSLFPKHRVDLLSKNDQVDLVAQFLPSKFPPNLAENDLALLVNLEFYRSDLHVYECVHFAAHWEGLSGLPEVYEQLAPQPCVGETLHSSLPRDSELFVPEEGSSEKESEDAPKTSPPTPGKHGLEQTGEEKVMVTVPDKNPPCPCCGTRVNSVLNLIEHLKVSHGKRGVCFRCAKCGKENSNYHSVVCHFKKCRGPETEKAPAGEWICEVCNRDFTTKIGLGQHKRLAHPAVRNQERIVASQPKETSNRGAHKRCWTKEEEELLIRLEAQFEGNKNINKLIAEHITTKTAKQISDKRRLLSRKPAEEPREEPGTCHHTRRAAASLRTEPEMSHHAQAEDRDNGPGRRPLPGRAAAGGRTMDEIRRHPDKGNGQQRPTKQKSEEQLQAYYKKTLEERLSAGALNTFPRAFKQVMEGRDIKLVINQTAQDCFGCLESISQIRTATRDKKDTVTREKHPKKPFQKWMKKRAIKKGNYLRFQRLFYLDRGKLAKIILDDIECLSCDIPLSEIYSVFKTRWETTGSFKSLGDFKTYGKADNTAFRELITAKEIEKNVQEMSKGSAPGPDGITLGDVVKMDPEFSRTMEIFNLWLTTGKIPDMVRGCRTVLIPKSSKPDRLKDINNWRPITIGSILLRLFSRIVTARLSKACPLNPRQRGFIRAAGCSENLKLLQTIIWSAKREHRPLGVVFVDIAKAFDTVSHQHIIHALQQREVDPHIVGLVSNMYENISTYITTKRNTHTDKIQIRVGVKQGDPMSPLLFNLAMDPLLCKLEESGKGYHRGQSSITAMAFADDLVLLSDSWENMNTNISILETFCNLTGLKTQGQKCHGFYIKPTKDSYTINDCAAWTINGTPLNMIDPGESEKYLGLQFDPWIGIARSGLSTKLDFWLQRIDQAPLKPLQKTDILKTYTIPRLIYIADHSEVKTALLETLDQKIRTAVKEWLHLPPCTCDAILYSSTRDGGLGITKLAGLIPSVQARRLHRIAQSSDDTMKCFMEKEKMEQLHKKLWIQAGGDRENIPSIWEAPPSSEPPNNVSTNSEWEAPTQKDKFPKPCNWRKNEFKKWTKLASQGRGIVNFERDKISNHWIQYYRRIPHRKLLTALQLRANVYPTREFLARGRQDQYIKACRHCDADIESCAHIIGNCPVTQDARIKRHNYICELLLEEAKKKDWVVFKEPHIRDSNKELYKPDLIFVKDARALVVDVTVRYEAAKSSLEEAAAEKVRKYKHLETEVRHLTNAKDVTFVGFPLGARGKWHQDNFKLLTELGLSKSRQVKMAETFSTVALFSSVDIVHMFASRARKSMVM

SEQ ID NO: 1444 - protein, 1390 aa, synthetic construct
MASCPKPGPPVSAGAMSLESGLTTHSVLAIERGPNSLANSGSDFGGGGLGLPLRLLRVSVGTQTSRSDWVDLVSWSHPGPTSKSQQVDLVSLFPKHRVDLLSKNDQVDLVAQFLPSKFPPNLAENDLALLVNLEFYRSDLHVYECVHFAAHWEGLSGLPEVYEQLAPQPCVGETLHSSLPRDSELFVPEEGSSEKESEDAPKTSPPTPGKHGLEQTGEEKVMVTVPDKNPPCPCCGTRVNSVLNLIEHLKVSHGKRGVCFRCAKCGKENSNYHSVVCHFPKCRGPETEKAPAGEWICEVCNRDFTTKIGLGQHKRLAHPAVRNQERIVASQPKETSNRGAHKRCWTKEEEELLIRLEAQFEGNKNINKLIAEHITTKTAKQISDKRRLLSRKPAEEPREEPGTCHHTRRAAASLRTEPEMSHHAQAEDRDNGPGRRPLPGRAAAGGRTMDEIRRHPDKGNGQQRPTKQKSEEQLQAYYKKTLEERLSAGALNTFPRAFKQVMEGRDIKLVINQTAQDCFGCLESISQIRTATRDKKDTVTREKHPKKPFQKWMKKRAIKKGNYLRFQRLFYLDRGKLAKIILDDIECLSCDIPLSEIYSVFKTRWETTGSFKSLGDFKTYGKADNTAFRELITAKEIEKNVQEMSKGSAPGPDGITLGDVVKMDPEFSRTMEIFNLWLTTGKIPDMVRGCRTVLIPKSSKPDRLKDINNWRPITIGSILLRLFSRIVTARLSKACPLNPRQRGFIRAAGCSENLKLLQTIIWSAKREHRPLGVVFVDIAKAFDTVSHQHIIHALQQREVDPHIVGLVSNMYENISTYITTKRNTHTDKIQIRVGVKQGDPMSPLLFNLAMDPLLCKLEESGKGYHRGQSSITAMAFADDLVLLSDSWENMNTNISILETFCNLTGLKTQGQKCHGFYIKPTKDSYTINDCAAWTINGTPLNMIDPGESEKYLGLQFDPWIGIARSGLSTKLDFWLQRIDQAPLKPLQKLDILKTYTIPRLIYIADHSEVKTALLETLDQKIRTAVKEWLHLPPCTCDAILYSSTRDGGLGITKLAGLIPSVQARRLHRIAQSSDDTMKCFMEKEKMEQLHKKLWIQAGGDRENIPSIWEAPPSSEPPNNVSTNSEWEAPTQKDKFPKPCNWRKNEFKKWTKLASQGRGIVNFERDKISNHWIQYYRRIPHRKLLTALQLRANVYPTREFLARGRQDQYIKACRHCDADIESCAHIIGNCPVTQDARIKRHNYICELLLEEAKKKDWVVFKEPHIRDSNKELYKPDLIFVKDARALVVDVTVRYEAAKSSLEEAAAEKVRKYKHLETEVRHLTNAKDVTFVGFPLGARGKWHQDNFKLLTELGLSKSRQVKMAETFSTVALFSSVDIVHMFASRARKSMVM

SEQ ID NO: 1445 - protein, 1390 aa, synthetic construct
MASCPKPGPPVSAGAMSLESGLTTHSVLAIERGPNSLANSGSDFGGGGLGLPLRLLRVSVGTQTSRSDWVDLVSWSHPGPTSKSQQVDLVSLFPKHRVDLLSKNDQVDLVAQFLPSKFPPNLAENDLALLVNLEFYRSDLHVYECVHFAAHWEGLSGLPEVYEQLAPQPCVGETLHSSLPRDSELFVPEEGSSEKESEDAPKTSPPTPGKHGLEQTGEEKVMVTVPDKNPPCPCCGTRVNSVLNLIEHLKVSHGKRGVCFRCAKCGKENSNYHSVVCHFPKCRGPETEKAPAGEWICEVCNRDFTTKIGLGQHKRLAHPAVRNQERIVASQPKETSNRGAHKRCWTKEEEELLIRLEAQFEGNKNINKLIAEHITTKTAKQISDKRRLLSRKPAEEPREEPGTCHHTRRAAASLRTEPEMSHHAQAEDRDNGPGRRPLPGRAAAGGRTMDEIRRHPDKGNGQQRPTKQKSEEQLQAYYKKTLEERLSAGALNTFPRAFKQVMEGRDIKLVINQTAQDCFGCLESISQIRTATRDKKDTVTREKHPKKPFQKWMKKRAIKKGNYLRFQRLFYLDRGKLAKIILDDIECLSCDIPLSEIYSVFKTRWETTGSFKSLGDFKTYGKADNTAFRELITAKEIEKNVQEMSKGSAPGPDGITLGDVVKMDPEGSRTMEIFNLWLTTGKIPDMVRGCRTVLIPKSSKPDRLKDINNWRPITIGSILLRLFSRIVTARLSKACPLNPRQRGFIRAAGCSENLKLLQTIIWSAKREHRPLGVVFVDIAKAFDTVSHQHIIHALQQREVDPHIVGLVSNMYENISTYITTKRNTHTDKIQIRVGVKQGDPMSPLLFNLAMDPLLCKLEESGKGYHRGQSSITAMAFADDLVLLSDSWENMNTNISILETFCNLTGLKTQGQKCHGFYIKPTKDSYTINDCAAWTINGTPLNMIDPGESEKYLGLQFDPWIGIARSGLSTKLDFWLQRIDQAPLKPLQKTDILKTYTIPRLIYIADHSEVKTALLETLDQKIRTAVKEWLHLPPCTCDAILYSSTRDGGLGITKLAGLIPSVQARRLHRIAQSSDDTMKCFMEKEKMEQLHKKLWIQAGGDRENIPSIWEAPPSSEPPNNVSTNSEWEAPTQKDKFPKPCNWRKNEFKKWTKLASQGRGIVNFERDKISNHWIQYYRRIPHRKLLTALQLRANVYPTREFLARGRQDQYIKACRHCDADIESCAHIIGNCPVTQDARIKRHNYICELLLEEAKKKDWVVFKEPHIRDSNKELYKPDLIFVKDARALVVDVTVRYEAAKSSLEEAAAEKVRKYKHLETEVRHLTNAKDVTFVGFPLGARGKWHQDNFKLLTELGLSKSRQVKMAETFSTVALFSSVDIVHMFASRARKSMVM

SEQ ID NO: 1446 - protein, 1390 aa, synthetic construct
MASCPKPGPPVSAGAMSLESGLTTHSVLAIERGPNSLANSGSDFGGGGLGLPLRLLRVSVGTQTSRSDWVDLVSWSHPGPTSKSQQVDLVSLFPKHRVDLLSKNDQVDLVAQFLPSKFPPNLAENDLALLVNLEFYRSDLHVYECVHFAAHWEGLSGLPEVYEQLAPQPCVGETLHSSLPRDSELFVPEEGSSEKESEDAPKTSPPTPGKHGLEQTGEEKVMVTVPDKNPPCPCCGTRVNSVLNLIEHLKVSHGKRGVCFRCAKCGKENSNYHSVVCHFPKCRGPETEKAPAGEWICEVCNRDFTTKIGLGQHKRLAHPAVRNQERIVASQPKETSNRGAHKRCWTKEEEELLIRLEAQFEGNKNINKLIAEHITTKTAKQISDKRRLLSRKPAEEPREEPGTCHHTRRAAASLRTEPEMSHHAQAEDRDNGPGRRPLPGRAAAGGRTMDEIRRHPDKGNGQQRPTKQKSEEQLQAYYKKTLEERLSAGALNTFPRAFKQVMEGRDIKLVINQTAQDCFGCLESISQIRTATRDKKDTVTRKKHPKKPFQKWMKKRAIKKGNYLRFQRLFYLDRGKLAKIILDDIECLSCDIPLSEIYSVFKTRWETTGSFKSLGDFKTYGKADNTAFRELITAKEIEKNVQEMSKGSAPGPDGITLGDVVKMDPEFSRTMEIFNLWLTTGKIPDMVRGCRTVLIPKSSKPDRLKDINNWRPITIGSILLRLFSRIVTARLSKACPLNPRQRGFIRAAGCSENLKLLQTIIWSAKREHRPLGVVFVDIAKAFDTVSHQHIIHALQQREVDPHIVGLVSNMYENISTYITTKRNTHTDKIQIRVGVKQGDPMSPLLFNLAMDPLLCKLEESGKGYHRGQSSITAMAFADDLVLLSDSWENMNTNISILETFCNLTGLKTQGQKCHGFYIKPTKDSYTINDCAAWTINGTPLNMIDPGESEKYLGLQFDPWIGIARSGLSTKLDFWLQRIDQAPLKPLQKTDILKTYTIPRLIYIADHSEVKTALLETLDQKIRTAVKEWLHLPPCTCDAILYSSTRDGGLGITKLAGLIPSVQARRLHRIAQSSDDTMKCFMEKEKMEQLHKKLWIQAGGDRENIPSIWEAPPSSEPPNNVSTNSEWEAPTQKDKFPKPCNWRKNEFKKWTKLASQGRGIVNFERDKISNHWIQYYRRIPHRKLLTALQLRANVYPTREFLARGRQDQYIKACRHCDADIESCAHIIGNCPVTQDARIKRHNYICELLLEEAKKKDWVVFKEPHIRDSNKELYKPDLIFVKDARALVVDVTVRYEAAKSSLEEAAAEKVRKYKHLETEVRHLTNAKDVTFVGFPLGARGKWHQDNFKLLTELGLSKSRQVKMAETFSTVALFSSVDIVHMFASRARKSMVM

SEQ ID NO: 1447 - protein, 1390 aa, synthetic construct
MASCPKPGPPVSAGAMSLESGLTTHSVLAIERGPNSLANSGSDFGGGGLGLPLRLLRVSVGTQTSRSDWVDLVSWSHPGPTSKSQQVDLVSLFPKHRVDLLSKNDQVDLVAQFLPSKFPPNLAENDLALLVNLEFYRSDLHVYECVHFAAHWEGLSGLPEVYEQLAPQPCVGETLHSSLPRDSELFVPEEGSSEKESEDAPKTSPPTPGKHGLEQTGEEKVMVTVPDKNPPCPCCGTRVNSVLNLIEHLKVSHGKRGVCFRCAKCGKENSNYHSVVCHFPKCRGPETEKAPAGEWICEVCNRDFTTKIGLGQHKRLAHPAVRNQERIVASQPKETSNRGAHKRCWTKEEEELLIRLEAQFEGNKNINKLIAEHITTKTAKQISDKRRLLSRKPAEEPREEPGTCHHTRRAAASLRTEPEMSHHAQAEDRDNGPGRRPLPGRAAAGGRTMDEIRRHPDKGNGQQRPTKQKSEEQLQAYYKKTLEERLSAGALNTFPRAFKQVMEGRDIKLVINQTAQDCFGCLESISQIRTATRDKKDTVTREKHPKKPFQKWMKKRAIKKGNYLRFQRLFYLDRGKLAKIILDDIECLSCDIPLSEIYSVFKTRWETTGSFKSLGDFKTYGKADNTAFRELITAKEIEKNVQEMSKGSAPGPDGITLGDVVKMDPEFSRTMEIFNLWLTTGKIPDMVRGCRTVLIPKSSKPDRLKDINNWRPITIGSILLRLFSRIVTARLSKACPLNPRQRGFIRAAGCSENLKLLQTIIWSAKREHRPLGVVFVDIAKAFDTVSHQHIIHALQQREVDPHIVGLVSNMYENISTYITTKRNTHTDKIQIRVGVKQGDPMSPLLFNLAMDPLLCKLEESGKGYHRGQSSITAMAFADDLVLLSDSWENMNTNISILETFCNLTGLKTQGQKCHGFYIKPTKKSYTINDCAAWTINGTPLNMIDPGESEKYLGLQFDPWIGIARSGLSTKLDFWLQRIDQAPLKPLQKTDILKTYTIPRLIYIADHSEVKTALLETLDQKIRTAVKEWLHLPPCTCDAILYSSTRDGGLGITKLAGLIPSVQARRLHRIAQSSDDTMKCFMEKEKMEQLHKKLWIQAGGDRENIPSIWEAPPSSEPPNNVSTNSEWEAPTQKDKFPKPCNWRKNEFKKWTKLASQGRGIVNFERDKISNHWIQYYRRIPHRKLLTALQLRANVYPTREFLARGRQDQYIKACRHCDADIESCAHIIGNCPVTQDARIKRHNYICELLLEEAKKKDWVVFKEPHIRDSNKELYKPDLIFVKDARALVVDVTVRYEAAKSSLEEAAAEKVRKYKHLETEVRHLTNAKDVTFVGFPLGARGKWHQDNFKLLTELGLSKSRQVKMAETFSTVALFSSVDIVHMFASRARKSMVM

SEQ ID NO: 1448 - protein, 1390 aa, synthetic construct
MASCPKPGPPVSAGAMSLESGLTTHSVLAIERGPNSLANSGSDFGGGGLGLPLRLLRVSVGTQTSRSDWVDLVSWSHPGPTSKSQQVDLVSLFPKHRVDLLSKNDQVDLVAQFLPSKFPPNLAENDLALLVNLEFYRSDLHVYECVHFAAHWEGLSGLPEVYEQLAPQPCVGETLHSSLPRDSELFVPEEGSSEKESEDAPKTSPPTPGKHGLEQTGEEKVMVTVPDKNPPCPCCGTRVNSVLNLIEHLKVSHGKRGVCFRCAKCGKENSNYHSVVCHFPKCRGPETEKAPAGEWICEVCNRDFTTKIGLGQHKRLAHPAVRNQERIVASQPKETSNRGAHKRCWTKEEEELLIRLEAQFEGNKNINKLIAEHITTKTAKQISDKRRLLSRKPAEEPREEPGTCHHTRRAAASLRTEPEMSHHAQAEDRDNGPGRRPLPGRAAAGGRTMDEIRRHPDKGNGQQRPTKQKSEEQLQAYYKKTLEERLSAGALNTFPRAFKQVMEGRDIKLVINQTAQDYFGCLESISQIRTATRDKKDTVTREKHPKKPFQKWMKDRAIKKGNYLRFQRLFYLDRGKLAKIILDDIECLSCDIPLSEIYSVFKTRWETTGSFKSLGDFKTYGKADNTAFRELITAKEIEKNVQEMSKGSAPGPDGITLGDVVKMDPEFSRTMEIFNLWLTTGKIPDMVRGCRTVLIPKSSDPDRLKDINNWRPITIGSILLRLFSRIVTARLSKACPLNPRQRGFIRAAGCSENLKLLQTIIWSAKREHRPLGVVFVDIAKAFDTVSHQHIIHALQQREVDPHIVGLVSNMYENISTYITTKRNTHTDKIQIRVGVKQGDPMSPLLFNLAMDPLLCKLEESGKGYHRGQSSITAMAFADDLVLLSDSWENMNTNISILETFCNLTGLKTQGQKCHGFYIKPTKDSYTINDCAAWTINGTPLNMIDPGESEKYLGLQFDPWIGIARSGLSTKLDFWLQRIDQAPLKPLQKTDILKTYTIPRLIYIADHSEVKTALLETLDQKIRTAVKEWLHLPPCTCDAILYSSTRDGGLGITKLAGLIPSVQARRLHRIAQSSDDTMKCFMEKEKMEQLHKKLWIQAGGDRENIPSIWEAPPSSEPPNNVSTNSEWEAPTQKDKFPKPCNWRKNEFKKWTKLASQGRGIVNFERDKISNHWIQYYRRIPHRKLLTALQLRANVYPTREFLARGRQDQYIKACRHCDADIESCAHIIGNCPVTQDARIKRHNYICELLLEEAKKKDWVVFKEPHIRDSNKELYKPDLIFVKDARALVVDVTVRYEAAKSSLEEAAAEKVRKYKHLETEVRHLTNAKDVTFVGFPLGARGKWHQDNFKLLTELGLSKSRQVKMAETFSTVALFSSVDIVHMFASRARKSMVM

SEQ ID NO: 1449 - protein, 1390 aa, synthetic construct
MASCPKPGPPVSAGAMSLESGLTTHSVLAIERGPNSLANSGSDFGGGGLGLPLRLLRVSVGTQTSRSDWVDLVSWSHPGPTSKSQQVDLVSLFPKHRVDLLSKNDQVDLVAQFLPSKFPPNLAENDLALLVNLEFYRSDLHVYECVHFAAHWEGLSGLPEVYEQLAPQPCVGETLHSSLPRDSELFVPEEGSSEKESEDAPKTSPPTPGKHGLEQTGEEKVMVTVPDKNPPCPCCGTRVNSVLNLIEHLKVSHGKRGVCFRCAKCGKENSNYHSVVCHFPKCRGPETEKAPAGEWICEVCNRDFTTKIGLGQHKRLAHPAVRNQERIVASQPKETSNRGAHKRCWTKEEEELLIRLEAQFEGNKNINKLIAEHITTKTAKQISDKRRLLSRKPAEEPREEPGTCHHTRRAAASLRTEPEMSHHAQAEDRDNGPGRRPLPGRAAAGGRTMDEIRRHPDKGNGQQRPTKQKSEEQLQAYYKKTLEERLSAGALNTFPRAFKQVMEGRDIKLVINQTAQDCFGCLESISQIRTATRDKKDTVTREKHPKKPFQKWMKDRAIKKGNYLRFQRLFYLDRGKLAKIILDDIECLSCDIPLSEIYSVFKTRWETTGSFKSLGDFKTYGKADNTAFRELITAKEIEKNVQEMSKGSAPGPDGITLGDVVKMDPEFSRTMEIFNLWLTTGKIPDMVRGCRTVLIPKSSDPDRLKDINNWRPITIGSILLRLFSRIVTARLSKACPLNPRQRGFIRAAGCSENLKLLQTIIWSAKREHRPLGVVFVDIAKAFDTVSHQHIIHALQQREVDPHIVGLVSNMYENISTYITTKRNTHTDKIQIRVGVKQGDPMSPLLFNLAMDPLLCKLEESGKGYHRGQSSITAMAFADDLVLLSDSWEGMNTNISILETFCNLTGLKTQGQKCHGFYIKPTKDSYTINDCAAWTINGTPLNMIDPGESEKYLGLQFDPWIGIARSGLSTKLDFWLQRIDQAPLKPLQKTDILKTYTIPRLIYIADHSEVKTALLETLDQKIRTAVKEWLHLPPCTCDAILYSSTRDGGLGITKLAGLIPSVQARRLHRIAQSSDDTMKCFMEKEKMEQLHKKLWIQAGGDRENIPSIWEAPPSSEPPNNVSTNSEWEAPTQKDKFPKPCNWRKNEFKKWTKLASQGRGIVNFERDKISNHWIQYYRRIPHRKLLTALQLRANVYPTREFLARGRQDQYIKACRHCDADIESCAHIIGNCPVTQDARIKRHNYICELLLEEAKKKDWVVFKEPHIRDSNKELYKPDLIFVKDARALVVDVTVRYEAAKSSLEEAAAEKVRKYKHLETEVRHLTNAKDVTFVGFPLGARGKWHQDNFKLLTELGLSKSRQVKMAETFSTVALFSSVDIVHMFASRARKSMVM

SEQ ID NO: 1450 - protein, 1390 aa, synthetic construct
MASCPKPGPPVSAGAMSLESGLTTHSVLAIERGPNSLANSGSDFGGGGLGLPLRLLRVSVGTQTSRSDWVDLVSWSHPGPTSKSQQVDLVSLFPKHRVDLLSKNDQVDLVAQFLPSKFPPNLAENDLALLVNLEFYRSDLHVYECVHFAAHWEGLSGLPEVYEQLAPQPCVGETLHSSLPRDSELFVPEEGSSEKESEDAPKTSPPTPGKHGLEQTGEEKVMVTVPDKNPPCPCCGTRVNSVLNLIEHLKVSHGKRGVCFRCAKCGKENSNYHSVVCHFPKCRGPETEKAPAGEWICEVCNRDFTTKIGLGQHKRLAHPAVRNQERIVASQPKETSNRGAHKRCWTKEEEELLIRLEAQFEGNKNINKLIAEHITTKTAKQISDKRRLLSRKPAEEPREEPGTCHHTRRAAASLRTEPEMSHHAQAEDRDNGPGRRPLPGRAAAGGRTMDEIRRHPDKGNGQQRPTKQKSEEQLQAYYKKTLEERLSAGALNTFPRAFKQVMEGRDIKLVINQTAQDCFGCLESISQIRTATRDKKDTVTREKHPKKPFQKWMKDRAIKKGNYLRFQRLFYLDRGKLAKIILDDIECLSCDIPLSEIYSVFKTRWETTGSFKSLGDFKTYGKADNTAFRELITAKEIEKNVQEMSKGSAPGPDGITLGDVVKMDPEFSRTMEIFNLWLTTGKIPDMVRGCRTVLIPKSSDPDRLKDINNWRPITIGSILLRLFSRIVTARLSKACPLNPRQRGFIRAAGCSENLKLLQTIIWSAKREHRPLGVVFVDIAKAFDTVSHQHIIHALQQREVDPHIVGLVSNMYENISTYITTKRNTHTDKIQIRVGVKQGDPMSPLLFNLAMDPLLCKLEESGKGYHRGQSSITAMAFADDLVLLSDSWENMNTNISILETFCNLTGLKTQGQKCHGFYIKPTKDSYTINDCAAWTINGTPLNMIDPGESEKYLGLQFDPWIGIARSGLSTKLDFWLQRIDQAPLKPLQKLDILKTYTIPRLIYIADHSEVKTALLETLDQKIRTAVKEWLHLPPCTCDAILYSSTRDGGLGITKLAGLIPSVQARRLHRIAQSSDDTMKCFMEKEKMEQLHKKLWIQAGGDRENIPSIWEAPPSSEPPNNVSTNSEWEAPTQKDKFPKPCNWRKNEFKKWTKLASQGRGIVNFERDKISNHWIQYYRRIPHRKLLTALQLRANVYPTREFLARGRQDQYIKACRHCDADIESCAHIIGNCPVTQDARIKRHNYICELLLEEAKKKDWVVFKEPHIRDSNKELYKPDLIFVKDARALVVDVTVRYEAAKSSLEEAAAEKVRKYKHLETEVRHLTNAKDVTFVGFPLGARGKWHQDNFKLLTELGLSKSRQVKMAETFSTVALFSSVDIVHMFASRARKSMVM

SEQ ID NO: 1451 - protein, 1390 aa, synthetic construct
MASCPKPGPPVSAGAMSLESGLTTHSVLAIERGPNSLANSGSDFGGGGLGLPLRLLRVSVGTQTSRSDWVDLVSWSHPGPTSKSQQVDLVSLFPKHRVDLLSKNDQVDLVAQFLPSKFPPNLAENDLALLVNLEFYRSDLHVYECVHFAAHWEGLSGLPEVYEQLAPQPCVGETLHSSLPRDSELFVPEEGSSEKESEDAPKTSPPTPGKHGLEQTGEEKVMVTVPDKNPPCPCCGTRVNSVLNLIEHLKVSHGKRGVCFRCAKCGKENSNYHSVVCHFKKCRGPETEKAPAGEWICEVCNRDFTTKIGLGQHKRLAHPAVRNQERIVASQPKETSNRGAHKRCWTKEEEELLIRLEAQFEGNKNINKLIAEHITTKTAKQISDKRRLLSRKPAEEPREEPGTCHHTRRAAASLRTEPEMSHHAQAEDRDNGPGRRPLPGRAAAGGRTMDEIRRHPDKGNGQQRPTKQKSEEQLQAYYKKTLEERLSAGALNTFPRAFKQVMEGRDIKLVINQTAQDCFGCLESISQIRTATRDKKDTVTRKKHPKKPFQKWMKDRAIKKGNYLRFQRLFYLDRGKLAKIILDDIECLSCDIPLSEIYSVFKTRWETTGSFKSLGDFKTYGKADNTAFRELITAKEIEKNVQEMSKGSAPGPDGITLGDVVKMDPEFSRTMEIFNLWLTTGKIPDMVRGCRTVLIPKSSKPDRLKDINNWRPITIGSILLRLFSRIVTARLSKACPLNPRQRGFIRAAGCSENLKLLQTIIWSAKREHRPLGVVFVDIAKAFDTVSHQHIIHALQQREVDPHIVGLVSNMYENISTYITTKRNTHTDKIQIRVGVKQGDPMSPLLFNLAMDPLLCKLEESGKGYHRGQSSITAMAFADDLVLLSDSWENMNTNISILETFCNLTGLKTQGQKCHGFYIKPTKDSYTINDCAAWTINGTPLNMIDPGESEKYLGLQFDPWIGIARSGLSTKLDFWLQRIDQAPLKPLQKTDILKTYTIPRLIYIADHSEVKTALLETLDQKIRTAVKEWLHLPPCTCDAILYSSTRDGGLGITKLAGLIPSVQARRLHRIAQSSDDTMKCFMEKEKMEQLHKKLWIQAGGDRENIPSIWEAPPSSEPPNNVSTNSEWEAPTQKDKFPKPCNWRKNEFKKWTKLASQGRGIVNFERDKISNHWIQYYRRIPHRKLLTALQLRANVYPTREFLARGRQDQYIKACRHCDADIESCAHIIGNCPVTQDARIKRHNYICELLLEEAKKKDWVVFKEPHIRDSNKELYKPDLIFVKDARALVVDVTVRYEAAKSSLEEAAAEKVRKYKHLETEVRHLTNAKDVTFVGFPLGARGKWHQDNFKLLTELGLSKSRQVKMAETFSTVALFSSVDIVHMFASRARKSMVM

SEQ ID NO: 1452 - protein, 1390 aa, synthetic construct
MASCPKPGPPVSAGAMSLESGLTTHSVLAIERGPNSLANSGSDFGGGGLGLPLRLLRVSVGTQTSRSDWVDLVSWSHPGPTSKSQQVDLVSLFPKHRVDLLSKNDQVDLVAQFLPSKFPPNLAENDLALLVNLEFYRSDLHVYECVHFAAHWEGLSGLPEVYEQLAPQPCVGETLHSSLPRDSELFVPEEGSSEKESEDAPKTSPPTPGKHGLEQTGEEKVMVTVPDKNPPCPCCGTRVNSVLNLIEHLKVSHGKRGVCFRCAKCGKENSNYHSVVCHFPKCRGPETEKAPAGEWICEVCNRDFTTKIGLGQHKRLAHPAVRNQERIVASQPKETSNRGAHKRCWTKEEEELLIRLEAQFEGNKNINKLIAEHITTKTAKQISDKRRLLSRKPAEEPREEPGTCHHTRRAAASLRTEPEMSHHAQAEDRDNGPGRRPLPGRAAAGGRTMDEIRRHPDKGNGQQRPTKQKSEEQLQAYYKKTLEERLSAGALNTFPRAFKQVMEGRDIKLVINQTAQDYFGCLESISQIRTATRDKKDTVTREKHPKKPFQKWMKDRAIKKGNYLRFQRLFYLDRGKLAKIILDDIECLSCDIPLSEIYSVFKTRWETTGSFKSLGDFKTYGKADNTAFRELITAKEIEKNVQEMSKGSAPGPDGITLGDVVKMDPEFSRTMEIFNLWLTTGKIPDMVRGCRTVLIPKSSKPDRLKDINNWRPITIGSILLRLFSRIVTARLSKACPLNPRQRGFIRAAGCSENLKLLQTIIWSAKREHRPLGVVFVDIAKAFDTVSHQHIIHALQQREVDPHIVGLVSNMYENISTYITTKRNTHTDKIQIRVGVKQGDPMSPLLFNLAMDPLLCKLEESGKGYHRGQSSITAMAFADDLVLLSDSWENMNTNISILETFCNLTGLKTQGQKCHGFYIKPTKDSYTINDCAAWTINGTPLNMIDPGESEKYLGLQFDPWIGIARSGLSTKLDFWLQRIDQAPLKPLQKTDILKTYTIPRLIYIADHSEVKTALLETLDQKIRTAVKEWLHLPPCTCDAILYSSTRDGGLGITKLAGLIPSVQARRLHRIAQSSDDTMKCFMEKEKMEQLHKKLWIQAGGDRENIPSIWEAPPSSEPPNNVSTNSEWEAPTQKDKFPKPCNWRKNEFKKWTKLASQGRGIVNFERDKISNHWIQYYRRIPHRKLLTALQLRANVYPTREFLARGRQDQYIKACRHCDADIESCAHIIGNCPVTQDARIKRHNKICELLLEEAKKKDWVVFKEPHIRDSNKELYKPDLIFVKDARALVVDVTVRYEAAKSSLEEAAAEKVRKYKHLETEVRHLTNAKDVTFVGFPLGARGKWHQDNFKLLTELGLSKSRQVKMAETFSTVALFSSVDIVHMFASRARKSMVM

SEQ ID NO: 1453 - protein, 1390 aa, synthetic construct
MASCPKPGPPVSAGAMSLESGLTTHSVLAIERGPNSLANSGSDFGGGGLGLPLRLLRVSVGTQTSRSDWVDLVSWSHPGPTSKSQQVDLVSLFPKHRVDLLSKNDQVDLVAQFLPSKFPPNLAENDLALLVNLEFYRSDLHVYECVHFAAHWEGLSGLPEVYEQLAPQPCVGETLHSSLPRDSELFVPEEGSSEKESEDAPKTSPPTPGKHGLEQTGEEKVMVTVPDKNPPCPCCGTRVNSVLNLIEHLKVSHGKRGVCFRCAKCGKENSNYHSVVCHFPKCRGPETEKAPAGEWICEVCNRDFTTKIGLGQHKRLAHPAVRNQERIVASQPKETSNRGAHKRCWTKEEEELLIRLEAQFEGNKNINKLIAEHITTKTAKQISDKRRLLSRKPAEEPREEPGTCHHTRRAAASLRTEPEMSHHAQAEDRDNGPGRRPLPGRAAAGGRTMDEIRRHPDKGNGQQRPTKQKSEEQLQAYYKKTLEERLSAGALNTFPRAFKQVMEGRDIKLVINQTAQDYFGCLESISQIRTATRDKKDTVTRKKHPKKPFQKWMKDRAIKKGNYLRFQRLFYLDRGKLAKIILDDIECLSCDIPLSEIYSVFKTRWETTGSFKSLGDFKTYGKADNTAFRELITAKEIEKNVQEMSKGSAPGPDGITLGDVVKMDPEFSRTMEIFNLWLTTGKIPDMVRGCRTVLIPKSSKPDRLKDINNWRPITIGSILLRLFSRIVTARLSKACPLNPRQRGFIRAAGCSENLKLLQTIIWSAKREHRPLGVVFVDIAKAFDTVSHQHIIHALQQREVDPHIVGLVSNMYENISTYITTKRNTHTDKIQIRVGVKQGDPMSPLLFNLAMDPLLCKLEESGKGYHRGQSSITAMAFADDLVLLSDSWENMNTNISILETFCNLTGLKTQGQKCHGFYIKPTKDSYTINDCAAWTINGTPLNMIDPGESEKYLGLQFDPWIGIARSGLSTKLDFWLQRIDQAPLKPLQKTDILKTYTIPRLIYIADHSEVKTALLETLDQKIRTAVKEWLHLPPCTCDAILYSSTRDGGLGITKLAGLIPSVQARRLHRIAQSSDDTMKCFMEKEKMEQLHKKLWIQAGGDRENIPSIWEAPPSSEPPNNVSTNSEWEAPTQKDKFPKPCNWRKNEFKKWTKLASQGRGIVNFERDKISNHWIQYYRRIPHRKLLTALQLRANVYPTREFLARGRQDQYIKACRHCDADIESCAHIIGNCPVTQDARIKRHNYICELLLEEAKKKDWVVFKEPHIRDSNKELYKPDLIFVKDARALVVDVTVRYEAAKSSLEEAAAEKVRKYKHLETEVRHLTNAKDVTFVGFPLGARGKWHQDNFKLLTELGLSKSRQVKMAETFSTVALFSSVDIVHMFASRARKSMVM

SEQ ID NO: 1454 - protein, 1390 aa, synthetic construct
MASCPKPGPPVSAGAMSLESGLTTHSVLAIERGPNSLANSGSDFGGGGLGLPLRLLRVSVGTQTSRSDWVDLVSWSHPGPTSKSQQVDLVSLFPKHRVDLLSKNDQVDLVAQFLPSKFPPNLAENDLALLVNLEFYRSDLHVYECVHFAAHWEGLSGLPEVYEQLAPQPCVGETLHSSLPRDSELFVPEEGSSEKESEDAPKTSPPTPGKHGLEQTGEEKVMVTVPDKNPPCPCCGTRVNSVLNLIEHLKVSHGKRGVCFRCAKCGKENSNYHSVVCHFKKCRGPETEKAPAGEWICEVCNRDFTTKIGLGQHKRLAHPAVRNQERIVASQPKETSNRGAHKRCWTKEEEELLIRLEAQFEGNKNINKLIAEHITTKTAKQISDKRRLLSRKPAEEPREEPGTCHHTRRAAASLRTEPEMSHHAQAEDRDNGPGRRPLPGRAAAGGRTMDEIRRHPDKGNGQQRPTKQKSEEQLQAYYKKTLEERLSAGALNTFPRAFKQVMEGRDIKLVINQTAQDCFGCLESISQIRTATRDKKDTVTREKHPKKPFQKWMKKRAIKKGNYLRFQRLFYLDRGKLAKIILDDIECLSCDIPLSEIYSVFKTRWETTGSFKSLGDFKTYGKADNTAFRELITAKEIEKNVQEMSKGSAPGPDGITLGDVVKMDPEFSRTMEIFNLWLTTGKIPDMVRGCRTVLIPKSSDPDRLKDINNWRPITIGSILLRLFSRIVTARLSKACPLNPRQRGFIRAAGCSENLKLLQTIIWSAKREHRPLGVVFVDIAKAFDTVSHQHIIHALQQREVDPHIVGLVSNMYENISTYITTKRNTHTDKIQIRVGVKQGDPMSPLLFNLAMDPLLCKLEESGKGYHRGQSSITAMAFADDLVLLSDSWENMNTNISILETFCNLTGLKTQGQKCHGFYIKPTKDSYTINDCAAWTINGTPLNMIDPGESEKYLGLQFDPWIGIARSGLSTKLDFWLQRIDQAPLKPLQKTDILKTYTIPRLIYIADHSEVKTALLETLDQKIRTAVKEWLHLPPCTCDAILYSSTRDGGLGITKLAGLIPSVQARRLHRIAQSSDDTMKCFMEKEKMEQLHKKLWIQAGGDRENIPSIWEAPPSSEPPNNVSTNSEWEAPTQKDKFPKPCNWRKNEFKKWTKLASQGRGIVNFERDKISNHWIQYYRRIPHRKLLTALQLRANVYPTREFLARGRQDQYIKACRHCDADIESCAHIIGNCPVTQDARIKRHNYICELLLEEAKKKDWVVFKEPHIRDSNKELYKPDLIFVKDARALVVDVTVRYEAAKSSLEEAAAEKVRKYKHLETEVRHLTNAKDVTFVGFPLGARGKWHQDNFKLLTELGLSKSRQVKMAETFSTVALFSSVDIVHMFASRARKSMVM

SEQ ID NO: 1455 - protein, 1390 aa, synthetic construct; identical to SEQ ID NO: 1375

SEQ ID NO: 1456 - protein, 1390 aa, synthetic construct; identical to SEQ ID NO: 237

SEQ ID NO: 1457 - protein, 1390 aa, synthetic construct
MASCPKPGPPVSAGAMSLESGLTTHSVLAIERGPNSLANSGSDFGGGGLGLPLRLLRVSVGTQTSRSDWVDLVSWSHPGPTSKSQQVDLVSLFPKHRVDLLSKNDQVDLVAQFLPSKFPPNLAENDLALLVNLEFYRSDLHVYECVHFAAHWEGLSGLPEVYEQLAPQPCVGETLHSSLPRDSELFVPEEGSSEKESEDAPKTSPPTPGKHGLEQTGEEKVMVTVPDKNPPCPCCGTRVNSVLNLIEHLKVSHGKRGVCFRCAKCGKENSNYHSVVCHFKKCRGPETEKAPAGEWICEVCNRDFTTKIGLGQHKRLAHPAVRNQERIVASQPKETSNRGAHKRCWTKEEEELLIRLEAQFEGNKNINKLIAEHITTKTAKQISDKRRLLSRKPAEEPREEPGTCHHTRRAAASLRTEPEMSHHAQAEDRDNGPGRRPLPGRAAAGGRTMDEIRRHPDKGNGQQRPTKQKSEEQLQAYYKKTLEERLSAGALNTFPRAFKQVMEGRDIKLVINQTAQDCFGCLESISQIRTATRDKKDTVTREKHPKKPFQKWMKDRAIKKGNYLRFQRLFYLDRGKLAKIILDDIECLSCDIPLSEIYSVFKTRWETTGSFKSLGDFKTYGKADNTAFRELITAKEIEKNVQEMSKGSAPGPDGITLGDVVKMDPEFSRTMEIFNLWLTTGKIPDMVRGCRTVLIPKSSKPDRLKDINNWRPITIGSILLRLFSRIVTARLSKACPLNPRQRGFIRAAGCSENLKLLQTIIWSAKREHRPLGVVFVDIAKAFDTVSHQHIIHALQQREVDPHIVGLVSNMYENISTYITTKRNTHTDKIQIRVGVKQGDPMSPLLFNLAMDPLLCKLEESGKGYHRGQSSITAMAFADDLVLLSDSWENMNTNISILETFCNLTGLKTQGQKCHGFYIKPTKDSYTINDCAAWTINGTPLNMIDPGESEKYLGLQFDPWIGIARSGLSTKLDFWLQRIDQAPLKPLQKTDILKTYTIPRLIYIADHSEVKTALLETLDQKIRTAVKEWLHLPPCTCDAILYSSTRDGGLGITKLAGLIPSVQARRLHRIAQSSDDTMKCFMEKEKMEQLHKKLWIQAGGDRENIPSIWEAPPSSEPPNNVSTNSEWEAPTQKDKFPKPCNWRKNEFKKWTKLASQGRGIVNFERDKISNHWIQYYRRIPHRKLLTALQLRANVYPTREFLARGRQDQYIKACRHCDADIESCAHIIGNCPVTQDARIKRHNYICELLLEEAKKKDWVVFKEPHIRDSNKELYKPDLIFVKDARALVVDVTVRYEAAKSSLEEAAAEKVRKYKHLETEVRHLTNAKDVTFVGFPLGARGKWHQDNFKLLTELGLSKSRQVKMAETFSTVALFSSVDIVHMFASRARKSMVM

SEQ ID NO: 1458 - protein, 1390 aa, synthetic construct
MASCPKPGPPVSAGAMSLESGLTTHSVLAIERGPNSLANSGSDFGGGGLGLPLRLLRVSVGTQTSRSDWVDLVSWSHPGPTSKSQQVDLVSLFPKHRVDLLSKNDQVDLVAQFLPSKFPPNLAENDLALLVNLEFYRSDLHVYECVHFAAHWEGLSGLPEVYEQLAPQPCVGETLHSSLPRDSELFVPEEGSSEKESEDAPKTSPPTPGKHGLEQTGEEKVMVTVPDKNPPCPCCGTRVNSVLNLIEHLKVSHGKRGVCFRCAKCGKENSNYHSVVCHFKKCRGPETEKAPAGEWICEVCNRDFTTKIGLGQHKRLAHPAVRNQERIVASQPKETSNRGAHKRCWTKEEEELLIRLEAQFEGNKNINKLIAEHITTKTAKQISDMRRLLSRKPAEEPREEPGTCHHTRRAAASLRTEPEMSHHAQAEDRDNGPGRRPLPGRAAAGGRTMDEIRRHPDKGNGQQRPTKQKSEEQLQAYYKKTLEERLSAGALNTFPRAFKQVMEGRDIKLVINQTAQDCFGCLESISQIRTATRDKKDTVTREKHPKKPFQKWMKDRAIKKGNYLRFQRLFYLDRGKLAKIILDDIECLSCDIPLSEIYSVFKTRWETTGSFKSLGDFKTYGKADNTAFRELITAKEIEKNVQEMSKGSAPGPDGITLGDVVKMDPEFSRTMEIFNLWLTTGKIPDMVRGCRTVLIPKSSKPDRLKDINNWRPITIGSILLRLFSRIVTARLSKACPLNPRQRGFIRAAGCSENLKLLQTIIWSAKREHRPLGVVFVDIAKAFDTVSHQHIIHALQQREVDPHIVGLVSNMYENISTYITTKRNTHTDKIQIRVGVKQGDPMSPLLFNLAMDPLLCKLEESGKGYHRGQSSITAMAFADDLVLLSDSWENMNTNISILETFCNLTGLKTQGQKCHGFYIKPTKDSYTINDCAAWTINGTPLNMIDPGESEKYLGLQFDPWIGIARSGLSTKLDFWLQRIDQAPLKPLQKTDILKTYTIPRLIYIADHSEVKTALLETLDQKIRTAVKEWLHLPPCTCDAILYSSTRDGGLGITKLAGLIPSVQARRLHRIAQSSDDTMKCFMEKEKMEQLHKKLWIQAGGDRENIPSIWEAPPSSEPPNNVSTNSEWEAPTQKDKFPKPCNWRKNEFKKWTKLASQGRGIVNFERDKISNHWIQYYRRIPHRKLLTALQLRANVYPTREFLARGRQDQYIKACRHCDADIESCAHIIGNCPVTQDARIKRHNYICELLLEEAKKKDWVVFKEPHIRDSNKELYKPDLIFVKDARALVVDVTVRYEAAKSSLEEAAAEKVRKYKHLETEVRHLTNAKDVTFVGFPLGARGKWHQDNFKLLTELGLSKSRQVKMAETFSTVALFSSVDIVHMFASRARKSMVM

SEQ ID NO: 1459 - skipped

SEQ ID NO: 1460 - protein, 1390 aa, synthetic construct
MASCPKPGPPVSAGAMSLESGLTTHSVLAIERGPNSLANSGSDFGGGGLGLPLRLLRVSVGTQTSRSDWVDLVSWSHPGPTSKSQQVDLVSLFPKHRVDLLSKNDQVDLVAQFLPSKFPPNLAENDLALLVNLEFYRSDLHVYECVHFAAHWEGLSGLPEVYEQLAPQPCVGETLHSSLPRDSELFVPEEGSSEKESEDAPKTSPPTPGKHGLEQTGEEKVMVTVPDKNPPCPCCGTRVNSVLNLIEHLKVSHGKRGVCFRCAKCGKENSNYHSVVCHFPKCRGPETEKAPAGEWICEVCNRDFTTKIGLGQHKRLAHPAVRNQERIVASQPKETSNRGAHKRCWTKEEEELLIRLEAQFEGNKNINKLIAEHITTKTAKQISDKRRLLSRKPAEEPREEPGTCHHTRRAAASLRTEPEMSHHAQAEDRDNGPGRRPLPGRAAAGGRTMDEIRRHPDKGNGQQRPTKQKSEEQLQAYYKKTLEERLSAGALNTFPRAFKQVMEGRDIKLVINQTAQDCFGCLESISQIRTATRDKKDTVTREKHPKKPFQKWMKDRAIKKGNYLRFQRLFYLDRGKLAKIILDDIECLSCDIPLSEIYSVFKTRWETTGSFKSLGDFKTYGKADNTAFRELITAKEIEKNVQEMSKGSAPGPDGITLGDVVKMDPEFSRTMEIFNLWLTTGKIPDMVRGCRTVLIPKSSDPDRLKDINNWRPITIGSILLRLFSRIVTARLSKACPLNPRQRGFIRAAGCSENLKLLQTIIWSAKREHRPLGVVFVDIAKAFDTVSHQHIIHALQQREVDPHIVGLVSNMYENISTYITTKRNTHTDKIQIRVGVKQGDPMSPLLFNLAMDPLLCKLEESGKGYHRGQSSITAMAFADDLVLLSDSWENMNTNISILETFCNLTGLKTQGQKCHGFYIKPTKDSYTINDCAAWTINGTPLNMIDPGESEKYLGLQFDPWIGIARSGLSTKLDFWLQRIDQAPLKPLQKTDILKTYTIPRLIYIADHSEVKTALLETLDQKIRTAVKEWLHLPPCTCDAILYSSTRDGGLGITKLAGLIPSVQARRLHRIAQSSDDTMKCFMEKEKMEQLHKKLWIQAGGDRENIPSIWEAPPSSEPPNNVSTNSEWEAPTQKDKFPKPCNWRKNEFKKWTKLASQGRGIVNFERDKISNHWIQYYRRIPHRKLLTALQLRANVYPTREFLARGRQDQYIKACRHCDADIESCAHIIGNCPVTQDARIKRHNKICELLLEEAKKKDWVVFKEPHIRDSNKELYKPDLIFVKDARALVVDVTVRYEAAKSSLEEAAAEKVRKYKHLETEVRHLTNAKDVTFVGFPLGARGKWHQDNFKLLTELGLSKSRQVKMAETFSTVALFSSVDIVHMFASRARKSMVM

SEQ ID NO: 1461 - protein, 1390 aa, synthetic construct
MASCPKPGPPVSAGAMSLESGLTTHSVLAIERGPNSLANSGSDFGGGGLGLPLRLLRVSVGTQTSRSDWVDLVSWSHPGPTSKSQQVDLVSLFPKHRVDLLSKNDQVDLVAQFLPSKFPPNLAENDLALLVNLEFYRSDLHVYECVHFAAHWEGLSGLPEVYEQLAPQPCVGETLHSSLPRDSELFVPEEGSSEKESEDAPKTSPPTPGKHGLEQTGEEKVMVTVPDKNPPCPCCGTRVNSVLNLIEHLKVSHGKRGVCFRCAKCGKENSNYHSVVCHFPKCRGPETEKAPAGEWICEVCNRDFTTKIGLGQHKRLAHPAVRNQERIVASQPKETSNRGAHKRCWTKEEEELLIRLEAQFEGNKNINKLIAEHITTKTAKQISDKRRLLSRKPAEEPREEPGTCHHTRRAAASLRTEPEMSHHAQAEDRDNGPGRRPLPGRAAAGGRTMDEIRRHPDKGNGQQRPTKQKSEEQLQAYYKKTLEERLSAGALNTFPRAFKQVMEGRDIKLVINQTAQDCFGCLESISQIRTATRDKKDTVTREKHPKKPFQKWMKDRAIKKGNYLRFQRLFYLDRGKLAKIILDDIECLSCDIPLSEIYSVFKTRWETTGSFKSLGDFKTYGKADNTAFRELITAKEIEKNVQEMSKGSAPGPDGITLGDVVKMDPEGSRTMEIFNLWLTTGKIPDMVRGCRTVLIPKSSDPDRLKDINNWRPITIGSILLRLFSRIVTARLSKACPLNPRQRGFIRAAGCSENLKLLQTIIWSAKREHRPLGVVFVDIAKAFDTVSHQHIIHALQQREVDPHIVGLVSNMYENISTYITTKRNTHTDKIQIRVGVKQGDPMSPLLFNLAMDPLLCKLEESGKGYHRGQSSITAMAFADDLVLLSDSWENMNTNISILETFCNLTGLKTQGQKCHGFYIKPTKDSYTINDCAAWTINGTPLNMIDPGESEKYLGLQFDPWIGIARSGLSTKLDFWLQRIDQAPLKPLQKTDILKTYTIPRLIYIADHSEVKTALLETLDQKIRTAVKEWLHLPPCTCDAILYSSTRDGGLGITKLAGLIPSVQARRLHRIAQSSDDTMKCFMEKEKMEQLHKKLWIQAGGDRENIPSIWEAPPSSEPPNNVSTNSEWEAPTQKDKFPKPCNWRKNEFKKWTKLASQGRGIVNFERDKISNHWIQYYRRIPHRKLLTALQLRANVYPTREFLARGRQDQYIKACRHCDADIESCAHIIGNCPVTQDARIKRHNYICELLLEEAKKKDWVVFKEPHIRDSNKELYKPDLIFVKDARALVVDVTVRYEAAKSSLEEAAAEKVRKYKHLETEVRHLTNAKDVTFVGFPLGARGKWHQDNFKLLTELGLSKSRQVKMAETFSTVALFSSVDIVHMFASRARKSMVM

SEQ ID NO: 1462 - protein, 1390 aa, synthetic construct
MASCPKPGPPVSAGAMSLESGLTTHSVLAIERGPNSLANSGSDFGGGGLGLPLRLLRVSVGTQTSRSDWVDLVSWSHPGPTSKSQQVDLVSLFPKHRVDLLSKNDQVDLVAQFLPSKFPPNLAENDLALLVNLEFYRSDLHVYECVHFAAHWEGLSGLPEVYEQLAPQPCVGETLHSSLPRDSELFVPEEGSSEKESEDAPKTSPPTPGKHGLEQTGEEKVMVTVPDKNPPCPCCGTRVNSVLNLIEHLKVSHGKRGVCFRCAKCGKENSNYHSVVCHFPKCRGPETEKAPAGEWICEVCNRDFTTKIGLGQHKRLAHPAVRNQERIVASQPKETSNRGAHKRCWTKEEEELLIRLEAQFEGNKNINKLIAEHITTKTAKQISDKRRLLSRKPAEEPREEPGTCHHTRRAAASLRTEPEMSHHAQAEDRDNGPGRRPLPGRAAAGGRTMDEIRRHPDKGNGQQRPTKQKSEEQLQAYYKKTLEERLSAGALNTFPRAFKQVMEGRDIKLVINQTAQDCFGCLESISQIRTATRDKKDTVTREKHPKKPFQKWMKDRAIKKGNYLRFQRLFYLDRGKLAKIILDDIECLSCDIPLSEIYSVFKTRWETTGSFKSLGDFKTYGKADNTAFRELITAKEIEKNVQEMSKGSAPGPDGITLGDVVKMDPEFSRTMEIFNLWLTTGKIPDMVRGCRTVLIPKSSDPDRLKDINNWRPITIGSILLRLFSRIVTARLSKACPLNPRQRGFIRAAGCSENLKLLQTIIWSAKREHRPLGVVFVDIAKAFDTVSHQHIIHALQQREVDPHIVGLVSNMYENISTYITTKRNTHTDKIQIRVGVKQGDPMSPLLFNLAMDPLLCKLEESGKGYHRGQSSITAMAFADDLVLLSDSWENMNTNISILETFCNLTGLKTQGQKCHGFYIKPTKKSYTINDCAAWTINGTPLNMIDPGESEKYLGLQFDPWIGIARSGLSTKLDFWLQRIDQAPLKPLQKTDILKTYTIPRLIYIADHSEVKTALLETLDQKIRTAVKEWLHLPPCTCDAILYSSTRDGGLGITKLAGLIPSVQARRLHRIAQSSDDTMKCFMEKEKMEQLHKKLWIQAGGDRENIPSIWEAPPSSEPPNNVSTNSEWEAPTQKDKFPKPCNWRKNEFKKWTKLASQGRGIVNFERDKISNHWIQYYRRIPHRKLLTALQLRANVYPTREFLARGRQDQYIKACRHCDADIESCAHIIGNCPVTQDARIKRHNYICELLLEEAKKKDWVVFKEPHIRDSNKELYKPDLIFVKDARALVVDVTVRYEAAKSSLEEAAAEKVRKYKHLETEVRHLTNAKDVTFVGFPLGARGKWHQDNFKLLTELGLSKSRQVKMAETFSTVALFSSVDIVHMFASRARKSMVM

SEQ ID NO: 1463 - protein, 1390 aa, synthetic construct
MASCPKPGPPVSAGAMSLESGLTTHSVLAIERGPNSLANSGSDFGGGGLGLPLRLLRVSVGTQTSRSDWVDLVSWSHPGPTSKSQQVDLVSLFPKHRVDLLSKNDQVDLVAQFLPSKFPPNLAENDLALLVNLEFYRSDLHVYECVHFAAHWEGLSGLPEVYEQLAPQPCVGETLHSSLPRDSELFVPEEGSSEKESEDAPKTSPPTPGKHGLEQTGEEKVMVTVPDKNPPCPCCGTRVNSVLNLIEHLKVSHGKRGVCFRCAKCGKENSNYHSVVCHFKKCRGPETEKAPAGEWICEVCNRDFTTKIGLGQHKRLAHPAVRNQERIVASQPKETSNRGAHKRCWTKEEEELLIRLEAQFEGNKNINKLIAEHITTKTAKQISDKRRLLSRKPAEEPREEPGTCHHTRRAAASLRTEPEMSHHAQAEDRDNGPGRRPLPGRAAAGGRTMDEIRRHPDKGNGQQRPTKQKSEEQLQAYYKKTLEERLSAGALNTFPRAFKQVMEGRDIKLVINQTAQDYFGCLESISQIRTATRDKKDTVTREKHPKKPFQKWMKDRAIKKGNYLRFQRLFYLDRGKLAKIILDDIECLSCDIPLSEIYSVFKTRWETTGSFKSLGDFKTYGKADNTAFRELITAKEIEKNVQEMSKGSAPGPDGITLGDVVKMDPEFSRTMEIFNLWLTTGKIPDMVRGCRTVLIPKSSKPDRLKDINNWRPITIGSILLRLFSRIVTARLSKACPLNPRQRGFIRAAGCSENLKLLQTIIWSAKREHRPLGVVFVDIAKAFDTVSHQHIIHALQQREVDPHIVGLVSNMYENISTYITTKRNTHTDKIQIRVGVKQGDPMSPLLFNLAMDPLLCKLEESGKGYHRGQSSITAMAFADDLVLLSDSWENMNTNISILETFCNLTGLKTQGQKCHGFYIKPTKDSYTINDCAAWTINGTPLNMIDPGESEKYLGLQFDPWIGIARSGLSTKLDFWLQRIDQAPLKPLQKTDILKTYTIPRLIYIADHSEVKTALLETLDQKIRTAVKEWLHLPPCTCDAILYSSTRDGGLGITKLAGLIPSVQARRLHRIAQSSDDTMKCFMEKEKMEQLHKKLWIQAGGDRENIPSIWEAPPSSEPPNNVSTNSEWEAPTQKDKFPKPCNWRKNEFKKWTKLASQGRGIVNFERDKISNHWIQYYRRIPHRKLLTALQLRANVYPTREFLARGRQDQYIKACRHCDADIESCAHIIGNCPVTQDARIKRHNYICELLLEEAKKKDWVVFKEPHIRDSNKELYKPDLIFVKDARALVVDVTVRYEAAKSSLEEAAAEKVRKYKHLETEVRHLTNAKDVTFVGFPLGARGKWHQDNFKLLTELGLSKSRQVKMAETFSTVALFSSVDIVHMFASRARKSMVM

SEQ ID NO: 1464 - skipped

SEQ ID NO: 1465 - protein, 1327 aa, synthetic construct; identical to SEQ ID NO: 252

SEQ ID NO: 1466 - skipped

SEQ ID NO: 1467 - protein, 1390 aa, synthetic construct
MASCPKPGPPVSAGAMSLESGLTTHSVLAIERGPNSLANSGSDFGGGGLGLPLRLLRVSVGTQTSRSDWVDLVSWSHPGPTSKSQQVDLVSLFPKHRVDLLSKNDQVDLVAQFLPSKFPPNLAENDLALLVNLEFYRSDLHVYECVHFAAHWEGLSGLPEVYEQLAPQPCVGETLHSSLPRDSELFVPEEGSSEKESEDAPKTSPPTPGKHGLEQTGEEKVMVTVPDKNPPCPCCGTRVNSVLNLIEHLKVSHGKRGVCFRCAKCGKENSNYHSVVCHFKKCRGPETEKAPAGEWICEVCNRDFTTKIGLGQHKRLAHPAVRNQERIVASQPKETSNRGAHKRCWTKEEEELLIRLEAQFEGNKNINKLIAEHITTKTAKQISDKRRLLSRKPAEEPREEPGTCHHTRRAAASLRTEPEMSHHAQAEDRDNGPGRRPLPGRAAAGGRTMDEIRRHPDKGNGQQRPTKQKSEEQLQAYYKKTLEERLSAGALNTFPRAFKQVMEGRDIKLVINQTAQDYFGCLESISQIRTATRDKKDTVTREKHPKKPFQKWMKDRAIKKGNYLRFQRLFYLDRGKLAKIILDDIECLSCDIPLSEIYSVFKTRWETTGSFKSLGDFKTYGKADNTAFRELITAKEIEKNVQEMSKGSAPGPDGITLGDVVKMDPEFSRTMEIFNLWLTTGKIPDMVRGCRTVLIPKSSDPDRLKDINNWRPITIGSILLRLFSRIVTARLSKACPLNPRQRGFIRAAGCSENLKLLQTIIWSAKREHRPLGVVFVDIAKAFDTVSHQHIIHALQQREVDPHIVGLVSNMYENISTYITTKRNTHTDKIQIRVGVKQGDPMSPLLFNLAMDPLLCKLEESGKGYHRGQSSITAMAFADDLVLLSDSWENMNTNISILETFCNLTGLKTQGQKCHGFYIKPTKDSYTINDCAAWTINGTPLNMIDPGESEKYLGLQFDPWIGIARSGLSTKLDFWLQRIDQAPLKPLQKTDILKTYTIPRLIYIADHSEVKTALLETLDQKIRTAVKEWLHLPPCTCDAILYSSTRDGGLGITKLAGLIPSVQARRLHRIAQSSDDTMKCFMEKEKMEQLHKKLWIQAGGDRENIPSIWEAPPSSEPPNNVSTNSEWEAPTQKDKFPKPCNWRKNEFKKWTKLASQGRGIVNFERDKISNHWIQYYRRIPHRKLLTALQLRANVYPTREFLARGRQDQYIKACRHCDADIESCAHIIGNCPVTQDARIKRHNYICELLLEEAKKKDWVVFKEPHIRDSNKELYKPDLIFVKDARALVVDVTVRYEAAKSSLEEAAAEKVRKYKHLETEVRHLTNAKDVTFVGFPLGARGKWHQDNFKLLTELGLSKSRQVKMAETFSTVALFSSVDIVHMFASRARKSMVM

SEQ ID NO: 1468 - protein, 1390 aa, synthetic construct
MASCPKPGPPVSAGAMSLESGLTTHSVLAIERGPNSLANSGSDFGGGGLGLPLRLLRVSVGTQTSRSDWVDLVSWSHPGPTSKSQQVDLVSLFPKHRVDLLSKNDQVDLVAQFLPSKFPPNLAENDLALLVNLEFYRSDLHVYECVHFAAHWEGLSGLPEVYEQLAPQPCVGETLHSSLPRDSELFVPEEGSSEKESEDAPKTSPPTPGKHGLEQTGEEKVMVTVPDKNPPCPCCGTRVNSVLNLIEHLKVSHGKRGVCFRCAKCGKENSNYHSVVCHFKKCRGPETEKAPAGEWICEVCNRDFTTKIGLGQHKRLAHPAVRNQERIVASQPKETSNRGAHKRCWTKEEEELLIRLEAQFEGNKNINKLIAEHITTKTAKQISDKRRLLSRKPAEEPREEPGTCHHTRRAAASLRTEPEMSHHAQAEDRDNGPGRRPLPGRAAAGGRTMDEIRRHPDKGNGQQRPTKQKSEEQLQAYYKKTLEERLSAGALNTFPRAFKQVMEGRDIKLVINQTAQDYFGCLESISQIRTATRDKKDTVTREKHPKKPFQKWMKDRAIKKGNYLRFQRLFYLDRGKLAKIILDDIECLSCDIPLSEIYSVFKTRWETTGSFKSLGDFKTYGKADNTAFRELITAKEIEKNVQEMSKGSAPGPDGITLGDVVKMDPEFSRTMEIFNLWLTTGKIPDMVRGCRTVLIPKSSDPDRLKDINNWRPITIGSILLRLFSRIVTARLSKACPLNPRQRGFIRAAGCSENLKLLQTIIWSAKREHRPLGVVFVDIAKAFDTVSHQHIIHALQQREVDPHIVGLVSNMYENISTYITTKRNTHTDKIQIRVGVKQGDPMSPLLFNLAMDPLLCKLEESGKGYHRGQSSITAMAFADDLVLLSDSWENMNTNISILETFCNLTGLKTQGQKCHGFYIKPTKDSYTINDCAAWTINGTPLNMIDPGESEKYLGLQFDPWIGIARSGLSTKLDFWLQRIDQAPLKPLQKTDILKTYTIPRLIYIADHSEVKTALLETLDQKIRTAVKEWLHLPPCTCDAILYSSTRDGGLGITKLAGLIPSVQARRLHRIAQSSDDTMKCFMEKEKMEQLHKKLWIQAGGDRENIPSIWEAPPSSEPPNNVSTNSEWEAPTQKDKFPKPCNWRKNEFKKWTKLASQGRGIVNFERDKISNHWIQYYRRIPHRKLLTALQLRANVYPTREFLARGRQDQYIKACRHCDADIESCAHIIGNCPVTQDARIKRHNKICELLLEEAKKKDWVVFKEPHIRDSNKELYKPDLIFVKDARALVVDVTVRYEAAKSSLEEAAAEKVRKYKHLETEVRHLTNAKDVTFVGFPLGARGKWHQDNFKLLTELGLSKSRQVKMAETFSTVALFSSVDIVHMFASRARKSMVM

SEQ ID NO: 1469 - skipped

SEQ ID NO: 1470 - protein, 1390 aa, synthetic construct
MASCPKPGPPVSAGAMSLESGLTTHSVLAIERGPNSLANSGSDFGGGGLGGPLRLLRVSVGTQTSRSDWVDLVSWSHPGPTSKSQQVDLVSLFPKHRVDLLSKNDQVDLVAQFLPSKFPPNLAENDLALLVNLEFYRSDLHVYECVHFAAHWEGLSGLPEVYEQLAPQPCVGETLHSSLPRDSELFVPEEGSSEKESEDAPKTSPPTPGKHGLEQTGEEKVMVTVPDKNPPCPCCGTRVNSVLNLIEHLKVSHGKRGVCFRCAKCGKENSNYHSVVCHFKKCRGPETEKAPAGEWICEVCNRDFTTKIGLGQHKRLAHPAVRNQERIVASQPKETSNRGAHKRCWTKEEEELLIRLEAQFEGNKNINKLIAEHITTKTAKQISDMRRLLSRKPAEEPREEPGTCHHTRRAAASLRTEPEMSHHAQAEDRDNGPGRRPLPGRAAAGGRTMDEIRRHPDKGNGQQRPTKQKSEEQLQAYYKKTLEERLSAGALNTFPRAFKQVMEGRDIKLVINQTAQDCFGCLESISQIRTATRDKKDTVTREKHPKKPFQKWMKDRAIKKGNYLRFQRLFYLDRGKLAKIILDDIECLSCDIPLSEIYSVFKTRWETTGSFKSLGDFKTYGKADNTAFRELITAKEIEKNVQEMSKGSAPGPDGITLGDVVKMDPEFSRTMEIFNLWLTTGKIPDMVRGCRTVLIPKSSKPDRLKDINNWRPITIGSILLRLFSRIVTARLSKACPLNPRQRGFIRAAGCSENLKLLQTIIWSAKREHRPLGVVFVDIAKAFDTVSHQHIIHALQQREVDPHIVGLVSNMYENISTYITTKRNTHTDKIQIRVGVKQGDPMSPLLFNLAMDPLLCKLEESGKGYHRGQSSITAMAFADDLVLLSDSWENMNTNISILETFCNLTGLKTQGQKCHGFYIKPTKDSYTINDCAAWTINGTPLNMIDPGESEKYLGLQFDPWIGIARSGLSTKLDFWLQRIDQAPLKPLQKTDILKTYTIPRLIYIADHSEVKTALLETLDQKIRTAVKEWLHLPPCTCDAILYSSTRDGGLGITKLAGLIPSVQARRLHRIAQSSDDTMKCFMEKEKMEQLHKKLWIQAGGDRENIPSIWEAPPSSEPPNNVSTNSEWEAPTQKDKFPKPCNWRKNEFKKWTKLASQGRGIVNFERDKISNHWIQYYRRIPHRKLLTALQLRANVYPTREFLARGRQDQYIKACRHCDADIESCAHIIGNCPVTQDARIKRHNYICELLLEEAKKKDWVVFKEPHIRDSNKELYKPDLIFVKDARALVVDVTVRYEAAKSSLEEAAAEKVRKYKHLETEVRHLTNAKDVTFVGFPLGARGKWHQDNFKLLTELGLSKSRQVKMAETFSTVALFSSVDIVHMFASRARKSMVM

SEQ ID NO: 1471 - protein, 1390 aa, synthetic construct
MASCPKPGPPVSAGAMSLESGLTTHSVLAIERGPNSLANSGSDFGGGGLGGPLRLLRVSVGTQTSRSDWVDLVSWSHPGPTSKSQQVDLVSLFPKHRVDLLSKNDQVDLVAQFLPSKFPPNLAENDLALLVNLEFYRSDLHVYECVHFAAHWEGLSGLPEVYEQLAPQPCVGETLHSSLPRDSELFVPEEGSSEKESEDAPKTSPPTPGKHGLEQTGEEKVMVTVPDKNPPCPCCGTRVNSVLNLIEHLKVSHGKRGVCFRCAKCGKENSNYHSVVCHFKKCRGPETEKAPAGEWICEVCNRDFTTKIGLGQHKRLAHPAVRNQERIVASQPKETSNRGAHKRCWTKEEEELLIRLEAQFEGNKNINKLIAEHITTKTAKQISDMRRLLSRKPAEEPREEPGTCHHTRRAAASLRTEPEMSHHAQAEDRDNGPGRRPLPGRAAAGGRTMDEIRRHPDKGNGQQRPTKQKSEEQLQAYYKKTLEERLSAGALNTFPRAFKQVMEGRDIKLVINQTAQDYFGCLESISQIRTATRDKKDTVTREKHPKKPFQKWMKDRAIKKGNYLRFQRLFYLDRGKLAKIILDDIECLSCDIPLSEIYSVFKTRWETTGSFKSLGDFKTYGKADNTAFRELITAKEIEKNVQEMSKGSAPGPDGITLGDVVKMDPEFSRTMEIFNLWLTTGKIPDMVRGCRTVLIPKSSKPDRLKDINNWRPITIGSILLRLFSRIVTARLSKACPLNPRQRGFIRAAGCSENLKLLQTIIWSAKREHRPLGVVFVDIAKAFDTVSHQHIIHALQQREVDPHIVGLVSNMYENISTYITTKRNTHTDKIQIRVGVKQGDPMSPLLFNLAMDPLLCKLEESGKGYHRGQSSITAMAFADDLVLLSDSWENMNTNISILETFCNLTGLKTQGQKCHGFYIKPTKDSYTINDCAAWTINGTPLNMIDPGESEKYLGLQFDPWIGIARSGLSTKLDFWLQRIDQAPLKPLQKTDILKTYTIPRLIYIADHSEVKTALLETLDQKIRTAVKEWLHLPPCTCDAILYSSTRDGGLGITKLAGLIPSVQARRLHRIAQSSDDTMKCFMEKEKMEQLHKKLWIQAGGDRENIPSIWEAPPSSEPPNNVSTNSEWEAPTQKDKFPKPCNWRKNEFKKWTKLASQGRGIVNFERDKISNHWIQYYRRIPHRKLLTALQLRANVYPTREFLARGRQDQYIKACRHCDADIESCAHIIGNCPVTQDARIKRHNYICELLLEEAKKKDWVVFKEPHIRDSNKELYKPDLIFVKDARALVVDVTVRYEAAKSSLEEAAAEKVRKYKHLETEVRHLTNAKDVTFVGFPLGARGKWHQDNFKLLTELGLSKSRQVKMAETFSTVALFSSVDIVHMFASRARKSMVM

SEQ ID NO: 1472 - protein, 1390 aa, synthetic construct; identical to SEQ ID NO: 234

SEQ ID NO: 1473 - protein, 1625 aa, synthetic construct
MAPKKKRKVVTVKFKYKGEEKEVDISKIKKVWRVGKMISFTYDDNGKTGRGAVSEKDAPKELLQMLEKSGSETPGTSESATPESNISGSSCGSPNSADTSSDFKDLWTKLKECHDREVQGLQVKVTKLKQERILDAQRLEEFFTKNQQLREQQKVLHETIKVLEDRLRAGLCDRCAVTEEHMRKKQQEFENIRQQNLKLITELMNERNTLQEENKKLSEQLQQKIENDQQHQAAELECEEDVIPDSPITAFSFSGVNRLRRKENPHVRYIEQTHTKLEHSVCANEMRKVSKSSTHPQHNPNENEILVADTYDQSQSPMAKAHGTSSYTPDKSSFNLATVVAETLGLGVQEESETQGPMSPLGDELYHCLEGNHKKQPFESGSETPGTSESATPEGSYEQLAPQPCVGETLHSSLPRDSELFVPEEGSSEKESEDAPKTSPPTPGKHGLEQTGEEKVMVTVPDKNPPCPCCGTRVNSVLNLIEHLKVSHGKRGVCFRCAKCGKENSNYHSVVCHFKKCRGPETEKAPAGEWICEVCNRDFTTKIGLGQHKRLAHPAVRNQERIVASQPKETSNRGAHKRCWTKEEEELLIRLEAQFEGNKNINKLIAEHITTKTAKQISDKRRLLSRKPAEEPREEPGTCHHTRRAAASLRTEPEMSHHAQAEDRDNGPGRRPLPGRAAAGGRTMDEIRRHPDKGNGQQRPTKQKSEEQLQAYYKKTLEERLSAGALNTFPRAFKQVMEGRDIKLVINQTAQDCFGCLESISQIRTATRDKKDTVTREKHPKKPFQKWMKKRAIKKGNYLRFQRLFYLDRGKLAKIILDDIECLSCDIPLSEIYSVFKTRWETTGSFKSLGDFKTYGKADNTAFRELITAKEIEKNVQEMSKGSAPGPDGITLGDVVKMDPEFSRTMEIFNLWLTTGKIPDMVRGCRTVLIPKSSDPDRLKDINNWRPITIGSILLRLFSRIVTARLSKACPLNPRQRGFIRAAGCSENLKLLQTIIWSAKREHRPLGVVFVDIAKAFDTVSHQHIIHALQQREVDPHIVGLVSNMYENISTYITTKRNTHTDKIQIRVGVKQGDPMSPLLFNLAMDPLLCKLEESGKGYHRGQSSITAMAFADDLVLLSDSWENMNTNISILETFCNLTGLKTQGQKCHGFYIKPTKDSYTINDCAAWTINGTPLNMIDPGESEKYLGLQFDPWIGIARSGLSTKLDFWLQRIDQAPLKPLQKTDILKTYTIPRLIYIADHSEVKSALLETLDQKIRTAVKEWLHLPPCTCDAILYSSTRDGGLGITKLAGLIPSVQARRLHRIAQSSDDTMKCFMEKEKMEQLHKKLWIQAGGDRENIPSIWEAPPSSEPPNNVSTNSEWEAPTQKDKFPKPCNWRKNEFKKWTKLASQGRGIVNFERDKISNHWIQYYRRIPHRKLLTALQLRANVYPTREFLARGRQDQYIKACRHCDADNESCAHIIGNCPVTQDARIKRHNYICELLLEEAKKKDWVVFKEPHIRDSNKELYKPDLIFVKDGRALVVDVTVRYEAAKSSLEEAAAEKVRKYKHLETEVRHLTNAKDVTFVGFPLGARGKWHQDNFKLLTELGLSKSRQVKMAETFSTVALFSSVDIVHMFASRARKSMVM

SEQ ID NO: 1474 - protein, 1390 aa, synthetic construct
MASCPKPGPPVSAGAMSLESGLTTHSVLAIERGPNSLANSGSDFGGGGLGLPLRLLRVSVGTQTSRSDWVDLVSWSHPGPTSKSQQVDLVSLFPKHRVDLLSKNDQVDLVAQFLPSKFPPNLAENDLALLVNLEFYRSDLHVYECVHFAAHWEGLSGLPEVYEQLAPQPCVGETLHSSLPRDSELFVPEEGSSEKESEDAPKTSPPTPGKHGLEQTGEEKVMVTVPDKNPPCPCCGTRVNSVLNLIEHLKVSHGKRGVCFRCAKCGKENSNYHSVVCHFKKCRGPETEKAPAGEWICEVCNRDFTTKIGLGQHKRLAHPAVRNQERIVASQPKETSNRGAHKRCWTKEEEELLIRLEAQFEGNKNINKLIAEHITTKTAKQISDKRRLLSRKPAEEPREEPGTCHHTRRAAASLRTEPEMSHHAQAEDRDNGPGRRPLPGRAAAGGRTMDEIRRHPDKGNGQQRPTKQKSEEQLQAYYKKTLEERLSAGALNTFPRAFKQVMEGRDIKLVINQTAQDCFGCLESISQIRTATRDKKDTVTREKHPKKPFQKWMKKRAIKKGNYLRFQRLFYLDRGKLAKIILDDIECLSCDIPLSEIYSVFKTRWETTGSFKSLGDFKTYGKADNTAFRELITAKEIEKNVQEMSKGSAPGPDGITLGDIKKMDPEFSRTMEIFNLWLTTGKIPDMVRGCRTVLIPKSSKPDRLKDINNWRPITIGSILLRLFSRIVTARLSKACPLNPRQRGFIRAAGCSENLKLLQTIIWSAKREHRPLGVVFVDIAKAFDTVSHQHIIHALQQREVDPHIVGLVSNMYENISTYITTKRNTHTDKIQIRVGVKQGDPMSPLLFNLAMDPLLCKLEESGKGYHRGQSSITAMAFADDLVLLSDSWENMNTNISILETFCNLTGLKTQGQKCHGFYIKPTKDSYTINDCAAWTINGTPLNMIDPGESEKYLGLQFDPWIGIARSGLSTKLDFWLQRIDQAPLKPLQKTDILKTYTIPRLIYIADHSEVKSALLETLDQKIRTAVKEWLHLPPCTCDAILYSSTRDGGLGITKLAGLIPSVQARRLHRIAQSSDDTMKCFMEKEKMEQLHKKLWIQAGGDRENIPSIWEAPPSSEPPNNVSTNSEWEAPTQKDKFPKPCNWRKNEFKKWTKLASQGRGIVNFERDKISNHWIQYYRRIPHRKLLTALQLRANVYPTREFLARGRQDQYIKACRHCDADNESCAHIIGNCPVTQDARIKRHNYICELLLEEAKKKDWVVFKEPHIRDSNKELYKPDLIFVKDARALVVDVTVRYEAAKSSLEEAAAEKVRKYKHLETEVRHLTNAKDVTFVGFPLGARGKWHQDNFKLLTELGLSKSRQVKMAETFSTVALFSSVDIVHMFASRARKSMVM

SEQ ID NO: 1475 - protein, 1390 aa, synthetic construct
MASCPKPGPPVSAGAMSLESGLTTHSVLAIERGPNSLANSGSDFGGGGLGLPLRLLRVSVGTQTSRSDWVDLVSWSHPGPTSKSQQVDLVSLFPKHRVDLLSKNDQVDLVAQFLPSKFPPNLAENDLALLVNLEFYRSDLHVYECVHFAAHWEGLSGLPEVYEQLAPQPCVGETLHSSLPRDSELFVPEEGSSEKESEDAPKTSPPTPGKHGLEQTGEEKVMVTVPDKNPPCPCCGTRVNSVLNLIEHLKVSHGKRGVCFRCAKCGKENSNYHSVVCHFKKCRGPETEKAPAGEWICEVCNRDFTTKIGLGQHKRLAHPAVRNQERIVASQPKETSNRGAHKRCWTKEEEELLIRLEAQFEGNKNINKLIAEHITTKTAKQISDKRRLLSRKPAEEPREEPGTCHHTRRAAASLRTEPEMSHHAQAEDRDNGPGRRPLPGRAAAGGRTMDEIRRHPDKGNGQQRPTKQKSEEQLQAYYKKTLEERLSAGALNTFPRAFKQVMEGRDIKLVINQTAQDCFGCLESISQIRTATRDKKDTVTREKHPKKPFQKWMKKRAIKKGNYLRFQRLFYLDRGKLAKIILDDIECLSCDIPLSEIYSVFKTRWETTGSFKSLGDFKTYGKADNTAFRELITAKEIEKNVQEMSKGSAPGPDRITLGDVVKMDPEFSRTMEIFNLWLTTGKIPDMVRGCRTVLIPKSSKPDRLKDINNWRPITIGSILLRLFSRIVTARLSKACPLNPRQRGFIRAAGCSENLKLLQTIIWSAKREHRPLGVVFVDIAKAFDTVSHQHIIHALQQREVDPHIVGLVSNMYENISTYITTKRNTHTDKIQIRVGVKQGDPMSPLLFNLAMDPLLCKLEESGKGYHRGQSSITAMAFADDLVLLSDSWENMNTNISILETFCNLTGLKTQGQKCHGFYIKPTKDSYTINDCAAWTINGTPLNMIDPGESEKYLGLQFDPWIGIARSGLSTKLDFWLQRIDQAPLKPLQKTDILKTYTIPRLIYIADHSEVKSALLETLDQKIRTAVKEWLHLPPCTCDAILYSSTRDGGLGITKLAGLIPSVQARRLHRIAQSSDDTMKCFMEKEKMEQLHKKLWIQAGGDRENIPSIWEAPPSSEPPNNVSTNSEWEAPTQKDKFPKPCNWRKNEFKKWTKLASQGRGIVNFERDKISNHWIQYYRRIPHRKLLTALQLRANVYPTREFLARGRQDQYIKACRHCDADNESCAHIIGNCPVTQDARIKRHNYICELLLEEAKKKDWVVFKEPHIRDSNKELYKPDLIFVKDARALVVDVTVRYEAAKSSLEEAAAEKVRKYKHLETEVRHLTNAKDVTFVGFPLGARGKWHQDNFKLLTELGLSKSRQVKMAETFSTVALFSSVDIVHMFASRARKSMVM

SEQ ID NO: 1476 - protein, 1390 aa, synthetic construct
MASCPKPGPPVSAGAMSLESGLTTHSVLAIERGPNSLANSGSDFGGGGLGLPLRLLRVSVGTQTSRSDWVDLVSWSHPGPTSKSQQVDLVSLFPKHRVDLLSKNDQVDLVAQFLPSKFPPNLAENDLALLVNLEFYRSDLHVYECVHFAAHWEGLSGLPEVYEQLAPQPCVGETLHSSLPRDSELFVPEEGSSEKESEDAPKTSPPTPGKHGLEQTGEEKVMVTVPDKNPPCPCCGTRVNSVLNLIEHLKVSHGKRGVCFRCAKCGKENSNYHSVVCHFKKCRGPETEKAPAGEWICEVCNRDFTTKIGLGQHKRLAHPAVRNQERIVASQPKETSNRGAHKRCWTKEEEELLIRLEAQFEGNKNINKLIAEHITTKTAKQISDKRRLLSRKPAEEPREEPGTCHHTRRAAASLRTEPEMSHHAQAEDRDNGPGRRPLPGRAAAGGRTMDEIRRHPDKGNGQQRPTKQKSEEQLQAYYKKTLEERLSAGALNTFPRAFKQVMEGRDIKLVINQTAQDCFGCLESISQIRTATRDKKDTVTREKHPKKPFQKWMKKRAIKKGNYLRFQRLFYLDRGKLAKIILDDIECLSCDIPLSEIYSVFKTRWETTGSFKSLGDFKTYGKADNTAFRELITAKEILKNVQEMSKGSAPGPDGITLGDVVKMDPEFSRTMEIFNLWLTTGKIPDMVRGCRTVLIPKSSKPDRLKDINNWRPITIGSILLRLFSRIVTARLSKACPLNPRQRGFIRAAGCSENLKLLQTIIWSAKREHRPLGVVFVDIAKAFDTVSHQHIIHALQQREVDPHIVGLVSNMYENISTYITTKRNTHTDKIQIRVGVKQGDPMSPLLFNLAMDPLLCKLEESGKGYHRGQSSITAMAFADDLVLLSDSWENMNTNISILETFCNLTGLKTQGQKCHGFYIKPTKDSYTINDCAAWTINGTPLNMIDPGESEKYLGLQFDPWIGIARSGLSTKLDFWLQRIDQAPLKPLQKTDILKTYTIPRLIYIADHSEVKSALLETLDQKIRTAVKEWLHLPPCTCDAILYSSTRDGGLGITKLAGLIPSVQARRLHRIAQSSDDTMKCFMEKEKMEQLHKKLWIQAGGDRENIPSIWEAPPSSEPPNNVSTNSEWEAPTQKDKFPKPCNWRKNEFKKWTKLASQGRGIVNFERDKISNHWIQYYRRIPHRKLLTALQLRANVYPTREFLARGRQDQYIKACRHCDADNESCAHIIGNCPVTQDARIKRHNYICELLLEEAKKKDWVVFKEPHIRDSNKELYKPDLIFVKDARALVVDVTVRYEAAKSSLEEAAAEKVRKYKHLETEVRHLTNAKDVTFVGFPLGARGKWHQDNFKLLTELGLSKSRQVKMAETFSTVALFSSVDIVHMFASRARKSMVM

SEQ ID NO: 1477 - protein, 1625 aa, synthetic construct
MAPKKKRKVVTVKFKYKGEEKEVDISKIKKVWRVGKMISFTYDDNGKTGRGAVSEKDAPKELLQMLEKSGSETPGTSESATPESNISGSSCGSPNSADTSSDFKDLWTKLKECHDREVQGLQVKVTKLKQERILDAQRLEEFFTKNQQLREQQKVLHETIKVLEDRLRAGLCDRCAVTEEHMRKKQQEFENIRQQNLKLITELMNERNTLQEENKKLSEQLQQKIENDQQHQAAELECEEDVIPDSPITAFSFSGVNRLRRKENPHVRYIEQTHTKLEHSVCANEMRKVSKSSTHPQHNPNENEILVADTYDQSQSPMAKAHGTSSYTPDKSSFNLATVVAETLGLGVQEESETQGPMSPLGDELYHCLEGNHKKQPFESGSETPGTSESATPEGSYEQLAPQPCVGETLHSSLPRDSELFVPEEGSSEKESEDAPKTSPPTPGKHGLEQTGEEKVMVTVPDKNPPCPCCGTRVNSVLNLIEHLKVSHGKRGVCFRCAKCGKENSNYHSVVCHFKKCRGPETEKAPAGEWICEVCNRDFTTKIGLGQHKRLAHPAVRNQERIVASQPKETSNRGAHKRCWTKEEEELLIRLEAQFEGNKNINKLIAEHITTKTAKQISDKRRLLSRKPAEEPREEPGTCHHTRRAAASLRTEPEMSHHAQAEDRDNGPGRRPLPGRAAAGGRTMDEIRRHPDKGNGQQRPTKQKSEEQLQAYYKKTLEERLSAGALNTFPRAFKQVMEGRDIKLVINQTAQDCFGCLESISQIRTATRDKKDTVTREKHPKKPFQKWMKKRAIKKGNYLRFQRLFYLDRGKLAKIILDDIECLSCDIPLSEIYSVFKTRWETTGSFKSLGDFKTYGKADNTAFRELITAKEIEKNVQEMSKGSAPGPDGITLGDVVKMDPEFSRTMEIFNLWLTTGKIPDMVRGCRTVLIPKSSKPDRLKDINNWRPITIGSILLRLFSRIVTARLSKACPLNPRQRGFIRAAGCSENLKLLQTIIWSAKREHRPLGVVFVDIAKAFDTVSHQHIIHALQQREVDPHIVGLVSNMYENISTYITTKRNTHTDKIQIRVGVKQGDPMSPLLFNLAMDPLLCKLEESGKGYHRGQSSITAMAFADDLVLLSDSWENMNTNISILETFCNLTGLKTQGQKCHGFYIKPTKDSYTINDCAAWTINGTPLNMIDPGESEKYLGLQFDPWIGIARSGLSTKLDFWLQRIDQAPLKPLQKLDILKTYTIPRLIYIADHSEVKSALLETLDQKIRTAVKEWLHLPPCTCDAILYSSTRDGGLGITKLAGLIPSVQARRLHRIAQSSDDTMKCFMEKEKMEQLHKKLWIQAGGDRENIPSIWEAPPSSEPPNNVSTNSEWEAPTQKDKFPKPCNWRKNEFKKWTKLASQGRGIVNFERDKISNHWIQYYRRIPHRKLLTALQLRANVYPTREFLARGRQDQYIKACRHCDADNESCAHIIGNCPVTQDARIKRHNYICELLLEEAKKKDWVVFKEPHIRDSNKELYKPDLIFVKDGRALVVDVTVRYEAAKSSLEEAAAEKVRKYKHLETEVRHLTNAKDVTFVGFPLGARGKWHQDNFKLLTELGLSKSRQVKMAETFSTVALFSSVDIVHMFASRARKSMVM

SEQ ID NO: 1478 - protein, 1554 aa, synthetic construct; identical to SEQ ID NO: 278

SEQ ID NO: 1479 - protein, 1411 aa, synthetic construct; identical to SEQ ID NO: 274

SEQ ID NO: 1480 - protein, 1390 aa, synthetic construct
MASCPKPGPPVSAGAMSLESGLTTHSVLAIERGPNSLANSGSDFGGGGLGLPLRLLRVSVGTQTSRSDWVDLVSWSHPGPTSKSQQVDLVSLFPKHRVDLLSKNDQVDLVAQFLPSKFPPNLAENDLALLVNLEFYRSDLHVYECVHFAAHWEGLSGLPEVYEQLAPQPCVGETLHSSLPRDSELFVPEEGSSEKESEDAPKTSPPTPGKHGLEQTGEEKVMVTVPDKNPPCPCCGTRVNSVLNLIEHLKVSHGKRGVCFRCAKCGKENSNYHSVVCHFPKCRGPETEKAPAGEWICEVCNRDFTTKIGLGQHKRLAHPAVRNQERIVASQPKETSNRGAHKRCWTKEEEELLIRLEAQFEGNKNINKLIAEHITTKTAKQISDKRRLLSRKPAEEPREEPGTCHHTRRAAASLRTEPEMSHHAQAEDRDNGPGRRPLPGRAAAGGRTMDEIRRHPDKGNGQQRPTKQKSEEQLQAYYKKTLEERLSAGALNTFPRAFKQVMEGRDIKLVINQTAQDYFGCLESISQIRTATRDKKDTVTREKHPKKPFQKWMKKRAIKKGNYLRFQRLFYLDRGKLAKIILDDIECLSCDIPLSEIYSVFKTRWETTGSFKSLGDFKTYGKADNTAFRELITAKEIEKNVQEMSKGSAPGPDGITLGDVVKMDPEFSRTMEIFNLWLTTGKIPDMVRGCRTVLIPKSSKPDRLKDINNWRPITIGSILLRLFSRIVTARLSKACPLNPRQRGFIRAAGCSENLKLLQTIIWSAKREHRPLGVVFVDIAKAFDTVSHQHIIHALQQREVDPHIVGLVSNMYENISTYITTKRNTHTDKIQIRVGVKQGDPMSPLLFNLAMDPLLCKLEESGKGYHRGQSSITAMAFADDLVLLSDSWENMNTNISILETFCNLTGLKTQGQKCHGFYIKPTKDSYTINDCAAWTINGTPLNMIDPGESEKYLGLQFDPWIGIARSGLSTKLDFWLQRIDQAPLKPLQKTDILKTYTIPRLIYIADHSEVKTALLETLDQKIRTAVKEWLHLPPCTCDAILYSSTRDGGLGITKLAGLIPSVQARRLHRIAQSSDDTMKCFMEKEKMEQLHKKLWIQAGGDRENIPSIWEAPPSSEPPNNVSTNSEWEAPTQKDKFPKPCNWRKNEFKKWTKLASQGRGIVNFERDKISNHWIQYYRRIPHRKLLTALQLRANVYPTREFLARGRQDQYIKACRHCDADIESCAHIIGNCPVTQDARIKRHNYICELLLEEAKKKDWVVFKEPHIRDSNKELYKPDLIFVKDARALVVDVTVRYEAAKSSLEEAAAEKVRKYKHLETEVRHLTNAKDVTFVGFPLGARGKWHQDNFKLLTELGLSKSRQVKMAETFSTVALFSSVDIVHMFASRARKSMVM

SEQ ID NO: 1481 - protein, 1390 aa, synthetic construct
MASCPKPGPPVSAGAMSLESGLTTHSVLAIERGPNSLANSGSDFGGGGLGLPLRLLRVSVGTQTSRSDWVDLVSWSHPGPTSKSQQVDLVSLFPKHRVDLLSKNDQVDLVAQFLPSKFPPNLAENDLALLVNLEFYRSDLHVYECVHFAAHWEGLSGLPEVYEQLAPQPCVGETLHSSLPRDSELFVPEEGSSEKESEDAPKTSPPTPGKHGLEQTGEEKVMVTVPDKNPPCPCCGTRVNSVLNLIEHLKVSHGKRGVCFRCAKCGKENSNYHSVVCHFPKCRGPETEKAPAGEWICEVCNRDFTTKIGLGQHKRLAHPAVRNQERIVASQPKETSNRGAHKRCWTKEEEELLIRLEAQFEGNKNINKLIAEHITTKTAKQISDKRRLLSRKPAEEPREEPGTCHHTRRAAASLRTEPEMSHHAQAEDRDNGPGRRPLPGRAAAGGRTMDEIRRHPDKGNGQQRPTKQKSEEQLQAYYKKTLEERLSAGALNTFPRAFKQVMEGRDIKLVINQTAQDCFGCLESISQIRTATRDKKDTVTRKKHPKKPFQKWMKDRAIKKGNYLRFQRLFYLDRGKLAKIILDDIECLSCDIPLSEIYSVFKTRWETTGSFKSLGDFKTYGKADNTAFRELITAKEIEKNVQEMSKGSAPGPDGITLGDVVKMDPEFSRTMEIFNLWLTTGKIPDMVRGCRTVLIPKSSDPDRLKDINNWRPITIGSILLRLFSRIVTARLSKACPLNPRQRGFIRAAGCSENLKLLQTIIWSAKREHRPLGVVFVDIAKAFDTVSHQHIIHALQQREVDPHIVGLVSNMYENISTYITTKRNTHTDKIQIRVGVKQGDPMSPLLFNLAMDPLLCKLEESGKGYHRGQSSITAMAFADDLVLLSDSWENMNTNISILETFCNLTGLKTQGQKCHGFYIKPTKDSYTINDCAAWTINGTPLNMIDPGESEKYLGLQFDPWIGIARSGLSTKLDFWLQRIDQAPLKPLQKTDILKTYTIPRLIYIADHSEVKTALLETLDQKIRTAVKEWLHLPPCTCDAILYSSTRDGGLGITKLAGLIPSVQARRLHRIAQSSDDTMKCFMEKEKMEQLHKKLWIQAGGDRENIPSIWEAPPSSEPPNNVSTNSEWEAPTQKDKFPKPCNWRKNEFKKWTKLASQGRGIVNFERDKISNHWIQYYRRIPHRKLLTALQLRANVYPTREFLARGRQDQYIKACRHCDADIESCAHIIGNCPVTQDARIKRHNYICELLLEEAKKKDWVVFKEPHIRDSNKELYKPDLIFVKDARALVVDVTVRYEAAKSSLEEAAAEKVRKYKHLETEVRHLTNAKDVTFVGFPLGARGKWHQDNFKLLTELGLSKSRQVKMAETFSTVALFSSVDIVHMFASRARKSMVM

SEQ ID NO: 1482 - protein, 1390 aa, synthetic construct
MASCPKPGPPVSAGAMSLESGLTTHSVLAIERGPNSLANSGSDFGGGGLGLPLRLLRVSVGTQTSRSDWVDLVSWSHPGPTSKSQQVDLVSLFPKHRVDLLSKNDQVDLVAQFLPSKFPPNLAENDLALLVNLEFYRSDLHVYECVHFAAHWEGLSGLPEVYEQLAPQPCVGETLHSSLPRDSELFVPEEGSSEKESEDAPKTSPPTPGKHGLEQTGEEKVMVTVPDKNPPCPCCGTRVNSVLNLIEHLKVSHGKRGVCFRCAKCGKENSNYHSVVCHFPKCRGPETEKAPAGEWICEVCNRDFTTKIGLGQHKRLAHPAVRNQERIVASQPKETSNRGAHKRCWTKEEEELLIRLEAQFEGNKNINKLIAEHITTKTAKQISDKRRLLSRKPAEEPREEPGTCHHTRRAAASLRTEPEMSHHAQAEDRDNGPGRRPLPGRAAAGGRTMDEIRRHPDKGNGQQRPTKQKSEEQLQAYYKKTLEERLSAGALNTFPRAFKQVMEGRDIKLVINQTAQDYFGCLESISQIRTATRDKKDTVTREKHPKKPFQKWMKDRAIKKGNYLRFQRLFYLDRGKLAKIILDDIECLSCDIPLSEIYSVFKTRWETTGSFKSLGDFKTYGKADNTAFRELITAKEIEKNVQEMSKGSAPGPDGITLGDVVKMDPEFSRTMEIFNLWLTTGKIPDMVRGCRTVLIPKSSKPDRLKDINNWRPITIGSILLRLFSRIVTARLSKACPLNPRQRGFIRAAGCSENLKLLQTIIWSAKREHRPLGVVFVDIAKAFDTVSHQHIIHALQQREVDPHIVGLVSNMYENISTYITTKRNTHTDKIQIRVGVKQGDPMSPLLFNLAMDPLLCKLEESGKGYHRGQSSITAMAFADDLVLLSDSWEGMNTNISILETFCNLTGLKTQGQKCHGFYIKPTKDSYTINDCAAWTINGTPLNMIDPGESEKYLGLQFDPWIGIARSGLSTKLDFWLQRIDQAPLKPLQKTDILKTYTIPRLIYIADHSEVKTALLETLDQKIRTAVKEWLHLPPCTCDAILYSSTRDGGLGITKLAGLIPSVQARRLHRIAQSSDDTMKCFMEKEKMEQLHKKLWIQAGGDRENIPSIWEAPPSSEPPNNVSTNSEWEAPTQKDKFPKPCNWRKNEFKKWTKLASQGRGIVNFERDKISNHWIQYYRRIPHRKLLTALQLRANVYPTREFLARGRQDQYIKACRHCDADIESCAHIIGNCPVTQDARIKRHNYICELLLEEAKKKDWVVFKEPHIRDSNKELYKPDLIFVKDARALVVDVTVRYEAAKSSLEEAAAEKVRKYKHLETEVRHLTNAKDVTFVGFPLGARGKWHQDNFKLLTELGLSKSRQVKMAETFSTVALFSSVDIVHMFASRARKSMVM

SEQ ID NO: 1483 - protein, 1390 aa, synthetic construct
MASCPKPGPPVSAGAMSLESGLTTHSVLAIERGPNSLANSGSDFGGGGLGLPLRLLRVSVGTQTSRSDWVDLVSWSHPGPTSKSQQVDLVSLFPKHRVDLLSKNDQVDLVAQFLPSKFPPNLAENDLALLVNLEFYRSDLHVYECVHFAAHWEGLSGLPEVYEQLAPQPCVGETLHSSLPRDSELFVPEEGSSEKESEDAPKTSPPTPGKHGLEQTGEEKVMVTVPDKNPPCPCCGTRVNSVLNLIEHLKVSHGKRGVCFRCAKCGKENSNYHSVVCHFPKCRGPETEKAPAGEWICEVCNRDFTTKIGLGQHKRLAHPAVRNQERIVASQPKETSNRGAHKRCWTKEEEELLIRLEAQFEGNKNINKLIAEHITTKTAKQISDKRRLLSRKPAEEPREEPGTCHHTRRAAASLRTEPEMSHHAQAEDRDNGPGRRPLPGRAAAGGRTMDEIRRHPDKGNGQQRPTKQKSEEQLQAYYKKTLEERLSAGALNTFPRAFKQVMEGRDIKLVINQTAQDYFGCLESISQIRTATRDKKDTVTREKHPKKPFQKWMKDRAIKKGNYLRFQRLFYLDRGKLAKIILDDIECLSCDIPLSEIYSVFKTRWETTGSFKSLGDFKTYGKADNTAFRELITAKEIEKNVQEMSKGSAPGPDGITLGDVVKMDPEFSRTMEIFNLWLTTGKIPDMVRGCRTVLIPKSSKPDRLKDINNWRPITIGSILLRLFSRIVTARLSKACPLNPRQRGFIRAAGCSENLKLLQTIIWSAKREHRPLGVVFVDIAKAFDTVSHQHIIHALQQREVDPHIVGLVSNMYENISTYITTKRNTHTDKIQIRVGVKQGDPMSPLLFNLAMDPLLCKLEESGKGYHRGQSSITAMAFADDLVLLSDSWENMNTNISILETFCNLTGLKTQGQKCHGFYIKPTKDSYTINDCAAWTINGTPLNMIDPGESEKYLGLQFDPWIGIARSGLSTKLDFWLQRIDQAPLKPLQKLDILKTYTIPRLIYIADHSEVKTALLETLDQKIRTAVKEWLHLPPCTCDAILYSSTRDGGLGITKLAGLIPSVQARRLHRIAQSSDDTMKCFMEKEKMEQLHKKLWIQAGGDRENIPSIWEAPPSSEPPNNVSTNSEWEAPTQKDKFPKPCNWRKNEFKKWTKLASQGRGIVNFERDKISNHWIQYYRRIPHRKLLTALQLRANVYPTREFLARGRQDQYIKACRHCDADIESCAHIIGNCPVTQDARIKRHNYICELLLEEAKKKDWVVFKEPHIRDSNKELYKPDLIFVKDARALVVDVTVRYEAAKSSLEEAAAEKVRKYKHLETEVRHLTNAKDVTFVGFPLGARGKWHQDNFKLLTELGLSKSRQVKMAETFSTVALFSSVDIVHMFASRARKSMVM

SEQ ID NO: 1484 - protein, 1390 aa, synthetic construct
MASCPKPGPPVSAGAMSLESGLTTHSVLAIERGPNSLANSGSDFGGGGLGLPLRLLRVSVGTQTSRSDWVDLVSWSHPGPTSKSQQVDLVSLFPKHRVDLLSKNDQVDLVAQFLPSKFPPNLAENDLALLVNLEFYRSDLHVYECVHFAAHWEGLSGLPEVYEQLAPQPCVGETLHSSLPRDSELFVPEEGSSEKESEDAPKTSPPTPGKHGLEQTGEEKVMVTVPDKNPPCPCCGTRVNSVLNLIEHLKVSHGKRGVCFRCAKCGKENSNYHSVVCHFPKCRGPETEKAPAGEWICEVCNRDFTTKIGLGQHKRLAHPAVRNQERIVASQPKETSNRGAHKRCWTKEEEELLIRLEAQFEGNKNINKLIAEHITTKTAKQISDKRRLLSRKPAEEPREEPGTCHHTRRAAASLRTEPEMSHHAQAEDRDNGPGRRPLPGRAAAGGRTMDEIRRHPDKGNGQQRPTKQKSEEQLQAYYKKTLEERLSAGALNTFPRAFKQVMEGRDIKLVINQTAQDYFGCLESISQIRTATRDKKDTVTREKHPKKPFQKWMKKRAIKKGNYLRFQRLFYLDRGKLAKIILDDIECLSCDIPLSEIYSVFKTRWETTGSFKSLGDFKTYGKADNTAFRELITAKEIEKNVQEMSKGSAPGPDGITLGDVVKMDPEFSRTMEIFNLWLTTGKIPDMVRGCRTVLIPKSSDPDRLKDINNWRPITIGSILLRLFSRIVTARLSKACPLNPRQRGFIRAAGCSENLKLLQTIIWSAKREHRPLGVVFVDIAKAFDTVSHQHIIHALQQREVDPHIVGLVSNMYENISTYITTKRNTHTDKIQIRVGVKQGDPMSPLLFNLAMDPLLCKLEESGKGYHRGQSSITAMAFADDLVLLSDSWENMNTNISILETFCNLTGLKTQGQKCHGFYIKPTKDSYTINDCAAWTINGTPLNMIDPGESEKYLGLQFDPWIGIARSGLSTKLDFWLQRIDQAPLKPLQKTDILKTYTIPRLIYIADHSEVKTALLETLDQKIRTAVKEWLHLPPCTCDAILYSSTRDGGLGITKLAGLIPSVQARRLHRIAQSSDDTMKCFMEKEKMEQLHKKLWIQAGGDRENIPSIWEAPPSSEPPNNVSTNSEWEAPTQKDKFPKPCNWRKNEFKKWTKLASQGRGIVNFERDKISNHWIQYYRRIPHRKLLTALQLRANVYPTREFLARGRQDQYIKACRHCDADIESCAHIIGNCPVTQDARIKRHNYICELLLEEAKKKDWVVFKEPHIRDSNKELYKPDLIFVKDARALVVDVTVRYEAAKSSLEEAAAEKVRKYKHLETEVRHLTNAKDVTFVGFPLGARGKWHQDNFKLLTELGLSKSRQVKMAETFSTVALFSSVDIVHMFASRARKSMVM

SEQ ID NO: 1485 - protein, 1390 aa, synthetic construct
MASCPKPGPPVSAGAMSLESGLTTHSVLAIERGPNSLANSGSDFGGGGLGLPLRLLRVSVGTQTSRSDWVDLVSWSHPGPTSKSQQVDLVSLFPKHRVDLLSKNDQVDLVAQFLPSKFPPNLAENDLALLVNLEFYRSDLHVYECVHFAAHWEGLSGLPEVYEQLAPQPCVGETLHSSLPRDSELFVPEEGSSEKESEDAPKTSPPTPGKHGLEQTGEEKVMVTVPDKNPPCPCCGTRVNSVLNLIEHLKVSHGKRGVCFRCAKCGKENSNYHSVVCHFKKCRGPETEKAPAGEWICEVCNRDFTTKIGLGQHKRLAHPAVRNQERIVASQPKETSNRGAHKRCWTKEEEELLIRLEAQFEGNKNINKLIAEHITTKTAKQISDKRRLLSRKPAEEPREEPGTCHHTRRAAASLRTEPEMSHHAQAEDRDNGPGRRPLPGRAAAGGRTMDEIRRHPDKGNGQQRPTKQKSEEQLQAYYKKTLEERLSAGALNTFPRAFKQVMEGRDIKLVINQTAQDYFGCLESISQIRTATRDKKDTVTREKHPKKPFQKWMKKRAIKKGNYLRFQRLFYLDRGKLAKIILDDIECLSCDIPLSEIYSVFKTRWETTGSFKSLGDFKTYGKADNTAFRELITAKEIEKNVQEMSKGSAPGPDGITLGDVVKMDPEFSRTMEIFNLWLTTGKIPDMVRGCRTVLIPKSSDPDRLKDINNWRPITIGSILLRLFSRIVTARLSKACPLNPRQRGFIRAAGCSENLKLLQTIIWSAKREHRPLGVVFVDIAKAFDTVSHQHIIHALQQREVDPHIVGLVSNMYENISTYITTKRNTHTDKIQIRVGVKQGDPMSPLLFNLAMDPLLCKLEESGKGYHRGQSSITAMAFADDLVLLSDSWENMNTNISILETFCNLTGLKTQGQKCHGFYIKPTKDSYTINDCAAWTINGTPLNMIDPGESEKYLGLQFDPWIGIARSGLSTKLDFWLQRIDQAPLKPLQKTDILKTYTIPRLIYIADHSEVKTALLETLDQKIRTAVKEWLHLPPCTCDAILYSSTRDGGLGITKLAGLIPSVQARRLHRIAQSSDDTMKCFMEKEKMEQLHKKLWIQAGGDRENIPSIWEAPPSSEPPNNVSTNSEWEAPTQKDKFPKPCNWRKNEFKKWTKLASQGRGIVNFERDKISNHWIQYYRRIPHRKLLTALQLRANVYPTREFLARGRQDQYIKACRHCDADIESCAHIIGNCPVTQDARIKRHNKICELLLEEAKKKDWVVFKEPHIRDSNKELYKPDLIFVKDARALVVDVTVRYEAAKSSLEEAAAEKVRKYKHLETEVRHLTNAKDVTFVGFPLGARGKWHQDNFKLLTELGLSKSRQVKMAETFSTVALFSSVDIVHMFASRARKSMVM

SEQ ID NO: 1486 - protein, 1390 aa, synthetic construct
MASCPKPGPPVSAGAMSLESGLTTHSVLAIERGPNSLANSGSDFGGGGLGLPLRLLRVSVGTQTSRSDWVDLVSWSHPGPTSKSQQVDLVSLFPKHRVDLLSKNDQVDLVAQFLPSKFPPNLAENDLALLVNLEFYRSDLHVYECVHFAAHWEGLSGLPEVYEQLAPQPCVGETLHSSLPRDSELFVPEEGSSEKESEDAPKTSPPTPGKHGLEQTGEEKVMVTVPDKNPPCPCCGTRVNSVLNLIEHLKVSHGKRGVCFRCAKCGKENSNYHSVVCHFKKCRGPETEKAPAGEWICEVCNRDFTTKIGLGQHKRLAHPAVRNQERIVASQPKETSNRGAHKRCWTKEEEELLIRLEAQFEGNKNINKLIAEHITTKTAKQISDKRRLLSRKPAEEPREEPGTCHHTRRAAASLRTEPEMSHHAQAEDRDNGPGRRPLPGRAAAGGRTMDEIRRHPDKGNGQQRPTKQKSEEQLQAYYKKTLEERLSAGALNTFPRAFKQVMEGRDIKLVINQTAQDYFGCLESISQIRTATRDKKDTVTREKHPKKPFQKWMKKRAIKKGNYLRFQRLFYLDRGKLAKIILDDIECLSCDIPLSEIYSVFKTRWETTGSFKSLGDFKTYGKADNTAFRELITAKEIEKNVQEMSKGSAPGPDGITLGDVVKMDPEFSRTMEIFNLWLTTGKIPDMVRGCRTVLIPKSSDPDRLKDINNWRPITIGSILLRLFSRIVTARLSKACPLNPRQRGFIRAAGCSENLKLLQTIIWSAKREHRPLGVVFVDIAKAFDTVSHQHIIHALQQREVDPHIVGLVSNMYENISTYITTKRNTHTDKIQIRVGVKQGDPMSPLLFNLAMDPLLCKLEESGKGYHRGQSSITAMAFADDLVLLSDSWEGMNTNISILETFCNLTGLKTQGQKCHGFYIKPTKDSYTINDCAAWTINGTPLNMIDPGESEKYLGLQFDPWIGIARSGLSTKLDFWLQRIDQAPLKPLQKTDILKTYTIPRLIYIADHSEVKTALLETLDQKIRTAVKEWLHLPPCTCDAILYSSTRDGGLGITKLAGLIPSVQARRLHRIAQSSDDTMKCFMEKEKMEQLHKKLWIQAGGDRENIPSIWEAPPSSEPPNNVSTNSEWEAPTQKDKFPKPCNWRKNEFKKWTKLASQGRGIVNFERDKISNHWIQYYRRIPHRKLLTALQLRANVYPTREFLARGRQDQYIKACRHCDADIESCAHIIGNCPVTQDARIKRHNYICELLLEEAKKKDWVVFKEPHIRDSNKELYKPDLIFVKDARALVVDVTVRYEAAKSSLEEAAAEKVRKYKHLETEVRHLTNAKDVTFVGFPLGARGKWHQDNFKLLTELGLSKSRQVKMAETFSTVALFSSVDIVHMFASRARKSMVM

SEQ ID NO: 1487 - protein, 1390 aa, synthetic construct
MASCPKPGPPVSAGAMSLESGLTTHSVLAIERGPNSLANSGSDFGGGGLGLPLRLLRVSVGTQTSRSDWVDLVSWSHPGPTSKSQQVDLVSLFPKHRVDLLSKNDQVDLVAQFLPSKFPPNLAENDLALLVNLEFYRSDLHVYECVHFAAHWEGLSGLPEVYEQLAPQPCVGETLHSSLPRDSELFVPEEGSSEKESEDAPKTSPPTPGKHGLEQTGEEKVMVTVPDKNPPCPCCGTRVNSVLNLIEHLKVSHGKRGVCFRCAKCGKENSNYHSVVCHFKKCRGPETEKAPAGEWICEVCNRDFTTKIGLGQHKRLAHPAVRNQERIVASQPKETSNRGAHKRCWTKEEEELLIRLEAQFEGNKNINKLIAEHITTKTAKQISDKRRLLSRKPAEEPREEPGTCHHTRRAAASLRTEPEMSHHAQAEDRDNGPGRRPLPGRAAAGGRTMDEIRRHPDKGNGQQRPTKQKSEEQLQAYYKKTLEERLSAGALNTFPRAFKQVMEGRDIKLVINQTAQDYFGCLESISQIRTATRDKKDTVTREKHPKKPFQKWMKKRAIKKGNYLRFQRLFYLDRGKLAKIILDDIECLSCDIPLSEIYSVFKTRWETTGSFKSLGDFKTYGKADNTAFRELITAKEIEKNVQEMSKGSAPGPDGITLGDVVKMDPEFSRTMEIFNLWLTTGKIPDMVRGCRTVLIPKSSDPDRLKDINNWRPITIGSILLRLFSRIVTARLSKACPLNPRQRGFIRAAGCSENLKLLQTIIWSAKREHRPLGVVFVDIAKAFDTVSHQHIIHALQQREVDPHIVGLVSNMYENISTYITTKRNTHTDKIQIRVGVKQGDPMSPLLFNLAMDPLLCKLEESGKGYHRGQSSITAMAFADDLVLLSDSWENMNTNISILETFCNLTGLKTQGQKCHGFYIKPTKDSYTINDCAAWTINGTPLNMIDPGESEKYLGLQFDPWIGIARSGLSTKLDFWLQRIDQAPLKPLQKLDILKTYTIPRLIYIADHSEVKTALLETLDQKIRTAVKEWLHLPPCTCDAILYSSTRDGGLGITKLAGLIPSVQARRLHRIAQSSDDTMKCFMEKEKMEQLHKKLWIQAGGDRENIPSIWEAPPSSEPPNNVSTNSEWEAPTQKDKFPKPCNWRKNEFKKWTKLASQGRGIVNFERDKISNHWIQYYRRIPHRKLLTALQLRANVYPTREFLARGRQDQYIKACRHCDADIESCAHIIGNCPVTQDARIKRHNYICELLLEEAKKKDWVVFKEPHIRDSNKELYKPDLIFVKDARALVVDVTVRYEAAKSSLEEAAAEKVRKYKHLETEVRHLTNAKDVTFVGFPLGARGKWHQDNFKLLTELGLSKSRQVKMAETFSTVALFSSVDIVHMFASRARKSMVM

SEQ ID NO: 1488 - protein, 1390 aa, synthetic construct
MASCPKPGPPVSAGAMSLESGLTTHSVLAIERGPNSLANSGSDFGGGGLGLPLRLLRVSVGTQTSRSDWVDLVSWSHPGPTSKSQQVDLVSLFPKHRVDLLSKNDQVDLVAQFLPSKFPPNLAENDLALLVNLEFYRSDLHVYECVHFAAHWEGLSGLPEVYEQLAPQPCVGETLHSSLPRDSELFVPEEGSSEKESEDAPKTSPPTPGKHGLEQTGEEKVMVTVPDKNPPCPCCGTRVNSVLNLIEHLKVSHGKRGVCFRCAKCGKENSNYHSVVCHFKKCRGPETEKAPAGEWICEVCNRDFTTKIGLGQHKRLAHPAVRNQERIVASQPKETSNRGAHKRCWTKEEEELLIRLEAQFEGNKNINKLIAEHITTKTAKQISDKRRLLSRKPAEEPREEPGTCHHTRRAAASLRTEPEMSHHAQAEDRDNGPGRRPLPGRAAAGGRTMDEIRRHPDKGNGQQRPTKQKSEEQLQAYYKKTLEERLSAGALNTFPRAFKQVMEGRDIKLVINQTAQDYFGCLESISQIRTATRDKKDTVTRKKHPKKPFQKWMKKRAIKKGNYLRFQRLFYLDRGKLAKIILDDIECLSCDIPLSEIYSVFKTRWETTGSFKSLGDFKTYGKADNTAFRELITAKEIEKNVQEMSKGSAPGPDGITLGDVVKMDPEFSRTMEIFNLWLTTGKIPDMVRGCRTVLIPKSSDPDRLKDINNWRPITIGSILLRLFSRIVTARLSKACPLNPRQRGFIRAAGCSENLKLLQTIIWSAKREHRPLGVVFVDIAKAFDTVSHQHIIHALQQREVDPHIVGLVSNMYENISTYITTKRNTHTDKIQIRVGVKQGDPMSPLLFNLAMDPLLCKLEESGKGYHRGQSSITAMAFADDLVLLSDSWENMNTNISILETFCNLTGLKTQGQKCHGFYIKPTKDSYTINDCAAWTINGTPLNMIDPGESEKYLGLQFDPWIGIARSGLSTKLDFWLQRIDQAPLKPLQKTDILKTYTIPRLIYIADHSEVKTALLETLDQKIRTAVKEWLHLPPCTCDAILYSSTRDGGLGITKLAGLIPSVQARRLHRIAQSSDDTMKCFMEKEKMEQLHKKLWIQAGGDRENIPSIWEAPPSSEPPNNVSTNSEWEAPTQKDKFPKPCNWRKNEFKKWTKLASQGRGIVNFERDKISNHWIQYYRRIPHRKLLTALQLRANVYPTREFLARGRQDQYIKACRHCDADIESCAHIIGNCPVTQDARIKRHNYICELLLEEAKKKDWVVFKEPHIRDSNKELYKPDLIFVKDARALVVDVTVRYEAAKSSLEEAAAEKVRKYKHLETEVRHLTNAKDVTFVGFPLGARGKWHQDNFKLLTELGLSKSRQVKMAETFSTVALFSSVDIVHMFASRARKSMVM

SEQ ID NO: 1489 - skipped

SEQ ID NO: 1490 - protein, 1390 aa, synthetic construct
MASCPKPGPPVSAGAMSLESGLTTHSVLAIERGPNSLANSGSDFGGGGLGLPLRLLRVSVGTQTSRSDWVDLVSWSHPGPTSKSQQVDLVSLFPKHRVDLLSKNDQVDLVAQFLPSKFPPNLAENDLALLVNLEFYRSDLHVYECVHFAAHWEGLSGLPEVYEQLAPQPCVGETLHSSLPRDSELFVPEEGSSEKESEDAPKTSPPTPGKHGLEQTGEEKVMVTVPDKNPPCPCCGTRVNSVLNLIEHLKVSHGKRGVCFRCAKCGKENSNYHSVVCHFKKCRGPETEKAPAGEWICEVCNRDFTTKIGLGQHKRLAHPAVRNQERIVASQPKETSNRGAHKRCWTKEEEELLIRLEAQFEGNKNINKLIAEHITTKTAKQISDMRRLLSRKPAEEPREEPGTCHHTRRAAASLRTEPEMSHHAQAEDRDNGPGRRPLPGRAAAGGRTMDEIRRHPDKGNGQQRPTKQKSEEQLQAYYKKTLEERLSAGALNTFPRAFKQVMEGRDIKLVINQTAQDYFGCLESISQIRTATRDKKDTVTREKHPKKPFQKWMKKRAIKKGNYLRFQRLFYLDRGKLAKIILDDIECLSCDIPLSEIYSVFKTRWETTGSFKSLGDFKTYGKADNTAFRELITAKEIEKNVQEMSKGSAPGPDGITLGDVVKMDPEFSRTMEIFNLWLTTGKIPDMVRGCRTVLIPKSSDPDRLKDINNWRPITIGSILLRLFSRIVTARLSKACPLNPRQRGFIRAAGCSENLKLLQTIIWSAKREHRPLGVVFVDIAKAFDTVSHQHIIHALQQREVDPHIVGLVSNMYENISTYITTKRNTHTDKIQIRVGVKQGDPMSPLLFNLAMDPLLCKLEESGKGYHRGQSSITAMAFADDLVLLSDSWENMNTNISILETFCNLTGLKTQGQKCHGFYIKPTKDSYTINDCAAWTINGTPLNMIDPGESEKYLGLQFDPWIGIARSGLSTKLDFWLQRIDQAPLKPLQKTDILKTYTIPRLIYIADHSEVKTALLETLDQKIRTAVKEWLHLPPCTCDAILYSSTRDGGLGITKLAGLIPSVQARRLHRIAQSSDDTMKCFMEKEKMEQLHKKLWIQAGGDRENIPSIWEAPPSSEPPNNVSTNSEWEAPTQKDKFPKPCNWRKNEFKKWTKLASQGRGIVNFERDKISNHWIQYYRRIPHRKLLTALQLRANVYPTREFLARGRQDQYIKACRHCDADIESCAHIIGNCPVTQDARIKRHNYICELLLEEAKKKDWVVFKEPHIRDSNKELYKPDLIFVKDARALVVDVTVRYEAAKSSLEEAAAEKVRKYKHLETEVRHLTNAKDVTFVGFPLGARGKWHQDNFKLLTELGLSKSRQVKMAETFSTVALFSSVDIVHMFASRARKSMVM

SEQ ID NO: 1491-1492 - skipped (2 entries)

SEQ ID NO: 1493 - protein, 1390 aa, synthetic construct
MASCPKPGPPVSAGAMSLESGLTTHSVLAIERGPNSLANSGSDFGGGGLGLPLRLLRVSVGTQTSRSDWVDLVSWSHPGPTSKSQQVDLVSLFPKHRVDLLSKNDQVDLVAQFLPSKFPPNLAENDLALLVNLEFYRSDLHVYECVHFAAHWEGLSGLPEVYEQLAPQPCVGETLHSSLPRDSELFVPEEGSSEKESEDAPKTSPPTPGKHGLEQTGEEKVMVTVPDKNPPCPCCGTRVNSVLNLIEHLKVSHGKRGVCFRCAKCGKENSNYHSVVCHFKKCRGPETEKAPAGEWICEVCNRDFTTKIGLGQHKRLAHPAVRNQERIVASQPKETSNRGAHKRCWTKEEEELLIRLEAQFEGNKNINKLIAEHITTKTAKQISDKRRLLSRKPAEEPRMEPGTCHHTRRAAASLRTEPEMSHHAQAEDRDNGPGRRPLPGRAAAGGRTMDEIRRHPDKGNGQQRPTKQKSEEQLQAYYKKTLEERLSAGALNTFPRAFKQVMEGRDIKLVINQTAQDYFGCLESISQIRTATRDKKDTVTREKHPKKPFQKWMKKRAIKKGNYLRFQRLFYLDRGKLAKIILDDIECLSCDIPLSEIYSVFKTRWETTGSFKSLGDFKTYGKADNTAFRELITAKEIEKNVQEMSKGSAPGPDGITLGDVVKMDPEFSRTMEIFNLWLTTGKIPDMVRGCRTVLIPKSSDPDRLKDINNWRPITIGSILLRLFSRIVTARLSKACPLNPRQRGFIRAAGCSENLKLLQTIIWSAKREHRPLGVVFVDIAKAFDTVSHQHIIHALQQREVDPHIVGLVSNMYENISTYITTKRNTHTDKIQIRVGVKQGDPMSPLLFNLAMDPLLCKLEESGKGYHRGQSSITAMAFADDLVLLSDSWENMNTNISILETFCNLTGLKTQGQKCHGFYIKPTKDSYTINDCAAWTINGTPLNMIDPGESEKYLGLQFDPWIGIARSGLSTKLDFWLQRIDQAPLKPLQKTDILKTYTIPRLIYIADHSEVKTALLETLDQKIRTAVKEWLHLPPCTCDAILYSSTRDGGLGITKLAGLIPSVQARRLHRIAQSSDDTMKCFMEKEKMEQLHKKLWIQAGGDRENIPSIWEAPPSSEPPNNVSTNSEWEAPTQKDKFPKPCNWRKNEFKKWTKLASQGRGIVNFERDKISNHWIQYYRRIPHRKLLTALQLRANVYPTREFLARGRQDQYIKACRHCDADIESCAHIIGNCPVTQDARIKRHNYICELLLEEAKKKDWVVFKEPHIRDSNKELYKPDLIFVKDARALVVDVTVRYEAAKSSLEEAAAEKVRKYKHLETEVRHLTNAKDVTFVGFPLGARGKWHQDNFKLLTELGLSKSRQVKMAETFSTVALFSSVDIVHMFASRARKSMVM

SEQ ID NO: 1494 - protein, 1541 aa, synthetic construct; identical to SEQ ID NO: 277

SEQ ID NO: 1495 - protein, 1390 aa, synthetic construct; identical to SEQ ID NO: 279

SEQ ID NO: 1496 - protein, 1398 aa, synthetic construct; identical to SEQ ID NO: 281

SEQ ID NO: 1497 - protein, 1322 aa, synthetic construct; identical to SEQ ID NO: 259

SEQ ID NO: 1498 - protein, 1254 aa, synthetic construct; identical to SEQ ID NO: 265

SEQ ID NO: 1499 - protein, 1390 aa, synthetic construct
MASCPKPGPPVSAGAMSLESGLTTHSVLAIERGPNSLANSGSDFGGGGLGGPLRLLRVSVGTQTSRSDWVDLVSWSHPGPTSKSQQVDLVSLFPKHRVDLLSKNDQVDLVAQFLPSKFPPNLAENDLALLVNLEFYRSDLHVYECVHFAAHWEGLSGLPEVYEQLAPQPCVGETLHSSLPRDSELFVPEEGSSEKESEDAPKTSPPTPGKHGLEQTGEEKVMVTVPDKNPPCPCCGTRVNSVLNLIEHLKVSHGKRGVCFRCAKCGKENSNYHSVVCHFKKCRGPETEKAPAGEWICEVCNRDFTTKIGLGQHKRLAHPAVRNQERIVASQPKETSNRGAHKRCWTKEEEELLIRLEAQFEGNKNINKLIAEHITTKTAKQISDMRRLLSRKPAEEPREEPGTCHHTRRAAASLRTEPEMSHHAQAEDRDNGPGRRPLPGRAAAGGRTMDEIRRHPDKGNGQQRPTKQKSEEQLQAYYKKTLEERLSAGALNTFPRAFKQVMEGRDIKLVINQTAQDYFGCLESISQIRTATRDKKDTGTREKHPKKPFQKWMKDRAIKKGNYLRFQRLFYLDRGKLAKIILDDIECLSCDIPLSEIYSVFKTRWETTGSFKSLGDFKTYGKADNTAFRELITAKEIEKNVQEMSKGSAPGPDGITLGDVVKMDPEFSRTMEIFNLWLTTGKIPDMVRGCRTVLIPKSSKPDRLKDINNWRPITIGSILLRLFSRIVTARLSKACPLNPRQRGFIRAAGCSENLKLLQTIIWSAKREHRPLGVVFVDIAKAFDTVSHQHIIHALQQREVDPHIVGLVSNMYENISTYITTKRNTHTDKIQIRVGVKQGDPMSPLLFNLAMDPLLCKLEESGKGYHRGQSSITAMAFADDLVLLSDSWENMNTNISILETFCNLTGLKTQGQKCHGFYIKPTKDSYTINDCAAWTINGTPLNMIDPGESEKYLGLQFDPWIGIARSGLSTKLDFWLQRIDQAPLKPLQKTDILKTYTIPRLIYIADHSEVKTALLETLDQKIRTAVKEWLHLPPCTCDAILYSSTRDGGLGITKLAGLIPSVQARRLHRIAQSSDDTMKCFMEKEKMEQLHKKLWIQAGGDRENIPSIWEAPPSSEPPNNVSTNSEWEAPTQKDKFPKPCNWRKNEFKKWTKLASQGRGIVNFERDKISNHWIQYYRRIPHRKLLTALQLRANVYPTREFLARGRQDQYIKACRHCDADIESCAHIIGNCPVTQDARIKRHNYICELLLEEAKKKDWVVFKEPHIRDSNKELYKPDLIFVKDARALVVDVTVRYEAAKSSLEEAAAEKVRKYKHLETEVRHLTNAKDVTFVGFPLGARGKWHQDNFKLLTELGLSKSRQVKMAETFSTVALFSSVDIVHMFASRARKSMVM

SEQ ID NO: 1500 - protein, 1390 aa, synthetic construct; identical to SEQ ID NO: 1447

SEQ ID NO: 1501 - protein, 1390 aa, synthetic construct
MASCPKPGPPVSAGAMSLESGLTTHSVLAIERGPNSLANSGSDFGGGGLGLPLRLLRVSVGTQTSRSDWVDLVSWSHPGPTSKSQQVDLVSLFPKHRVDLLSKNDQVDLVAQFLPSKFPPNLAENDLALLVNLEFYRSDLHVYECVHFAAHWEGLSGLPEVYEQLAPQPCVGETLHSSLPRDSELFVPEEGSSEKESEDAPKTSPPTPGKHGLEQTGEEKVMVTVPDKNPPCPCCGTRVNSVLNLIEHLKVSHGKRRVCFRCAKCGKENSNYHSVVCHFPKCRGPETEKAPAGEWICEVCNRDFTTKIGLGQHKRLAHPAVRNQERIVASQPKETSNRGAHKRCWTKEEEELLIRLEAQFEGNKNINKLIAEHITTKTAKQISDKRRLLSRKPAEEPREEPGTCHHTRRAAASLRTEPEMSHHAQAEDRDNGPGRRPLPGRAAAGGRTMDEIRRHPDKGNGQQRPTKQKSEEQLQAYYKKTLEERLSAGALNTFPRAFKQVMEGRDIKLVINQTAQDCFGCLESISQIRTATRDKKDTVTREKHPKKPFQKWMKDRAIKKGNYLRFQRLFYLDRGKLAKIILDDIECLSCDIPLSEIYSVFKTRWETTGSFKSLGDFKTYGKADNTAFRELITAKEIEKNVQEMSKGSAPGPDGITLGDVVKMDPEFSRTMEIFNLWLTTGKIPDMVRGCRTVLIPKSSKPDRLKDINNWRPITIGSILLRLFSRIVTARLSKACPLNPRQRGFIRAAGCSENLKLLQTIIWSAKREHRPLGVVFVDIAKAFDTVSHQHIIHALQQREVDPHIVGLVSNMYENISTYITTKRNTHTDKIQIRVGVKQGDPMSPLLFNLAMDPLLCKLEESGKGYHRGQSSITAMAFADDLVLLSDSWENMNTNISILETFCNLTGLKTQGQKCHGFYIKPTKDSYTINDCAAWTINGTPLNMIDPGESEKYLGLQFDPWIGIARSGLSTKLDFWLQRIDQAPLKPLQKTDILKTYTIPRLIYIADHSEVKTALLETLDQKIRTAVKEWLHLPPCTCDAILYSSTRDGGLGITKLAGLIPSVQARRLHRIAQSSDDTMKCFMEKEKMEQLHKKLWIQAGGDRENIPSIWEAPPSSEPPNNVSTNSEWEAPTQKDKFPKPCNWRKNEFKKWTKLASQGRGIVNFERDKISNHWIQYYRRIPHRKLLTALQLRANVYPTREFLARGRQDQYIKACRHCDADIESCAHIIGNCPVTQDARIKRHNYICELLLEEAKKKDWVVFKEPHIRDSNKELYKPDLIFVKDARALVVDVTVRYEAAKSSLEEAAAEKVRKYKHLETEVRHLTNAKDVTFVGFPLGARGKWHQDNFKLLTELGLSKSRQVKMAETFSTVALFSSVDIVHMFASRARKSMVM

SEQ ID NO: 1502 - protein, 1399 aa, synthetic construct; identical to SEQ ID NO: 286

SEQ ID NO: 1503 - protein, 1399 aa, synthetic construct; identical to SEQ ID NO: 270

SEQ ID NO: 1504 - protein, 1399 aa, synthetic construct; identical to SEQ ID NO: 285

SEQ ID NO: 1505 - protein, 1390 aa, synthetic construct
MASCPKPGPPVSAGAMSLESGLTTHSVLAIERGPNSLANSGSDFGGGGLGLPLRLLRVSVGTQTSRSDWVDLVSWSHPGPTSKSQQVDLVSLFPKHRVDLLSKNDQVDLVAQFLPSKFPPNLAENDLALLVNLEFYRSDLHVYECVHFAAHWEGLSGLPEVYEQLAPQPCVGETLHSSLPRDSELFVPEEGSSEKESEDAPKTSPPTPGKHGLEQTGEEKVMVTVPDKNPPCPCCGTRVNSVLNLIEHLKVSHGKRGVCFRCAKCGKENSNYHSVVCHFPKCRGPETEKAPAGEWICEVCNRDFTTKIGLGQHKRLAHPAVRNQERIVASQPKETSNRGAHKRCWTKEEEELLIRLEAQFEGNKNINKLIAEHITTKTAKQISDKRRLLSRKPAEEPREEPGTCHHTRRAAASLRTEPEMSHHAQAEDRDNGPGRRPLPGRAAAGGRTMDEIRRHPDKGNGQQRPTKQKSEEQLQAYYKKTLEERLSAGALNTFPRAFKQVMEGRDIKLVINQTAQDCFGCLESISQIRTATRDKKDTVTREKHPKKPFQKWMKKRAIKKGNYLRFQRLFYLDRGKLAKIILDDIECLSCDIPLSEIYSVFKTRWETTGSFKSLGDFKTYGKADNTAFRELITAKEIEKNVQEMSKGSAPGPDGITLGDVVKMDPEFSRTMEIFNLWLTTGKIPDMVRGCRTVLIPKSSKPDRLKDINNWRPITIGSILLRLFSRIVTARLSKACPLNPRQRGFIRAAGCSENLKLLQTIIWSAKREHRPLGVVFVDIAKAFDTVSHQHIIHALQQREVDPHIVGLVSNMYENISTYITTKRNTHTDKIQIRVGVKQGDPMSPLLFNLAMDPLLCKLEESGKGYHRGQSSITAMAFADDLVLLSDSWEGMNTNISILETFCNLTGLKTQGQKCHGFYIKPTKKSYTINDCAAWTINGTPLNMIDPGESEKYLGLQFDPWIGIARSGLSTKLDFWLQRIDQAPLKPLQKTDILKTYTIPRLIYIADHSEVKTALLETLDQKIRTAVKEWLHLPPCTCDAILYSSTRDGGLGITKLAGLIPSVQARRLHRIAQSSDDTMKCFMEKEKMEQLHKKLWIQAGGDRENIPSIWEAPPSSEPPNNVSTNSEWEAPTQKDKFPKPCNWRKNEFKKWTKLASQGRGIVNFERDKISNHWIQYYRRIPHRKLLTALQLRANVYPTREFLARGRQDQYIKACRHCDADIESCAHIIGNCPVTQDARIKRHNYICELLLEEAKKKDWVVFKEPHIRDSNKELYKPDLIFVKDARALVVDVTVRYEAAKSSLEEAAAEKVRKYKHLETEVRHLTNAKDVTFVGFPLGARGKWHQDNFKLLTELGLSKSRQVKMAETFSTVALFSSVDIVHMFASRARKSMVM

SEQ ID NO: 1506 - protein, 1390 aa, synthetic construct
MASCPKPGPPVSAGAMSLESGLTTHSVLAIERGPNSLANSGSDFGGGGLGLPLRLLRVSVGTQTSRSDWVDLVSWSHPGPTSKSQQVDLVSLFPKHRVDLLSKNDQVDLVAQFLPSKFPPNLAENDLALLVNLEFYRSDLHVYECVHFAAHWEGLSGLPEVYEQLAPQPCVGETLHSSLPRDSELFVPEEGSSEKESEDAPKTSPPTPGKHGLEQTGEEKVMVTVPDKNPPCPCCGTRVNSVLNLIEHLKVSHGKRGVCFRCAKCGKENSNYHSVVCHFPKCRGPETEKAPAGEWICEVCNRDFTTKIGLGQHKRLAHPAVRNQERIVASQPKETSNRGAHKRCWTKEEEELLIRLEAQFEGNKNINKLIAEHITTKTAKQISDKRRLLSRKPAEEPREEPGTCHHTRRAAASLRTEPEMSHHAQAEDRDNGPGRRPLPGRAAAGGRTMDEIRRHPDKGNGQQRPTKQKSEEQLQAYYKKTLEERLSAGALNTFPRAFKQVMEGRDIKLVINQTAQDCFGCLESISQIRTATRDKKDTVTRKKHPKKPFQKWMKKRAIKKGNYLRFQRLFYLDRGKLAKIILDDIECLSCDIPLSEIYSVFKTRWETTGSFKSLGDFKTYGKADNTAFRELITAKEIEKNVQEMSKGSAPGPDGITLGDVVKMDPEFSRTMEIFNLWLTTGKIPDMVRGCRTVLIPKSSKPDRLKDINNWRPITIGSILLRLFSRIVTARLSKACPLNPRQRGFIRAAGCSENLKLLQTIIWSAKREHRPLGVVFVDIAKAFDTVSHQHIIHALQQREVDPHIVGLVSNMYENISTYITTKRNTHTDKIQIRVGVKQGDPMSPLLFNLAMDPLLCKLEESGKGYHRGQSSITAMAFADDLVLLSDSWENMNTNISILETFCNLTGLKTQGQKCHGFYIKPTKKSYTINDCAAWTINGTPLNMIDPGESEKYLGLQFDPWIGIARSGLSTKLDFWLQRIDQAPLKPLQKTDILKTYTIPRLIYIADHSEVKTALLETLDQKIRTAVKEWLHLPPCTCDAILYSSTRDGGLGITKLAGLIPSVQARRLHRIAQSSDDTMKCFMEKEKMEQLHKKLWIQAGGDRENIPSIWEAPPSSEPPNNVSTNSEWEAPTQKDKFPKPCNWRKNEFKKWTKLASQGRGIVNFERDKISNHWIQYYRRIPHRKLLTALQLRANVYPTREFLARGRQDQYIKACRHCDADIESCAHIIGNCPVTQDARIKRHNYICELLLEEAKKKDWVVFKEPHIRDSNKELYKPDLIFVKDARALVVDVTVRYEAAKSSLEEAAAEKVRKYKHLETEVRHLTNAKDVTFVGFPLGARGKWHQDNFKLLTELGLSKSRQVKMAETFSTVALFSSVDIVHMFASRARKSMVM

SEQ ID NO: 1507 - protein, 1390 aa, synthetic construct
MASCPKPGPPVSAGAMSLESGLTTHSVLAIERGPNSLANSGSDFGGGGLGLPLRLLRVSVGTQTSRSDWVDLVSWSHPGPTSKSQQVDLVSLFPKHRVDLLSKNDQVDLVAQFLPSKFPPNLAENDLALLVNLEFYRSDLHVYECVHFAAHWEGLSGLPEVYEQLAPQPCVGETLHSSLPRDSELFVPEEGSSEKESEDAPKTSPPTPGKHGLEQTGEEKVMVTVPDKNPPCPCCGTRVNSVLNLIEHLKVSHGKRGVCFRCAKCGKENSNYHSVVCHFKKCRGPETEKAPAGEWICEVCNRDFTTKIGLGQHKRLAHPAVRNQERIVASQPKETSNRGAHKRCWTKEEEELLIRLEAQFEGNKNINKLIAEHITTKTAKQISDKRRLLSRKPAEEPREEPGTCHHTRRAAASLRTEPEMSHHAQAEDRDNGPGRRPLPGRAAAGGRTMDEIRRHPDKGNGQQRPTKQKSEEQLQAYYKKTLEERLSAGALNTFPRAFKQVMEGRDIKLVINQTAQDCFGCLESISQIRTATRDKKDTVTREKHPKKPFQKWMKDRAIKKGNYLRFQRLFYLDRGKLAKIILDDIECLSCDIPLSEIYSVFKTRWETTGSFKSLGDFKTYGKADNTAFRELITAKEIEKNVQEMSKGSAPGPDGITLGDVVKMDPEFSRTMEIFNLWLTTGKIPDMVRGCRTVLIPKSSKPDRLKDINNWRPITIGSILLRLFSRIVTARLSKACPLNPRQRGFIRAAGCSENLKLLQTIIWSAKREHRPLGVVFVDIAKAFDTVSHQHIIHALQQREVDPHIVGLVSNMYENISTYITTKRNTHTDKIQIRVGVKQGDPMSPLLFNLAMDPLLCKLEESGKGYHRGQSSITAMAFADDLVLLSDSWENMNTNISILETFCNLTGLKTQGQKCHGFYIKPTKKSYTINDCAAWTINGTPLNMIDPGESEKYLGLQFDPWIGIARSGLSTKLDFWLQRIDQAPLKPLQKTDILKTYTIPRLIYIADHSEVKTALLETLDQKIRTAVKEWLHLPPCTCDAILYSSTRDGGLGITKLAGLIPSVQARRLHRIAQSSDDTMKCFMEKEKMEQLHKKLWIQAGGDRENIPSIWEAPPSSEPPNNVSTNSEWEAPTQKDKFPKPCNWRKNEFKKWTKLASQGRGIVNFERDKISNHWIQYYRRIPHRKLLTALQLRANVYPTREFLARGRQDQYIKACRHCDADIESCAHIIGNCPVTQDARIKRHNYICELLLEEAKKKDWVVFKEPHIRDSNKELYKPDLIFVKDARALVVDVTVRYEAAKSSLEEAAAEKVRKYKHLETEVRHLTNAKDVTFVGFPLGARGKWHQDNFKLLTELGLSKSRQVKMAETFSTVALFSSVDIVHMFASRARKSMVM

SEQ ID NO: 1508 - protein, 1390 aa, synthetic construct
MASCPKPGPPVSAGAMSLESGLTTHSVLAIERGPNSLANSGSDFGGGGLGLPLRLLRVSVGTQTSRSDWVDLVSWSHPGPTSKSQQVDLVSLFPKHRVDLLSKNDQVDLVAQFLPSKFPPNLAENDLALLVNLEFYRSDLHVYECVHFAAHWEGLSGLPEVYEQLAPQPCVGETLHSSLPRDSELFVPEEGSSEKESEDAPKTSPPTPGKHGLEQTGEEKVMVTVPDKNPPCPCCGTRVNSVLNLIEHLKVSHGKRGVCFRCAKCGKENSNYHSVVCHFKKCRGPETEKAPAGEWICEVCNRDFTTKIGLGQHKRLAHPAVRNQERIVASQPKETSNRGAHKRCWTKEEEELLIRLEAQFEGNKNINKLIAEHITTKTAKQISDKRRLLSRKPAEEPREEPGTCHHTRRAAASLRTEPEMSHHAQAEDRDNGPGRRPLPGRAAAGGRTMDEIRRHPDKGNGQQRPTKQKSEEQLQAYYKKTLEERLSAGALNTFPRAFKQVMEGRDIKLVINQTAQDCFGCLESISQIRTATRDKKDTVTREKHPKKPFQKWMKKRAIKKGNYLRFQRLFYLDRGKLAKIILDDIECLSCDIPLSEIYSVFKTRWETTGSFKSLGDFKTYGKADNTAFRELITAKEIEKNVQEMSKGSAPGPDGITLGDVVKMDPEFSRTMEIFNLWLTTGKIPDMVRGCRTVLIPKSSKPDRLKDINNWRPITIGSILLRLFSRIVTARLSKACPLNPRQRGFIRAAGCSENLKLLQTIIWSAKREHRPLGVVFVDIAKAFDTVSHQHIIHALQQREVDPHIVGLVSNMYENISTYITTKRNTHTDKIQIRVGVKQGDPMSPLLFNLAMDPLLCKLEESGKGYHRGQSSITAMAFADDLVLLSDSWENMNTNISILETFCNLTGLKTQGQKCHGFYIKPTKKSYTINDCAAWTINGTPLNMIDPGESEKYLGLQFDPWIGIARSGLSTKLDFWLQRIDQAPLKPLQKTDILKTYTIPRLIYIADHSEVKTALLETLDQKIRTAVKEWLHLPPCTCDAILYSSTRDGGLGITKLAGLIPSVQARRLHRIAQSSDDTMKCFMEKEKMEQLHKKLWIQAGGDRENIPSIWEAPPSSEPPNNVSTNSEWEAPTQKDKFPKPCNWRKNEFKKWTKLASQGRGIVNFERDKISNHWIQYYRRIPHRKLLTALQLRANVYPTREFLARGRQDQYIKACRHCDADNESCAHIIGNCPVTQDARIKRHNYICELLLEEAKKKDWVVFKEPHIRDSNKELYKPDLIFVKDARALVVDVTVRYEAAKSSLEEAAAEKVRKYKHLETEVRHLTNAKDVTFVGFPLGARGKWHQDNFKLLTELGLSKSRQVKMAETFSTVALFSSVDIVHMFASRARKSMVM

SEQ ID NO: 1509 - protein, 1390 aa, synthetic construct
MASCPKPGPPVSAGAMSLESGLTTHSVLAIERGPNSLANSGSDFGGGGLGLPLRLLRVSVGTQTSRSDWVDLVSWSHPGPTSKSQQVDLVSLFPKHRVDLLSKNDQVDLVAQFLPSKFPPNLAENDLALLVNLEFYRSDLHVYECVHFAAHWEGLSGLPEVYEQLAPQPCVGETLHSSLPRDSELFVPEEGSSEKESEDAPKTSPPTPGKHGLEQTGEEKVMVTVPDKNPPCPCCGTRVNSVLNLIEHLKVSHGKRGVCFRCAKCGKENSNYHSVVCHFKKCRGPETEKAPAGEWICEVCNRDFTTKIGLGQHKRLWHPAVRNQERIVASQPKETSNRGAHKRCWTKEERELLIRLEAQFEGNKNINKLIAEHITTKTAKQISDKRRLLSRKPAEEPREEPGTCHHTRRAAASLRTEPEMSHHAQAEDRDNGPGRRPLPGRAAAGGRTMDEIRRHPDKGNGQQRPTKQKSEEQLQAYYKKTLEERLSAGALNTFPRAFKQVMEGRDIKLVINQTAQDCFGCLESISQIRTATRDKKDTVTREKHPKKPFQKWMKKRAIKKGNYLRFQRLFYLDRGKLAKIILDDIECLSCDIPLSEIYSVFKTRWETTGSFKSLGDFKTYGKADNTAFRELITAKEIEKNVQEMSKGSAPGPDGITLGDVVKMDPEFSRTMEIFNLWLTTGKIPDMVRGCRTVLIPKSSKPDRLKDINNWRPITIGSILLRLFSRIVTARLSKACPLNPRQRGFIRAAGCSENLKLLQTIIWSAKREHRPLGVVFVDIAKAFDTVSHQHIIHALQQREVDPHIVGLVSNMYENISTYITTKRNTHTDKIQIRVGVKQGDPMSPLLFNLAMDPLLCKLEESGKGYHRGQSSITAMAFADDLVLLSDSWENMNTNISILETFCNLTGLKTQGQKCHGFYIKPTKKSYTINDCAAWTINGTPLNMIDPGESEKYLGLQFDPWIGIARSGLSTKLDFWLQRIDQAPLKPLQKTDILKTYTIPRLIYIADHSEVKTALLETLDQKIRTAVKEWLHLPPCTCDAILYSSTRDGGLGITKLAGLIPSVQARRLHRIAQSSDDTMKCFMEKEKMEQLHKKLWIQAGGDRENIPSIWEAPPSSEPPNNVSTNSEWEAPTQKDKFPKPCNWRKNEFKKWTKLASQGRGIVNFERDKISNHWIQYYRRIPHRKLLTALQLRANVYPTREFLARGRQDQYIKACRHCDADNESCAHIIGNCPVTQDARIKRHNYICELLLEEAKKKDWVVFKEPHIRDSNKELYKPDLIFVKDARALVVDVTVRYEAAKSSLEEAAAEKVRKYKHLETEVRHLTNAKDVTFVGFPLGARGKWHQDNFKLLTELGLSKSRQVKMAETFSTVALFSSVDIVHMFASRARKSMVM

SEQ ID NO: 1510 - protein, 1390 aa, synthetic construct
MASCPKPGPPVSAGAMSLESGLTTHSVLAIERGPNSLANSGSDFGGGGLGLPLRLLRVSVGTQTSRSDWVDLVSWSHPGPTSKSQQVDLVSLFPKHRVDLLSKNDQVDLVAQFLPSKFPPNLAENDLALLVNLEFYRSDLHVYECVHKAAHWEGLSGLPEVYEQLAPQPCVGETLHSSLPRDSELFVPEEGSSEKESEDAPKTSPPTPGKHGLEQTGEEKVMVTVPDKNPPCPCCGTRVNSVLNLIEHLKVSHGKRGVCFRCAKCGKENSNYHSVVCHFKKCRGPETEKAPAGEWICEVCNRDFTTKIGLGQHKRLAHPAVRNQERIVASQPKETSNRGAHKRCWTKEEEELLIRLEAQFEGNKNINKLIAEHITTKTAKQISDKRRLLSRKPAEEPREEPGTCHHTRRAAASLRTEPEMSHHAQAEDRDNGPGRRPLPGRAAAGGRTMDEIRRHPDKGNGQQRPTKQKSEEQLQAYYKKTLEERLSAGALNTFPRAFKQVMEGRDIKLVINQTAQDCFGCLESISQIRTATRDKKDTVTREKHPKKPFQKWMKDRAIKKGNYLRFQRLFYLDRGKLAKIILDDIECLSCDIPLSEIYSVFKTRWETTGSFKSLGDFKTYGKADNTAFRELITAKEIEKNVQEMSKGSAPGPDGITLGDVVKMDPEFSRTMEIFNLWLTTGKIPDMVRGCRTVLIPKSSKPDRLKDINNWRPITIGSILLRLFSRIVTARLSKACPLNPRQRGFIRAAGCSENLKLLQTIIWSAKREHRPLGVVFVDIAKAFDTVSHQHIIHALQQREVDPHIVGLVSNMYENISTYITTKRNTHTDKIQIRVGVKQGDPMSPLLFNLAMDPLLCKLEESGKGYHRGQSSITAMAFADDLVLLSDSWENMNTNISILETFCNLTGLKTQGQKCHGFYIKPTKDSYTINDCAAWTINGTPLNMIDPGESEKYLGLQFDPWIGIARSGLSTKLDFWLQRIDQAPLKPLQKTDILKTYTIPRLIYIADHSEVKTALLETLDQKIRTAVKEWLHLPPCTCDAILYSSTRDGGLGITKLAGLIPSVQARRLHRIAQSSDDTMKCFMEKEKMEQLHKKLWIQAGGDRENIPSIWEAPPSSEPPNNVSTNSEWEAPTQKDKFPKPCNWRKNEFKKWTKLASQGRGIVNFERDKISNHWIQYYRRIPHRKLLTALQLRANVYPTREFLARGRQDQYIKACRHCDADIESCAHIIGNCPVTQDARIKRHNYICELLLEEAKKKDWVVFKEPHIRDSNKELYKPDLIFVKDARALVVDVTVRYEAAKSSLEEAAAEKVRKYKHLETEVRHLTNAKDVTFVGFPLGARGKWHQDNFKLLTELGLSKSRQVKMAETFSTVALFSSVDIVHMFASRARKSMVM

SEQ ID NO: 1511 - protein, 1390 aa, synthetic construct
MASCPKPGPPVSAGAMSLESGLTTHSVLAIERGPNSLANSGSDFGGGGLGLPLRLLRVSVGTQTSRSDWVDLVSWSHPGPTSKSQQVDLVSLFPKHRVDLLSKNDQVDLVAQFLPSKFPPNLAENDLALLVNLEFYRSDLHVYECVHFAAHWEGLSGLPEVYEQLAPQPCVGETLHSSLPRDSELFVPEEGSSEKESEDAPKTSPPTPGKHGLEQTGEEKVMVTVPDKNPPCPCCGTRVNSVLNLIEHLKVSHGKRGVCFRCAKCGKENSNYHSVVCHFKKCRGPETEKAPAGEWICEVCNRDFTTKIGLGQHKRLAHPAVRNQERIVASQPKETSNRGAHKRCWTKEEEELLIRLEAQFEGNKNINKLIAEHITTKTAKQISDKRRLLSRKPAEEPREEPGTCHHTRRAAASLRTEPEMSHHAQAEDRDNGPGRRPLPGRAAAGGRTMDEIRRHPDKGNGQQRPTKQKSEEQLQAYYKKTLEERLSAGALNTFPRAFKQVMEGRDIKLVINQTAQDCFGCLESISQIRTATRDKKDTVTREKHPKKPFQKWMKDRAIKKGNYLRFQRLFYLDRGKLAKIILDDIECLSCDIPLSEIYSVFKTRWETTGSFKSLGDFKTYGKADNTAFRELITAKEIEKNVQEMSKGSAPGPDGITLGDVVKMDPEFSRTMEIFNLWLTTGKIPDMVRGCRTVLIPKSSKPDRLKDINNWRPITIGSILLRLFSRIVTARLSKACPLNPRQRGFIRAAGCSENLKLLQTIIWSAKREHRPLGVVFVDIAKAFDTVSHQHIIHALQQREVDPHIVGLVSNMYENISTYITTKRNTHTDKIQIRVGVKQGDPMSPLLFNLAMDPLLCKLEESGKGYHRGQSSITAMAFADDLVLLSDSWENMNTNISILETFCNLTGLKTQGQKCHGFYIKPTKDSYTINDCAAWTINGTPLNMIDPGESEKYLGLQFDPWIGIARSGLSTKLDFWLQRIDQAPLKPLQKLDILKTYTIPRLIYIADHSEVKTALLETLDQKIRTAVKEWLHLPPCTCDAILYSSTRDGGLGITKLAGLIPSVQARRLHRIAQSSDDTMKCFMEKEKMEQLHKKLWIQAGGDRENIPSIWEAPPSSEPPNNVSTNSEWEAPTQKDKFPKPCNWRKNEFKKWTKLASQGRGIVNFERDKISNHWIQYYRRIPHRKLLTALQLRANVYPTREFLARGRQDQYIKACRHCDADIESCAHIIGNCPVTQDARIKRHNYICELLLEEAKKKDWVVFKEPHIRDSNKELYKPDLIFVKDARALVVDVTVRYEAAKSSLEEAAAEKVRKYKHLETEVRHLTNAKDVTFVGFPLGARGKWHQDNFKLLTELGLSKSRQVKMAETFSTVALFSSVDIVHMFASRARKSMVM

SEQ ID NO: 1512 - protein, 1390 aa, synthetic construct
MASCPKPGPPVSAGAMSLESGLTTHSVLAIERGPNSLANSGSDFGGGGLGLPLRLLRVSVGTQTSRSDWVDLVSWSHPGPTSKSQQVDLVSLFPKHRVDLLSKNDQVDLVAQFLPSKFPPNLAENDLALLVNLEFYRSDLHVYECVHFAAHWEGLSGLPEVYEQLAPQPCVGETLHSSLPRDSELFVPEEGSSEKESEDAPKTSPPTPGKHGLEQTGEEKVMVTVPDKNPPCPCCGTRVNSVLNLIEHLKVSHGKRGVCFRCAKCGKENSNYHSVVCHFKKCRGPETEKAPAGEWICEVCNRDFTTKIGLGQHKRLAHPAVRNQERIVASQPKETSNRGAHKRCWTKEEEELLIRLEAQFEGNKNINKLIAEHITTKTAKQISDKRRLLSRKPAEEPREEPGTCHHTRRAAASLRTEPEMSHHAQAEDRDNGPGRRPLPGRAAAGGRTMDEIRRHPDKGNGQQRPTKQKSEEQLQAYYKKTLEERLSAGALNTFPRAFKQVMEGRDIKLVINQTAQDCFGCLESISQIRTATRDKKDTVTREKHPKKPFQKWMKDRAIKKGNYLRFQRLFYLDRGKLAKIILDDIECLSCDIPLSEIYSVFKTRWETTGSFKSLGDFKTYGKADNTAFRELITAKEIEKNVQEMSKGSAPGPDGITLGDVVKMDPEGSRTMEIFNLWLTTGKIPDMVRGCRTVLIPKSSKPDRLKDINNWRPITIGSILLRLFSRIVTARLSKACPLNPRQRGFIRAAGCSENLKLLQTIIWSAKREHRPLGVVFVDIAKAFDTVSHQHIIHALQQREVDPHIVGLVSNMYENISTYITTKRNTHTDKIQIRVGVKQGDPMSPLLFNLAMDPLLCKLEESGKGYHRGQSSITAMAFADDLVLLSDSWENMNTNISILETFCNLTGLKTQGQKCHGFYIKPTKDSYTINDCAAWTINGTPLNMIDPGESEKYLGLQFDPWIGIARSGLSTKLDFWLQRIDQAPLKPLQKTDILKTYTIPRLIYIADHSEVKTALLETLDQKIRTAVKEWLHLPPCTCDAILYSSTRDGGLGITKLAGLIPSVQARRLHRIAQSSDDTMKCFMEKEKMEQLHKKLWIQAGGDRENIPSIWEAPPSSEPPNNVSTNSEWEAPTQKDKFPKPCNWRKNEFKKWTKLASQGRGIVNFERDKISNHWIQYYRRIPHRKLLTALQLRANVYPTREFLARGRQDQYIKACRHCDADIESCAHIIGNCPVTQDARIKRHNYICELLLEEAKKKDWVVFKEPHIRDSNKELYKPDLIFVKDARALVVDVTVRYEAAKSSLEEAAAEKVRKYKHLETEVRHLTNAKDVTFVGFPLGARGKWHQDNFKLLTELGLSKSRQVKMAETFSTVALFSSVDIVHMFASRARKSMVM

SEQ ID NO: 1513 - protein, 1390 aa, synthetic construct; identical to SEQ ID NO: 1457

SEQ ID NO: 1514 - protein, 1390 aa, synthetic construct
MASCPKPGPPVSAGAMSLESGLTTHSVLAIERGPNSLANSGSDFGGGGLGGPLRLLRVSVGTQTSRSDWVDLVSWSHPGPTSKSQQVDLVSLFPKHRVDLLSKNDQVDLVAQFLPSKFPPNLAENDLALLVNLEFYRSDLHVYECVHFAAHWEGLSGLPEVYEQLAPQPCVGETLHSSLPRDSELFVPEEGSSEKESEDAPKTSPPTPGKHGLEQTGEEKVMVTVPDKNPPCPCCGTRVNSVLNLIEHLKVSHGKRGVCFRCAKCGKENSNYHSVVCHFKKCRGPETEKAPAGEWICEVCNRDFTTKIGLGQHKRLAHPAVRNQERIVASQPKETSNRGAHKRCWTKEEEELLIRLEAQFEGNKNINKLIAEHITTKTAKQISDMRRLLSRKPAEEPREEPGTCHHTRRAAASLRTEPEMSHHAQAEDRDNGPGRRPLPGRAAAGGRTMDEIRRHPDKGNGQQRPTKQKSEEQLQAYYKKTLEERLSAGALNTFPRAFKQVMEGRDIKLVINQTAQDYFGCLESISQIRTATRDKKDTGTREKHPKKPFQKWMKKRAIKKGNYLRFQRLFYLDRGKLAKIILDDIECLSCDIPLSEIYSVFKTRWETTGSFKSLGDFKTYGKADNTAFRELITAKEIEKNVQEMSKGSAPGPDGITLGDVVKMDPEFSRTMEIFNLWLTTGKIPDMVRGCRTVLIPKSSKPDRLKDINNWRPITIGSILLRLFSRIVTARLSKACPLNPRQRGFIRAAGCSENLKLLQTIIWSAKREHRPLGVVFVDIAKAFDTVSHQHIIHALQQREVDPHIVGLVSNMYENISTYITTKRNTHTDKIQIRVGVKQGDPMSPLLFNLAMDPLLCKLEESGKGYHRGQSSITAMAFADDLVLLSDSWENMNTNISILETFCNLTGLKTQGQKCHGFYIKPTKDSYTINDCAAWTINGTPLNMIDPGESEKYLGLQFDPWIGIARSGLSTKLDFWLQRIDQAPLKPLQKTDILKTYTIPRLIYIADHSEVKTALLETLDQKIRTAVKEWLHLPPCTCDAILYSSTRDGGLGITKLAGLIPSVQARRLHRIAQSSDDTMKCFMEKEKMEQLHKKLWIQAGGDRENIPSIWEAPPSSEPPNNVSTNSEWEAPTQKDKFPKPCNWRKNEFKKWTKLASQGRGIVNFERDKISNHWIQYYRRIPHRKLLTALQLRANVYPTREFLARGRQDQYIKACRHCDADIESCAHIIGNCPVTQDARIKRHNYICELLLEEAKKKDWVVFKEPHIRDSNKELYKPDLIFVKDARALVVDVTVRYEAAKSSLEEAAAEKVRKYKHLETEVRHLTNAKDVTFVGFPLGARGKWHQDNFKLLTELGLSKSRQVKMAETFSTVALFSSVDIVHMFASRARKSMVM

SEQ ID NO: 1515 - protein, 1390 aa, synthetic construct
MASCPKPGPPVSAGAMSLESGLTTHSVLAIERGPNSLANSGSDFGGGGLGGPLRLLRVSVGTQTSRSDWVDLVSWSHPGPTSKSQQVDLVSLFPKHRVDLLSKNDQVDLVAQFLPSKFPPNLAENDLALLVNLEFYRSDLHVYECVHFAAHWEGLSGLPEVYEQLAPQPCVGETLHSSLPRDSELFVPEEGSSEKESEDAPKTSPPTPGKHGLEQTGEEKVMVTVPDKNPPCPCCGTRVNSVLNLIEHLKVSHGKRGVCFRCAKCGKENSNYHSVVCHFKKCRGPETEKAPAGEWICEVCNRDFTTKIGLGQHKRLAHPAVRNQERIVASQPKETSNRGAHKRCWTKEEEELLIRLEAQFEGNKNINKLIAEHITTKTAKQISDMRRLLSRKPAEEPREEPGTCHHTRRAAASLRTEPEMSHHAQAEDRDNGPGRRPLPGRAAAGGRTMDEIRRHPDKGNGQQRPTKQKSEEQLQAYYKKTLEERLSAGALNTFPRAFKQVMEGRDIKLVINQTAQDYFGCLESISQIRTATRDKKDTGTREKHPKKPFQKWMKKRAIKKGNYLRFQRLFYLDRGKLAKIILDDIECLSCDIPLSEIYSVFKTRWETTGSFKSLGDFKTYGKADNTAFRELITAKEIEKNVQEMSKGSAPGPDGITLGDIVKMDPEFSRTMEIFNLWLTTGKIPDMVRGCRTVLIPKSSKPDRLKDINNWRPITIGSILLRLFSRIVTARLSKACPLNPRQRGFIRAAGCSENLKLLQTIIWSAKREHRPLGVVFVDIAKAFDTVSHQHIIHALQQREVDPHIVGLVSNMYENISTYITTKRNTHTDKIQIRVGVKQGDPMSPLLFNLAMDPLLCKLEESGKGYHRGQSSITAMAFADDLVLLSDSWENMNTNISILETFCNLTGLKTQGQKCHGFYIKPTKDSYTINDCAAWTINGTPLNMIDPGESEKYLGLQFDPWIGIARSGLSTKLDFWLQRIDQAPLKPLQKTDILKTYTIPRLIYIADHSEVKTALLETLDQKIRTAVKEWLHLPPCTCDAILYSSTRDGGLGITKLAGLIPSVQARRLHRIAQSSDDTMKCFMEKEKMEQLHKKLWIQAGGDRENIPSIWEAPPSSEPPNNVSTNSEWEAPTQKDKFPKPCNWRKNEFKKWTKLASQGRGIVNFERDKISNHWIQYYRRIPHRKLLTALQLRANVYPTREFLARGRQDQYIKACRHCDADIESCAHIIGNCPVTQDARIKRHNYICELLLEEAKKKDWVVFKEPHIRDSNKELYKPDLIFVKDARALVVDVTVRYEAAKSSLEEAAAEKVRKYKHLETEVRHLTNAKDVTFVGFPLGARGKWHQDNFKLLTELGLSKSRQVKMAETFSTVALFSSVDIVHMFASRARKSMVM

SEQ ID NO: 1516-1517 - skipped (2 entries)

SEQ ID NO: 1518 - protein, 1390 aa, synthetic construct
MASCPKPGPPVSAGAMSLESGLTTHSVLAIERGPNSLANSGSDFGGGGLGLPLRLLRVSVGTQTSRSDWVDLVSWSHPGPTSKSQQVDLVSLFPKHRVDLLSKNDQVDLVAQFLPSKFPPNLAENDLALLVNLEFYRSDLHVYECVHFAAHWEGLSGLPEVYEQLAPQPCVGETLHSSLPRDSELFVPEEGSSEKESEDAPKTSPPTPGKHGLEQTGEEKVMVTVPDKNPPCPCCGTRVNSVLNLIEHLKVSHGKRRVCFRCAKCGKENSNYHSVVCHFPKCRGPETEKAPAGEWICEVCNRDFTTKIGLGQHKRLAHPAVRNQERIVASQPKETSNRGAHKRCWTKEEEELLIRLEAQFEGNKNINKLIAEHITTKTAKQISDKRRLLSRKPAEEPREEPGTCHHTRRAAASLRTEPEMSHHAQAEDRDNGPGRRPLPGRAAAGGRTMDEIRRHPDKGNGQQRPTKQKSEEQLQAYYKKTLEERLSAGALNTFPRAFKQVMEGRDIKLVINQTAQDCFGCLESISQIRTATRDKKDTVTREKHPKKPFQKWMKKRAIKKGNYLRFQRLFYLDRGKLAKIILDDIECLSCDIPLSEIYSVFKTRWETTGSFKSLGDFKTYGKADNTAFRELITAKEIEKNVQEMSKGSAPGPDGITLGDVVKMDPEFSRTMEIFNLWLTTGKIPDMVRGCRTVLIPKSSKPDRLKDINNWRPITIGSILLRLFSRIVTARLSKACPLNPRQRGFIRAAGCSENLKLLQTIIWSAKREHRPLGVVFVDIAKAFDTVSHQHIIHALQQREVDPHIVGLVSNMYENISTYITTKRNTHTDKIQIRVGVKQGDPMSPLLFNLAMDPLLCKLEESGKGYHRGQSSITAMAFADDLVLLSDSWENMNTNISILETFCNLTGLKTQGQKCHGFYIKPTKDSYTINDCAAWTINGTPLNMIDPGESEKYLGLQFDPWIGIARSGLSTKLDFWLQRIDQAPLKPLQKTDILKTYTIPRLIYIADHSEVKTALLETLDQKIRTAVKEWLHLPPCTCDAILYSSTRDGGLGITKLAGLIPSVQARRLHRIAQSSDDTMKCFMEKEKMEQLHKKLWIQAGGDRENIPSIWEAPPSSEPPNNVSTNSEWEAPTQKDKFPKPCNWRKNEFKKWTKLASQGRGIVNFERDKISNHWIQYYRRIPHRKLLTALQLRANVYPTREFLARGRQDQYIKACRHCDADIESCAHIIGNCPVTQDARIKRHNYICELLLEEAKKKDWVVFKEPHIRDSNKELYKPDLIFVKDARALVVDVTVRYEAAKSSLEEAAAEKVRKYKHLETEVRHLTNAKDVTFVGFPLGARGKWHQDNFKLLTELGLSKSRQVKMAETFSTVALFSSVDIVHMFASRARKSMVM

SEQ ID NO: 1519 - protein, 1625 aa, synthetic construct
MAPKKKRKVVTVKFKYKGEEKEVDISKIKKVWRVGKMISFTYDDNGKTGRGAVSEKDAPKELLQMLEKSGSETPGTSESATPESNISGSSCGSPNSADTSSDFKDLWTKLKECHDREVQGLQVKVTKLKQERILDAQRLEEFFTKNQQLREQQKVLHETIKVLEDRLRAGLCDRCAVTEEHMRKKQQEFENIRQQNLKLITELMNERNTLQEENKKLSEQLQQKIENDQQHQAAELECEEDVIPDSPITAFSFSGVNRLRRKENPHVRYIEQTHTKLEHSVCANEMRKVSKSSTHPQHNPNENEILVADTYDQSQSPMAKAHGTSSYTPDKSSFNLATVVAETLGLGVQEESETQGPMSPLGDELYHCLEGNHKKQPFESGSETPGTSESATPEGSYEQLAPQPCVGETLHSSLPRDSELFVPEEGSSEKESEDAPKTSPPTPGKHGLRQTGEEKVMVTVPDKNPPCPCCGTRVNSVLNLIEHLKVSHGKRGVCFRCAKCGKENSNYHSVVCHFKKCRGPETEKAPAGEWICEVCNRDFTTKIGLGQHKRLAHPAVRNQERIVASQPKETSNRGAHKRCWTKEEEELLIRLEAQFEGNKNINKLIAEHITTKTAKQISDKRRLLSRKPAEEPREEPGTCHHTRRAAASLRTEPEMSHHAQAEDRDNGPGRRPLPGRAAAGGRTMDEIRRHPDKGNGQQRPTKQKSEEQLQAYYKKTLEERLSAGALNTFPRAFKQVMEGRDIKLVINQTAQDCFGCLESISQIRTATRDKKDTVTREKHPKKPFQKWMKKRAIKKGNYLRFQRLFYLDRGKLAKIILDDIECLSCDIPLSEIYSVFKTRWETTGSFKSLGDFKTYGKADNTAFRELITAKEIEKNVQEMSKGSAPGPDGITLGDVVKMDPEFSRTMEIFNLWLTTGKIPDMVRGCRTVLIPKSSKPDRLKDINNWRPITIGSILLRLFSRIVTARLSKACPLNPRQRGFIRAAGCSENLKLLQTIIWSAKREHRPLGVVFVDIAKAFDTVSHQHIIHALQQREVDPHIVGLVSNMYENISTYITTKRNTHTDKIQIRVGVKQGDPMSPLLFNLAMDPLLCKLEESGKGYHRGQSSITAMAFADDLVLLSDSWENMNTNISILETFCNLTGLKTQGQKCHGFYIKPTKDSYTINDCAAWTINGTPLNMIDPGESEKYLGLQFDPWIGIARSGLSTKLDFWLQRIDQAPLKPLQKTDILKTYTIPRLIYIADHSEVKSALLETLDQKIRTAVKEWLHLPPCTCDAILYSSTRDGGLGITKLAGLIPSVQARRLHRIAQSSDDTMKCFMEKEKMEQLHKKLWIQAGGDRENIPSIWEAPPSSEPPNNVSTNSEWEAPTQKDKFPKPCNWRKNEFKKWTKLASQGRGIVNFERDKISNHWIQYYRRIPHRKLLTALQLRANVYPTREFLARGRQDQYIKACRHCDADNESCAHIIGNCPVTQDARIKRHNYICELLLEEAKKKDWVVFKEPHIRDSNKELYKPDLIFVKDGRALVVDVTVRYEAAKSSLEEAAAEKVRKYKHLETEVRHLTNAKDVTFVGFPLGARGKWHQDNFKLLTELGLSKSRQVKMAETFSTVALFSSVDIVHMFASRARKSMVM

SEQ ID NO: 1520 - protein, 1390 aa, synthetic construct
MASCPKPGPPVSAGAMSLESGLTTHSVLAIERGPNSLANSGSDFGGGGLGLPLRLLRVSVGTQTSRSDWVDLVSWSHPGPTSKSQQVDLVSLFPKHRVDLLSKNDQVDLVAQFLPSKFPPNLAENDLALLVNLEFYRSDLHVYECVHFAAHWEGLSGLPEVYEQLAPQPCVGETLHSSLPRDSELFVPEEGSSEKESEDAPKTSPPTPGKHGLEQTGEEKVMVTVPDKNPPCPCCGTRVNSVLNLIEHLKVSHGKRGVCFRCAKCGKENSNYHSVVCHFPKCRGPETEKAPAGEWICEVCNRDFTTKIGLGQHKRLAHPAVRNQERIVASQPKETSNRGAHKRCWTKEEEELLIRLEAQFEGNKNINKLIAEHITTKTAKQISDKRRLLSRKPAEEPREEPGTCHHTRRAAASLRTEPEMSHHAQAEDRDNGPGRRPLPGRAAAGGRTMDEIRRHPDKGNGQQRPTKQKSEEQLQAYYKKTLEERLSAGALNTFPRAFKQVMEGRDIKLVINQTAQDYFGCLESISQIRTATRDKKDTVTREKHPKKPFQKWMKDRAIKKGNYLRFQRLFYLDRGKLAKIILDDIECLSCDIPLSEIYSVFKTRWETTGSFKSLGDFKTYGKADNTAFRELITAKEIEKNVQEMSKGSAPGPDGITLGDVVKMDPEGSRTMEIFNLWLTTGKIPDMVRGCRTVLIPKSSKPDRLKDINNWRPITIGSILLRLFSRIVTARLSKACPLNPRQRGFIRAAGCSENLKLLQTIIWSAKREHRPLGVVFVDIAKAFDTVSHQHIIHALQQREVDPHIVGLVSNMYENISTYITTKRNTHTDKIQIRVGVKQGDPMSPLLFNLAMDPLLCKLEESGKGYHRGQSSITAMAFADDLVLLSDSWENMNTNISILETFCNLTGLKTQGQKCHGFYIKPTKDSYTINDCAAWTINGTPLNMIDPGESEKYLGLQFDPWIGIARSGLSTKLDFWLQRIDQAPLKPLQKTDILKTYTIPRLIYIADHSEVKTALLETLDQKIRTAVKEWLHLPPCTCDAILYSSTRDGGLGITKLAGLIPSVQARRLHRIAQSSDDTMKCFMEKEKMEQLHKKLWIQAGGDRENIPSIWEAPPSSEPPNNVSTNSEWEAPTQKDKFPKPCNWRKNEFKKWTKLASQGRGIVNFERDKISNHWIQYYRRIPHRKLLTALQLRANVYPTREFLARGRQDQYIKACRHCDADIESCAHIIGNCPVTQDARIKRHNYICELLLEEAKKKDWVVFKEPHIRDSNKELYKPDLIFVKDARALVVDVTVRYEAAKSSLEEAAAEKVRKYKHLETEVRHLTNAKDVTFVGFPLGARGKWHQDNFKLLTELGLSKSRQVKMAETFSTVALFSSVDIVHMFASRARKSMVM

SEQ ID NO: 1521 - protein, 1390 aa, synthetic construct
MASCPKPGPPVSAGAMSLESGLTTHSVLAIERGPNSLANSGSDFGGGGLGLPLRLLRVSVGTQTSRSDWVDLVSWSHPGPTSKSQQVDLVSLFPKHRVDLLSKNDQVDLVAQFLPSKFPPNLAENDLALLVNLEFYRSDLHVYECVHFAAHWEGLSGLPEVYEQLAPQPCVGETLHSSLPRDSELFVPEEGSSEKESEDAPKTSPPTPGKHGLEQTGEEKVMVTVPDKNPPCPCCGTRVNSVLNLIEHLKVSHGKRGVCFRCAKCGKENSNYHSVVCHFKKCRGPETEKAPAGEWICEVCNRDFTTKIGLGQHKRLAHPAVRNQERIVASQPKETSNRGAHKRCWTKEEEELLIRLEAQFEGNKNINKLIAEHITTKTAKQISDKRRLLSRKPAEEPREEPGTCHHTRRAAASLRTEPEMSHHAQAEDRDNGPGRRPLPGRAAAGGRTMDEIRRHPDKGNGQQRPTKQKSEEQLQAYYKKTLEERLSAGALNTFPRAFKQVMEGRDIKLVINQTAQDYFGCLESISQIRTATRDKKDTVTREKHPKKPFQKWMKDRAIKKGNYLRFQRLFYLDRGKLAKIILDDIECLSCDIPLSEIYSVFKTRWETTGSFKSLGDFKTYGKADNTAFRELITAKEIEKNVQEMSKGSAPGPDGITLGDVVKMDPEFSRTMEIFNLWLTTGKIPDMVRGCRTVLIPKSSDPDRLKDINNWRPITIGSILLRLFSRIVTARLSKACPLNPRQRGFIRAAGCSENLKLLQTIIWSAKREHRPLGVVFVDIAKAFDTVSHQHIIHALQQREVDPHIVGLVSNMYENISTYITTKRNTHTDKIQIRVGVKQGDPMSPLLFNLAMDPLLCKLEESGKGYHRGQSSITAMAFADDLVLLSDSWEGMNTNISILETFCNLTGLKTQGQKCHGFYIKPTKDSYTINDCAAWTINGTPLNMIDPGESEKYLGLQFDPWIGIARSGLSTKLDFWLQRIDQAPLKPLQKTDILKTYTIPRLIYIADHSEVKTALLETLDQKIRTAVKEWLHLPPCTCDAILYSSTRDGGLGITKLAGLIPSVQARRLHRIAQSSDDTMKCFMEKEKMEQLHKKLWIQAGGDRENIPSIWEAPPSSEPPNNVSTNSEWEAPTQKDKFPKPCNWRKNEFKKWTKLASQGRGIVNFERDKISNHWIQYYRRIPHRKLLTALQLRANVYPTREFLARGRQDQYIKACRHCDADIESCAHIIGNCPVTQDARIKRHNKICELLLEEAKKKDWVVFKEPHIRDSNKELYKPDLIFVKDARALVVDVTVRYEAAKSSLEEAAAEKVRKYKHLETEVRHLTNAKDVTFVGFPLGARGKWHQDNFKLLTELGLSKSRQVKMAETFSTVALFSSVDIVHMFASRARKSMVM

SEQ ID NO: 1522 - protein, 1390 aa, synthetic construct
MASCPKPGPPVSAGAMSLESGLTTHSVLAIERGPNSLANSGSDFGGGGLGLPLRLLRVSVGTQTSRSDWVDLVSWSHPGPTSKSQQVDLVSLFPKHRVDLLSKNDQVDLVAQFLPSKFPPNLAENDLALLVNLEFYRSDLHVYECVHFAAHWEGLSGLPEVYEQLAPQPCVGETLHSSLPRDSELFVPEEGSSEKESEDAPKTSPPTPGKHGLEQTGEEKVMVTVPDKNPPCPCCGTRVNSVLNLIEHLKVSHGKRGVCFRCAKCGKENSNYHSVVCHFKKCRGPETEKAPAGEWICEVCNRDFTTKIGLGQHKRLAHPAVRNQERIVASQPKETSNRGAHKRCWTKEEEELLIRLEAQFEGNKNINKLIAEHITTKTAKQISDKRRLLSRKPAEEPREEPGTCHHTRRAAASLRTEPEMSHHAQAEDRDNGPGRRPLPGRAAAGGRTMDEIRRHPDKGNGQQRPTKQKSEEQLQAYYKKTLEERLSAGALNTFPRAFKQVMEGRDIKLVINQTAQDYFGCLESISQIRTATRDKKDTVTREKHPKKPFQKWMKKRAIKKGNYLRFQRLFYLDRGKLAKIILDDIECLSCDIPLSEIYSVFKTRWETTGSFKSLGDFKTYGKADNTAFRELITAKEIEKNVQEMSKGSAPGPDGITLGDVVKMDPEFSRTMEIFNLWLTTGKIPDMVRGCRTVLIPKSSDPDRLKDINNWRPITIGSILLRLFSRIVTARLSKACPLNPRQRGFIRAAGCSENLKLLQTIIWSAKREHRPLGVVFVDIAKAFDTVSHQHIIHALQQREVDPHIVGLVSNMYENISTYITTKRNTHTDKIQIRVGVKQGDPMSPLLFNLAMDPLLCKLEESGKGYHRGQSSITAMAFADDLVLLSDSWENMNTNISILETFCNLTGLKTQGQKCHGFYIKPTKDSYTINDCAAWTINGTPLNMIDPGESEKYLGLQFDPWIGIARSGLSTKLDFWLQRIDQAPLKPLQKTDILKTYTIPRLIYIADHSEVKTGLLETLDQKIRTAVKEWLHLPPCTCDAILYSSTRDGGLGITKLAGLIPSVQARRLHRIAQSSDDTMKCFMEKEKMEQLHKKLWIQAGGDRENIPSIWEAPPSSEPPNNVSTNSEWEAPTQKDKFPKPCNWRKNEFKKWTKLASQGRGIVNFERDKISNHWIQYYRRIPHRKLLTALQLRANVYPTREFLARGRQDQYIKACRHCDADIESCAHIIGNCPVTQDARIKRHNYICELLLEEAKKKDWVVFKEPHIRDSNKELYKPDLIFVKDARALVVDVTVRYEAAKSSLEEAAAEKVRKYKHLETEVRHLTNAKDVTFVGFPLGARGKWHQDNFKLLTELGLSKSRQVKMAETFSTVALFSSVDIVHMFASRARKSMVM

SEQ ID NO: 1523 - protein, 1390 aa, synthetic construct
MASCPKPGPPVSAGAMSLESGLTTHSVLAIERGPNSLANSGSDFGGGGLGLPLRLLRVSVGTQTSRSDWVDLVSWSHPGPTSKSQQVDLVSLFPKHRVDLLSKNDQVDLVAQFLPSKFPPNLAENDLALLVNLEFYRSDLHVYECVHFAAHWEGLSGLPEVYEQLAPQPCVGETLHSSLPRDSELFVPEEGSSEKESEDAPKTSPPTPGKHGLEQTGEEKVMVTVPDKNPPCPCCGTRVNSVLNLIEHLKVSHGKRGVCFRCAKCGKENSNYHSVVCHFKKCRGPETEKAPAGEWICEVCNRDFTTKIGLGQHKRLAHPAVRNQERIVASQPKETSNRGAHKRCWTKEEEELLIRLEAQFEGNKNINKLIAEHITTKTAKQISDKRRLLSRKPAEEPREEPGTCHHTRRAAASLRTEPEMSHHAQAEDRDNGPGRRPLPGRAAAGGRTMDEIRRHPDKGNGQQRPTKQKSEEQLQAYYKKTLEERLSAGALNTFPRAFKQVMEGRDIKLVINQTAQDYFGCLESISQIRTATRDKKDTVTREKHPKKPFQKWMKKRAIKKGNYLRFQRLFYLDRGKLAKIILDDIECLSCDIPLSEIYSVFKTRWETTGSFKSLGDFKTYGKADNTAFRELITAKEIEKNVQEMSKGSAPGPDGITLGDVVKMDPEFSRTMEIFNLWLTTGKIPDMVRGCRTVLIPKSSDPDRLKDINNWRPITIGSILLRLFSRIVTARLSKACPLNPRQRGFIRAAGCSENLKLLQTIIWSAKREHRPLGVVFVDIAKAFDTVSHQHIIHALQQREVDPHIVGLVSNMYENISTYITTKRNTHTDKIQIRVGVKQGDPMSPLLFNLAMDPLLCKLEESGKGYHRGQSSITAMAFADDLVLLSDSWENMNTNISILETFCNLTGLKTQGQKCHGFYIKPTKDSYTINDCAAWTINGTPLNMIDPGESEKYLGLQFDPWIGIARSGLSTKLDFWLQRIDQAPLKPLQKTDILKTYTIPRLIYIADHSEVKTALLETLDQKIRTAVKEWLHLPPCTCDAILYSSTRDGGLGITKLAGLIPSVQARRLHRIAQSSDDTMKCFMEKEKMEQLHKKLWIQAGGDRENIPSIWEAPPSSEPPNNVSTNSEWEAPTQKDKFPKPCNWRKNEFKKWTKLASQGRGIVNFERDKISNHWIQYYRRIPHRKLLTALQLRANVYPTREFLARGRQDQYIKACRHCDADNESCAHIIGNCPVTQDARIKRHNYICELLLEEAKKKDWVVFKEPHIRDSNKELYKPDLIFVKDARALVVDVTVRYEAAKSSLEEAAAEKVRKYKHLETEVRHLTNAKDVTFVGFPLGARGKWHQDNFKLLTELGLSKSRQVKMAETFSTVALFSSVDIVHMFASRARKSMVM

SEQ ID NO: 1524 - protein, 1390 aa, synthetic construct
MASCPKPGPPVSAGAMSLESGLTTHSVLAIERGPNSLANSGSDFGGGGLGLPLRLLRVSVGTQTSRSDWVDLVSWSHPGPTSKSQQVDLVSLFPKHRVDLLSKNDQVDLVAQFLPSKFPPNLAENDLALLVNLEFYRSDLHVYECVHFAAHWEGLSGLPEVYEQLAPQPCVGETLHSSLPRDSELFVPEEGSSEKESEDAPKTSPPTPGKHGLEQTGEEKVMVTVPDKNPPCPCCGTRVNSVLNLIEHLKVSHGKRGVCFRCAKCGKENSNYHSVVCHFKKCRGPETEKAPAGEWICEVCNRDFTTKIGLGQHKRLAHPAVRNQERIVASQPKETSNRGAHKRCWTKEEEELLIRLEAQFEGNKNINKLIAEHITTKTAKQISDKRRLLSRKPAEEPRMEPGTCHHTRRAAASLRTEPEMSHHAQAEDRDNGPGRRPLPGRAAAGGRTMDEIRRHPDKGNGQQRPTKQKSEEQLQAYYKKTLEERLSAGALNTFPRAFKQVMEGRDIKLVINQTAQDYFGCLESISQIRTATRDKKDTVTREKHPKKPFQKWMKKRAIKKGNYLRFQRLFYLDRGKLAKIILDDIECLSCDIPLSEIYSVFKTRWETTGSFKSLGDFKTYGKADNTAFRELITAKEIEKNVQEMSKGSAPGPDGITLGDVVKMDPEFSRTMEIFNLWLTTGKIPDMVRGCRTVLIPKSSDPDRLKDINNWRPITIGSILLRLFSRIVTARLSKACPLNPRQRGFIRAAGCSENLKLLQTIIWSAKREHRPLGVVFVDIAKAFDTVSHQHIIHALQQREVDPHIVGLVSNMYENISTYITTKRNTHTDKIQIRVGVKQGDPMSPLLFNLAMDPLLCKLEESGKGYHRGQSSITAMAFADDLVLLSDSWENMNTNISILETFCNLTGLKTQGQKCHGFYIKPTKKSYTINDCAAWTINGTPLNMIDPGESEKYLGLQFDPWIGIARSGLSTKLDFWLQRIDQAPLKPLQKTDILKTYTIPRLIYIADHSEVKTALLETLDQKIRTAVKEWLHLPPCTCDAILYSSTRDGGLGITKLAGLIPSVQARRLHRIAQSSDDTMKCFMEKEKMEQLHKKLWIQAGGDRENIPSIWEAPPSSEPPNNVSTNSEWEAPTQKDKFPKPCNWRKNEFKKWTKLASQGRGIVNFERDKISNHWIQYYRRIPHRKLLTALQLRANVYPTREFLARGRQDQYIKACRHCDADIESCAHIIGNCPVTQDARIKRHNYICELLLEEAKKKDWVVFKEPHIRDSNKELYKPDLIFVKDARALVVDVTVRYEAAKSSLEEAAAEKVRKYKHLETEVRHLTNAKDVTFVGFPLGARGKWHQDNFKLLTELGLSKSRQVKMAETFSTVALFSSVDIVHMFASRARKSMVM

SEQ ID NO: 1525 - protein, 1390 aa, synthetic construct
MASCPKPGPPVSAGAMSLESGLTTHSVLAIERGPNSLANSGSDFGGGGLGLPLRLLRVSVGTQTSRSDWVDLVSWSHPGPTSKSQQVDLVSLFPKHRVDLLSKNDQVDLVAQFLPSKFPPNLAENDLALLVNLEFYRSDLHVYECVHFAAHWEGLSGLPEVYEQLAPQPCVGETLHSSLPRDSELFVPEEGSSEKESEDAPKTSPPTPGKHGRKQTGEEKVMVTVPDKNPPCPCCGTRVNSVLNLIEHLKVSHGKRGVCFRCAKCGKENSNYHSVVCHFKKCRGPETEKAPAGEWICEVCNRDFTTKIGLGQHKRLAHPAVRNQERIVASQPKETSNRGAHKRCWTKEEEELLIRLEAQFEGNKNINKLIAEHITTKTAKQISDKRRLLSRKPAEEPREEPGTCHHTRRAAASLRTEPEMSHHAQAEDRDNGPGRRPLPGRAAAGGRTMDEIRRHPDKGNGQQRPTKQKSEEQLQAYYKKTLEERLSAGALNTFPRAFKQVMEGRDIKLVINQTAQDYFGCLESISQIRTATRDKKDTVTREKHPKKPFQKWMKKRAIKKGNYLRFQRLFYLDRGKLAKIILDDIECLSCDIPLSEIYSVFKTRWETTGSFKSLGDFKTYGKADNTAFRELITAKEIEKNVQEMSKGSAPGPDGITLGDVVKMDPEFSRTMEIFNLWLTTGKIPDMVRGCRTVLIPKSSDPDRLKDINNWRPITIGSILLRLFSRIVTARLSKACPLNPRQRGFIRAAGCSENLKLLQTIIWSAKREHRPLGVVFVDIAKAFDTVSHQHIIHALQQREVDPHIVGLVSNMYENISTYITTKRNTHTDKIQIRVGVKQGDPMSPLLFNLAMDPLLCKLEESGKGYHRGQSSITAMAFADDLVLLSDSWENMNTNISILETFCNLTGLKTQGQKCHGFYIKPTKDSYTINDCAAWTINGTPLNMIDPGESEKYLGLQFDPWIGIARSGLSTKLDFWLQRIDQAPLKPLQKTDILKTYTIPRLIYIADHSEVKTALLETLDQKIRTAVKEWLHLPPCTCDAILYSSTRDGGLGITKLAGLIPSVQARRLHRIAQSSDDTMKCFMEKEKMEQLHKKLWIQAGGDRENIPSIWEAPPSSEPPNNVSTNSEWEAPTQKDKFPKPCNWRKNEFKKWTKLASQGRGIVNFERDKISNHWIQYYRRIPHRKLLTALQLRANVYPTREFLARGRQDQYIKACRHCDADIESCAHIIGNCPVTQDARIKRHNYICELLLEEAKKKDWVVFKEPHIRDSNKELYKPDLIFVKDARALVVDVTVRYEAAKSSLEEAAAEKVRKYKHLETEVRHLTNAKDVTFVGFPLGARGKWHQDNFKLLTELGLSKSRQVKMAETFSTVALFSSVDIVHMFASRARKSMVM

SEQ ID NO: 1526 - protein, 1390 aa, synthetic construct
MASCPKPGPPVSAGAMSLESGLTTHSVLAIERGPNSLANSGSDFGGGGLGLPLRLLRVSVGTQTSRSDWVDLVSWSHPGPTSKSQQVDLVSLFPKHRVDLLSKNDQVDLVAQFLPSKFPPNLAENDLALLVNLEFYRSDLHVYECVHFAAHWEGLSGLPEVYEQLAPQPCVGETLHSSLPRDSELFVPEEGSSEKESEDAPKTSPPTPGKHGLEQTGEEKVMVTVPDKNPPCPCCGTRVNSVLNLIEHLKVSHGKRGVCFRCAKCGKENSNYHSVVCHFKKCRGPETEKAPAGEWICEVCNRDFTTKIGLGQHKRLAHPAVRNQERIVASQPKETSNRGAHKRCWTKEEEELLIRLEAQFEGNKNINKLIAEHITTKTAKQISDKRRLLSRKPAEEPREEPGTCHHTRRAAASLRTEPEMSHHAQAEDRDNGPGRRPLPGRAAAGGRTMDEIRRHPDKGNGQQRPTKQKSEEQLQAYYKKTLEERLSAGALNTFPRAFKQVMEGRDIKLVINQTAQDCFGCLESISQIRTATRDKKDTVTREKHPKKPFQKWMKDRAIKKGNYLRFQRLFYLDRGKLAKIILDDIECLSCDIPLSEIYSVFKTRWETTGSFKSLGDFKTYGKADNTAFRELITAKEIEKNVQEMSKGSAPGPDGITLGDVVKMDPEFSRTMEIFNLWLTTGKIPDMVRGCRTVLIPKSSKPDRLKDINNWRPITIGSILLRLFSRIVTARLSKACPLNPRQRGFIRAAGCSENLKLLQTIIWSAKREHRPLGVVFVDIAKAFDTVSHQHIIHALQQREVDPHIVGLVSNMYENISTYITTKRNTHTDKIQIRVGVKQGDPMSPLLFNLAMDPLLCKLEESGKGYHRGQSSITAMAFADDLVLLSDSWEGMNTNISILETFCNLTGLKTQGQKCHGFYIKPTKDSYTINDCAAWTINGTPLNMIDPGESEKYLGLQFDPWIGIARSGLSTKLDFWLQRIDQAPLKPLQKTDILKTYTIPRLIYIADHSEVKTALLETLDQKIRTAVKEWLHLPPCTCDAILYSSTRDGGLGITKLAGLIPSVQARRLHRIAQSSDDTMKCFMEKEKMEQLHKKLWIQAGGDRENIPSIWEAPPSSEPPNNVSTNSEWEAPTQKDKFPKPCNWRKNEFKKWTKLASQGRGIVNFERDKISNHWIQYYRRIPHRKLLTALQLRANVYPTREFLARGRQDQYIKACRHCDADIESCAHIIGNCPVTQDARIKRHNYICELLLEEAKKKDWVVFKEPHIRDSNKELYKPDLIFVKDARALVVDVTVRYEAAKSSLEEAAAEKVRKYKHLETEVRHLTNAKDVTFVGFPLGARGKWHQDNFKLLTELGLSKSRQVKMAETFSTVALFSSVDIVHMFASRARKSMVM

SEQ ID NO: 1527 - protein, 1390 aa, synthetic construct
MASCPKPGPPVSAGAMSLESGLTTHSVLAIERGPNSLANSGSDFGGGGLGLPLRLLRVSVGTQTSRSDWVDLVSWSHPGPTSKSQQVDLVSLFPKHRVDLLSKNDQVDLVAQFLPSKFPPNLAENDLALLVNLEFYRSDLHVYECVHFAAHWEGLSGLPEVYEQLAPQPCVGETLHSSLPRDSELFVPEEGSSEKESEDAPKTSPPTPGKHGLEQTGEEKVMVTVPDKNPPCPCCGTRVNSVLNLIEHLKVSHGKRGVCFRCAKCGKENSNYHSVVCHFKKCRGPETEKAPAGEWICEVCNRDFTTKIGLGQHKRLAHPAVRNQERIVASQPKETSNRGAHKRCWTKEEEELLIRLEAQFEGNKNINKLIAEHITTKTAKQISDKRRLLSRKPAEEPREEPGTCHHTRRAAASLRTEPEMSHHAQAEDRDNGPGRRPLPGRAAAGGRTMDEIRRHPDKGNGQQRPTKQKSEEQLQAYYKKTLEERLSAGALNTFPRAFKQVMEGRDIKLVINQTAQDYFGCLESISQIRTATRDKKDTVTREKHPKKPFQKWMKDRAIKKGNYLRFQRLFYLDRGKLAKIILDDIECLSCDIPLSEIYSVFKTRWETTGSFKSLGDFKTYGKADNTAFRELITAKEIEKNVQEMSKGSAPGPDGITLGDVVKMDPEFSRTMEIFNLWLTTGKIPDMVRGCRTVLIPKSSDPDRLKDINNWRPITIGSILLRLFSRIVTARLSKACPLNPRQRGFIRAAGCSENLKLLQTIIWSAKREHRPLGVVFVDIAKAFDTVSHQHIIHALQQREVDPHIVGLVSNMYENISTYITTKRNTHTDKIQIRVGVKQGDPMSPLLFNLAMDPLLCKLEESGKGYHRGQSSITAMAFADDLVLLSDSWEGMNTNISILETFCNLTGLKTQGQKCHGFYIKPTKDSYTINDCAAWTINGTPLNMIDPGESEKYLGLQFDPWIGIARSGLSTKLDFWLQRIDQAPLKPLQKLDILKTYTIPRLIYIADHSEVKTALLETLDQKIRTAVKEWLHLPPCTCDAILYSSTRDGGLGITKLAGLIPSVQARRLHRIAQSSDDTMKCFMEKEKMEQLHKKLWIQAGGDRENIPSIWEAPPSSEPPNNVSTNSEWEAPTQKDKFPKPCNWRKNEFKKWTKLASQGRGIVNFERDKISNHWIQYYRRIPHRKLLTALQLRANVYPTREFLARGRQDQYIKACRHCDADIESCAHIIGNCPVTQDARIKRHNKICELLLEEAKKKDWVVFKEPHIRDSNKELYKPDLIFVKDARALVVDVTVRYEAAKSSLEEAAAEKVRKYKHLETEVRHLTNAKDVTFVGFPLGARGKWHQDNFKLLTELGLSKSRQVKMAETFSTVALFSSVDIVHMFASRARKSMVM

SEQ ID NO: 1528 - protein, 1390 aa, synthetic construct
MASCPKPGPPVSAGAMSLESGLTTHSVLAIERGPNSLANSGSDFGGGGLGLPLRLLRVSVGTQTSRSDWVDLVSWSHPGPTSKSQQVDLVSLFPKHRVDLLSKNDQVDLVAQFLPSKFPPNLAENDLALLVNLEFYRSDLHVYECVHFAAHWEGLSGLPEVYEQLAPQPCVGETLHSSLPRDSELFVPEEGSSEKESEDAPKTSPPTPGKHGLEQTGEEKVMVTVPDKNPPCPCCGTRVNSVLNLIEHLKVSHGKRGVCFRCAKCGKENSNYHSVVCHFKKCRGPETEKAPAGEWICEVCNRDFTTKIGLGQHKRLWHPAVRNQERIVASQPKETSNRGAHKRCWTKEEEELLIRLEAQFEGNKNINKLIAEHITTKTAKQISDKRRLLSRKPAEEPREEPGTCHHTRRAAASLRTEPEMSHHAQAEDRDNGPGRRPLPGRAAAGGRTMDEIRRHPDKGNGQQRPTKQKSEEQLQAYYKKTLEERLSAGALNTFPRAFKQVMEGRDIKLVINQTAQDCFGCLESISQIRTATRDKKDTVTREKHPKKPFQKWMKKRAIKKGNYLRFQRLFYLDRGKLAKIILDDIECLSCDIPLSEIYSVFKTRWETTGSFKSLGDFKTYGKADNTAFRELITAKEIEKNVQEMSKGSAPGPDGITLGDVVKMDPEFSRTMEIFNLWLTTGKIPDMVRGCRTVLIPKSSKPDRLKDINNWRPITIGSILLRLFSRIVTARLSKACPLNPRQRGFIRAAGCSENLKLLQTIIWSAKREHRPLGVVFVDIAKAFDTVSHQHIIHALQQREVDPHIVGLVSNMYENISTYITTKRNTHTDKIQIRVGVKQGDPMSPLLFNLAMDPLLCKLEESGKGYHRGQSSITAMAFADDLVLLSDSWENMNTNISILETFCNLTGLKTQGQKCHGFYIKPTKKSYTINDCAAWTINGTPLNMIDPGESEKYLGLQFDPWIGIARSGLSTKLDFWLQRIDQAPLKPLQKTDILKTYTIPRLIYIADHSEVKTALLETLDQKIRTAVKEWLHLPPCTCDAILYSSTRDGGLGITKLAGLIPSVQARRLHRIAQSSDDTMKCFMEKEKMEQLHKKLWIQAGGDRENIPSIWEAPPSSEPPNNVSTNSEWEAPTQKDKFPKPCNWRKNEFKKWTKLASQGRGIVNFERDKISNHWIQYYRRIPHRKLLTALQLRANVYPTREFLARGRQDQYIKACRHCDADNESCAHIIGNCPVTQDARIKRHNYICELLLEEAKKKDWVVFKEPHIRDSNKELYKPDLIFVKDARALVVDVTVRYEAAKSSLEEAAAEKVRKYKHLETEVRHLTNAKDVTFVGFPLGARGKWHQDNFKLLTELGLSKSRQVKMAETFSTVALFSSVDIVHMFASRARKSMVM

SEQ ID NO: 1529 - protein, 1390 aa, synthetic construct
MASCPKPGPPVSAGAMSLESGLTTHSVLAIERGPNSLANSGSDFGGGGLGGPLRLLRVSVGTQTSRSDWVDLVSWSHPGPTSKSQQVDLVSLFPKHRVDLLSKNDQVDLVAQFLPSKFPPNLAENDLALLVNLEFYRSDLHVYECVHFAAHWEGLSGLPEVYEQLAPQPCVGETLHSSLPRDSELFVPEEGSSEKESEDAPKTSPPTPGKHGLEQTGEEKVMVTVPDKNPPCPCCGTRVNSVLNLIEHLKVSHGKRGVCFRCAKCGKERSNYHSVVCHFKKCRGPETEKAPAGEWICEVCNRDFTTKIGLGQHKRLAHPAVRNQERIVASQPKETSNRGAHKRCWTKEEEELLIRLEAQFEGNKNINKLIAEHITTKTAKQISDMRRLLSRKPAEEPREEPGTCHHTRRAAASLRTEPEMSHHAQAEDRDNGPGRRPLPGRAAAGGRTMDEIRRHPDKGNGQQRPTKQKSEEQLQAYYKKTLEERLSAGALNTFPRAFKQVMEGRDIKLVINQTAQDYFGCLESISQIRTATRDKKDTGTREKHPKKPFQKWMKKRAIKKGNYLRFQRLFYLDRGKLAKIILDDIECLSCDIPLSEIYSVFKTRWETTGSFKSLGDFKTYGKADNTAFRELITAKEIEKNVQEMSKGSAPGPDGITLGDIVKMDPEFSRTMEIFNLWLTTGKIPDMVRGCRTVLIPKSSKPDRLKDINNWRPITIGSILLRLFSRIVTARLSKACPLNPRQRGFIRAAGCSENLKLLQTIIWSAKREHRPLGVVFVDIAKAFDTVSHQHIIHALQQREVDPHIVGLVSNMYENISTYITTKRNTHTDKIQIRVGVKQGDPMSPLLFNLAMDPLLCKLEESGKGYHRGQSSITAMAFADDLVLLSDSWENMNTNISILETFCNLTGLKTQGQKCHGFYIKPTKDSYTINDCAAWTINGTPLNMIDPGESEKYLGLQFDPWIGIARSGLSTKLDFWLQRIDQAPLKPLQKTDILKTYTIPRLIYIADHSEVKTALLETLDQKIRTAVKEWLHLPPCTCDAILYSSTRDGGLGITKLAGLIPSVQARRLHRIAQSSDDTMKCFMEKEKMEQLHKKLWIQAGGDRENIPSIWEAPPSSEPPNNVSTNSEWEAPTQKDKFPKPCNWRKNEFKKWTKLASQGRGIVNFERDKISNHWIQYYRRIPHRKLLTALQLRANVYPTREFLARGRQDQYIKACRHCDADIESCAHIIGNCPVTQDARIKRHNYICELLLEEAKKKDWVVFKEPHIRDSNKELYKPDLIFVKDARALVVDVTVRYEAAKSSLEEAAAEKVRKYKHLETEVRHLTNAKDVTFVGFPLGARGKWHQDNFKLLTELGLSKSRQVKMAETFSTVALFSSVDIVHMFASRARKSMVM

SEQ ID NO: 1530 - protein, 1390 aa, synthetic construct
MASCPKPGPPVSAGAMSLESGLTTHSVLAIERGPNSLANSGSDFGGGGLGLPLRLLRVSVGTQTSRSDWVDLVSWSHPGPTSKSQQVDLVSLFPKHRVDLLSKNDQVDLVAQFLPSKFPPNLAENDLALLVNLEFYRSDLHVYECVHFAAHWEGLSGLPEVYEQLAPQPCVGETLHSSLPRDSELFVPEEGSSEKESEDAPKTSPPTPGKHGLEQTGEEKVMVTVPDKNPPCPCCGTRVNSVLNLIEHLKVSHGKRGVCFRCAKCGKENSNYHSVVCHFKKCRGPETEKAPAGEWICEVCNRDFTTKIGLGQHKRLAHPAVRNQERIVASQPKETSNRGAHKRCWTKEEEELLIRLEAQFEGNKNINKLIAEHITTKTAKQISDKRRLLSRKPAEEPREEPGTCHHTRRAAASLRTEPEMSHHAQAEDRDNGPGRRPLPGRAAAGGRTMDEIRRHPDKGNGQQRPTKQKSEEQLQAYYKKTLEERLSAGALNTFPRAFKQVMEGRDIKLVINQTAQDYFGCLESISQIRTATRDKKDTVTREKHPKKPFQKWMKKRAIKKGNYLRFQRLFYLDRGKLAKIILDDIECLSCDIPLSEIYSVFKTRWETTGSFKSLGDFKTYGKADNTAFRELITAKEIEKNVQEMSKGSAPGPDGITLGDVVKMDPEGSRTMEIFNLWLTTGKIPDMVRGCRTVLIPKSSDPDRLKDINNWRPITIGSILLRLFSRIVTARLSKACPLNPRQRGFIRAAGCSENLKLLQTIIWSAKREHRPLGVVFVDIAKAFDTVSHQHIIHALQQREVDPHIVGLVSNMYENISTYITTKRNTHTDKIQIRVGVKQGDPMSPLLFNLAMDPLLCKLEESGKGYHRGQSSITAMAFADDLVLLSDSWENMNTNISILETFCNLTGLKTQGQKCHGFYIKPTKDSYTINDCAAWTINGTPLNMIDPGESEKYLGLQFDPWIGIARSGLSTKLDFWLQRIDQAPLKPLQKTDILKTYTIPRLIYIADHSEVKTALLETLDQKIRTAVKEWLHLPPCTCDAILYSSTRDGGLGITKLAGLIPSVQARRLHRIAQSSDDTMKCFMEKEKMEQLHKKLWIQAGGDRENIPSIWEAPPSSEPPNNVSTNSEWEAPTQKDKFPKPCNWRKNEFKKWTKLASQGRGIVNFERDKISNHWIQYYRRIPHRKLLTALQLRANVYPTREFLARGRQDQYIKACRHCDADIESCAHIIGNCPVTQDARIKRHNYICELLLEEAKKKDWVVFKEPHIRDSNKELYKPDLIFVKDARALVVDVTVRYEAAKSSLEEAAAEKVRKYKHLETEVRHLTNAKDVTFVGFPLGARGKWHQDNFKLLTELGLSKSRQVKMAETFSTVALFSSVDIVHMFASRARKSMVM

SEQ ID NO: 1531 - protein, 1390 aa, synthetic construct
MASCPKPGPPVSAGAMSLESGLTTHSVLAIERGPNSLANSGSDFGGGGLGLPLRLLRVSVGTQTSRSDWVDLVSWSHPGPTSKSQQVDLVSLFPKHRVDLLSKNDQVDLVAQFLPSKFPPNLAENDLALLVNLEFYRSDLHVYECVHFAAHWEGLSGLPEVYEQLAPQPCVGETLHSSLPRDSELFVPEEGSSEKESEDAPKTSPPTPGKHGLEQTGEEKVMVTVPDKNPPCPCCGTRVNSVLNLIEHLKVSHGKRGVCFRCAKCGKENSNYHSVVCHFKKCRGPETEKAPAGEWICEVCNRDFTTKIGLGQHKRLAHPAVRNQERIVASQPKETSNRGAHKRCWTKEEEELLIRLEAQFEGNKNINKLIAEHITTKTAKQISDKRRLLSRKPAEEPREEPGTCHHTRRAAASLRTEPEMSHHAQAEDRDNGPGRRPLPGRAAAGGRTMDEIRRHPDKGNGQQRPTKQKSEEQLQAYYKKTLEERLSAGALNTFPRAFKQVMEGRDIKLVINQTAQDYFGCLESISQIRTATRDKKDTVTREKHPKKPFQKWMKKRAIKKGNYLRFQRLFYLDRGKLAKIILDDIECLSCDIPLSEIYSVFKTRWETTGSFKSLGDFKTYGKADNTAFRELITAKEIEKNVQEMSKGSAPGPDGITLGDVVKMDPEFSRTMEIFNLWLTTGKIPDMVRGCRTVLIPKSSDPDRLKDINNWRPITIGSILLRLFSRIVTARLSKACPLNPRQRGFIRAAGCSENLKLLQTIIWSAKREHRPLGVVFVDIAKAFDTVSHQHIIHALQQREVDPHIVGLVSNMYENISTYITTKRNTHTDKIQIRVGVKQGDPMSPLLFNLAMDPLLCKLEESGKGYHRGQSSITAMAFADDLVLLSDSWENMNTNISILETFCNLTGLKTQGQKCHGFYIKPTKDSYTINDCAAWTINGTPLNMIDPGESEKYLGLQFDPWIGIARSGLSTKLDFWLQRIDQAPLKPLQKTDILKTYTIPRLIYIADHSEVKSALLETLDQKIRTAVKEWLHLPPCTCDAILYSSTRDGGLGITKLAGLIPSVQARRLHRIAQSSDDTMKCFMEKEKMEQLHKKLWIQAGGDRENIPSIWEAPPSSEPPNNVSTNSEWEAPTQKDKFPKPCNWRKNEFKKWTKLASQGRGIVNFERDKISNHWIQYYRRIPHRKLLTALQLRANVYPTREFLARGRQDQYIKACRHCDADIESCAHIIGNCPVTQDARIKRHNYICELLLEEAKKKDWVVFKEPHIRDSNKELYKPDLIFVKDARALVVDVTVRYEAAKSSLEEAAAEKVRKYKHLETEVRHLTNAKDVTFVGFPLGARGKWHQDNFKLLTELGLSKSRQVKMAETFSTVALFSSVDIVHMFASRARKSMVM

SEQ ID NO: 1532 - protein, 1390 aa, synthetic construct
MASCPKPGPPVSAGAMSLESGLTTHSVLAIERGPNSLANSGSDFGGGGLGLPLRLLRVSVGTQTSRSDWVDLVSWSHPGPTSKSQQVDLVSLFPKHRVDLLSKNDQVDLVAQFLPSKFPPNLAENDLALLVNLEFYRSDLHVYECVHFAAHWEGLSGLPEVYEQLAPQPCVGETLHSSLPRDSELFVPEEGSSEKESEDAPKTSPPTPGKHGRKQTGEEKVMVTVPDKNPPCPCCGTRVNSVLNLIEHLKVSHGKRGVCFRCAKCGKENSNYHSVVCHFKKCRGPETEKAPAGEWICEVCNRDFTTKIGLGQHKRLAHPAVRNQERIVASQPKETSNRGAHKRCWTKEEEELLIRLEAQFEGNKNINKLIAEHITTKTAKQISDKRRLLSRKPAEEPREEPGTCHHTRRAAASLRTEPEMSHHAQAEDRDNGPGRRPLPGRAAAGGRTMDEIRRHPDKGNGQQRPTKQKSEEQLQAYYKKTLEERLSAGALNTFPRAFKQVMEGRDIKLVINQTAQDYFGCLESISQIRTATRDKKDTVTREKHPKKPFQKWMKKRAIKKGNYLRFQRLFYLDRGKLAKIILDDIECLSCDIPLSEIYSVFKTRWETTGSFKSLGDFKTYGKADNTAFRELITAKEIEKNVQEMSKGSAPGPDGITLGDVVKMDPEFSRTMEIFNLWLTTGKIPDMVRGCRTVLIPKSSDPDRLKDINNWRPITIGSILLRLFSRIVTARLSKACPLNPRQRGFIRAAGCSENLKLLQTIIWSAKREHRPLGVVFVDIAKAFDTVSHQHIIHALQQREVDPHIVGLVSNMYENISTYITTKRNTHTDKIQIRVGVKQGDPMSPLLFNLAMDPLLCKLEESGKGYHRGQSSITAMAFADDLVLLSDSWENMNTNISILETFCNLTGLKTQGQKCHGFYIKPTKDSYTINDCAAWTINGTPLNMIDPGESEKYLGLQFDPWIGIARSGLSTKLDFWLQRIDQAPLKPLQKTDILKTYTIPRLIYIADHSEVKSALLETLDQKIRTAVKEWLHLPPCTCDAILYSSTRDGGLGITKLAGLIPSVQARRLHRIAQSSDDTMKCFMEKEKMEQLHKKLWIQAGGDRENIPSIWEAPPSSEPPNNVSTNSEWEAPTQKDKFPKPCNWRKNEFKKWTKLASQGRGIVNFERDKISNHWIQYYRRIPHRKLLTALQLRANVYPTREFLARGRQDQYIKACRHCDADIESCAHIIGNCPVTQDARIKRHNYICELLLEEAKKKDWVVFKEPHIRDSNKELYKPDLIFVKDARALVVDVTVRYEAAKSSLEEAAAEKVRKYKHLETEVRHLTNAKDVTFVGFPLGARGKWHQDNFKLLTELGLSKSRQVKMAETFSTVALFSSVDIVHMFASRARKSMVM

SEQ ID NO: 1533 - protein, 1390 aa, synthetic construct
MASCPKPGPPVSAGAMSLESGLTTHSVLAIERGPNSLANSGSDFGGGGLGLPLRLLRVSVGTQTSRSDWVDLVSWSHPGPTSKSQQVDLVSLFPKHRVDLLSKNDQVDLVAQFLPSKFPPNLAENDLALLVNLEFYRSDLHVYECVHFAAHWEGLSGLPEVYEQLAPQPCVGETLHSSLPRDSELFVPEEGSSEKESEDAPKTSPPTPGKHGRKQTGEEKVMVTVPDKNPPCPCCGTRVNSVLNLIEHLKVSHGKRGVCFRCAKCGKENSNYHSVVCHFKKCRGPETEKAPAGEWICEVCNRDFTTKIGLGQHKRLAHPAVRNQERIVASQPKETSNRGAHKRCWTKEEEELLIRLEAQFEGNKNINKLIAEHITTKTAKQISDKRRLLSRKPAEEPREEPGTCHHTRRAAASLRTEPEMSHHAQAEDRDNGPGRRPLPGRAAAGGRTMDEIRRHPDKGNGQQRPTKQKSEEQLQAYYKKTLEERLSAGALNTFPRAFKQVMEGRDIKLVINQTAQDYFGCLESISQIRTATRDKKDTVTREKHPKKPFQKWMKKRAIKKGNYLRFQRLFYLDRGKLAKIILDDIECLSCDIPLSEIYSVFKTRWETTGSFKSLGDFKTYGKADNTAFRELITAKEIEKNVQEMSKGSAPGPDGITLGDVVKMDPEFSRTMEIFNLWLTTGKIPDMVRGCRTVLIPKSSDPDRLKDINNWRPITIGSILLRLFSRIVTARLSKACPLNPRQRGFIRAAGCSENLKLLQTIIWSAKREHRPLGVVFVDIAKAFDTVSHQHIIHALQQREVDPHIVGLVSNMYENISTYITTKRNTHTDKIQIRVGVKQGDPMSPLLFNLAMDPLLCKLEESGKGYHRGQSSITAMAFADDLVLLSDSWENMNTNISILETFCNLTGLKTQGQKCHGFYIKPTKDSYTINDCAAWTINGTPLNMIDPGESEKYLGLQFDPWIGIARSGLSTKLDFWLQRIDQAPLKPLQKTDILKTYTIPRLIYIADHSEVKTGLLETLDQKIRTAVKEWLHLPPCTCDAILYSSTRDGGLGITKLAGLIPSVQARRLHRIAQSSDDTMKCFMEKEKMEQLHKKLWIQAGGDRENIPSIWEAPPSSEPPNNVSTNSEWEAPTQKDKFPKPCNWRKNEFKKWTKLASQGRGIVNFERDKISNHWIQYYRRIPHRKLLTALQLRANVYPTREFLARGRQDQYIKACRHCDADIESCAHIIGNCPVTQDARIKRHNYICELLLEEAKKKDWVVFKEPHIRDSNKELYKPDLIFVKDARALVVDVTVRYEAAKSSLEEAAAEKVRKYKHLETEVRHLTNAKDVTFVGFPLGARGKWHQDNFKLLTELGLSKSRQVKMAETFSTVALFSSVDIVHMFASRARKSMVM

SEQ ID NO: 1534 - skipped

SEQ ID NO: 1535 - protein, 1390 aa, synthetic construct
MASCPKPGPPVSAGAMSLESGLTTHSVLAIERGPNSLANSGSDFGGGGLGLPLRLLRVSVGTQTSRSDWVDLVSWSHPGPTSKSQQVDLVSLFPKHRVDLLSKNDQVDLVAQFLPSKFPPNLAENDLALLVNLEFYRSDLHVYECVHFAAHWEGLSGLPEVYEQLAPQPCVGETLHSSLPRDSELFVPEEGSSEKESEDAPKTSPPTPGKHGLEQTGEEKVMVTVPDKNPPCPCCGTRVNSVLNLIEHLKVSHGKRGVCFRCAKCGKENSNYHSVVCHFKKCRGPETEKAPAGEWICEVCNRDFTTKIGLGQHKRLAHPAVRNQERIVASQPKETSNRGAHKRCWTKEEEELLIRLEAQFEGNKNINKLIAEHITTKTAKQISDKRRLLSRKPAEEPREEPGTCHHTRRAAASLRTEPEMSHHAQAEDRDNGPGRRPLPGRAAAGGRTMDEIRRHPDKGNGQQRPTKQKSEEQLQAYYKKTLEERLSAGALNTFPRAFKQVMEGRDIKLVINQTAQDYFGCLESISQIRTATRDKKDTVTREKHPKKPFQKWMKKRAIKKGNYLRFQRLFYLDRGKLAKIILDDIECLSCDIPLSEIYSVFKTRWETTGSFKSLGDFKTYGKADNTAFRELITAKEIEKNVQEMSKGSAPGPDGITLGDVVKMDPEFSRTMEIFNLWLTTGKIPDMVRGCRTVLIPKSSDPDRLKDINNWRPITIGSILLRLFSRIVTARLSKACPLNPRQRGFIRAAGCSENLKLLQTIIWSAKREHRPLGVVFVDIAKAFDTVSHQHIIHALQQREVDPHIVGLVSNMYENISTYITTKRNTHTDKIQIRVGVKQGDPMSPLLFNLAMDPLLCKLEESGKGYHRGQSSITAMAFADDLVLLSDSWEGMNTNISILETFCNLTGLKTQGQKCHGFYIKPTKDSYTINDCAAWTINGTPLNMIDPGESEKYLGLQFDPWIGIARSGLSTKLDFWLQRIDQAPLKPLQKLDILKTYTIPRLIYIADHSEVKTALLETLDQKIRTAVKEWLHLPPCTCDAILYSSTRDGGLGITKLAGLIPSVQARRLHRIAQSSDDTMKCFMEKEKMEQLHKKLWIQAGGDRENIPSIWEAPPSSEPPNNVSTNSEWEAPTQKDKFPKPCNWRKNEFKKWTKLASQGRGIVNFERDKISNHWIQYYRRIPHRKLLTALQLRANVYPTREFLARGRQDQYIKACRHCDADIESCAHIIGNCPVTQDARIKRHNKICELLLEEAKKKDWVVFKEPHIRDSNKELYKPDLIFVKDARALVVDVTVRYEAAKSSLEEAAAEKVRKYKHLETEVRHLTNAKDVTFVGFPLGARGKWHQDNFKLLTELGLSKSRQVKMAETFSTVALFSSVDIVHMFASRARKSMVM

SEQ ID NO: 1536 - protein, 1390 aa, synthetic construct
MASCPKPGPPVSAGAMSLESGLTTHSVLAIERGPNSLANSGSDFGGGGLGLPLRLLRVSVGTQTSRSDWVDLVSWSHPGPTSKSQQVDLVSLFPKHRVDLLSKNDQVDLVAQFLPSKFPPNLAENDLALLVNLEFYRSDLHVYECVHFAAHWEGLSGLPEVYEQLAPQPCVGETLHSSLPRDSELFVPEEGSSEKESEDAPKTSPPTPGKHGLEQTGEEKVMVTVPDKNPPCPCCGTRVNSVLNLIEHLKVSHGKRGVCFRCAKCGKENSNYHSVVCHFKKCRGPETEKAPAGEWICEVCNRDFTTKIGLGQHKRLAHPAVRNQERIVASQPKETSNRGAHKRCWTKEEEELLIRLEAQFEGNKNINKLIAEHITTKTAKQISDKRRLLSRKPAEEPREEPGTCHHTRRAAASLRTEPEMSHHAQAEDRDNGPGRRPLPGRAAAGGRTMDEIRRHPDKGNGQQRPTKQKSEEQLQAYYKKTLEERLSAGALNTFPRAFKQVMEGRDIKLVINQTAQDYFGCLESISQIRTATRDKKDTVTRKKHPKKPFQKWMKKRAIKKGNYLRFQRLFYLDRGKLAKIILDDIECLSCDIPLSEIYSVFKTRWETTGSFKSLGDFKTYGKADNTAFRELITAKEIEKNVQEMSKGSAPGPDGITLGDVVKMDPEFSRTMEIFNLWLTTGKIPDMVRGCRTVLIPKSSDPDRLKDINNWRPITIGSILLRLFSRIVTARLSKACPLNPRQRGFIRAAGCSENLKLLQTIIWSAKREHRPLGVVFVDIAKAFDTVSHQHIIHALQQREVDPHIVGLVSNMYENISTYITTKRNTHTDKIQIRVGVKQGDPMSPLLFNLAMDPLLCKLEESGKGYHRGQSSITAMAFADDLVLLSDSWEGMNTNISILETFCNLTGLKTQGQKCHGFYIKPTKDSYTINDCAAWTINGTPLNMIDPGESEKYLGLQFDPWIGIARSGLSTKLDFWLQRIDQAPLKPLQKTDILKTYTIPRLIYIADHSEVKTALLETLDQKIRTAVKEWLHLPPCTCDAILYSSTRDGGLGITKLAGLIPSVQARRLHRIAQSSDDTMKCFMEKEKMEQLHKKLWIQAGGDRENIPSIWEAPPSSEPPNNVSTNSEWEAPTQKDKFPKPCNWRKNEFKKWTKLASQGRGIVNFERDKISNHWIQYYRRIPHRKLLTALQLRANVYPTREFLARGRQDQYIKACRHCDADIESCAHIIGNCPVTQDARIKRHNKICELLLEEAKKKDWVVFKEPHIRDSNKELYKPDLIFVKDARALVVDVTVRYEAAKSSLEEAAAEKVRKYKHLETEVRHLTNAKDVTFVGFPLGARGKWHQDNFKLLTELGLSKSRQVKMAETFSTVALFSSVDIVHMFASRARKSMVM

SEQ ID NO: 1537 - protein, 1390 aa, synthetic construct
MASCPKPGPPVSAGAMSLESGLTTHSVLAIERGPNSLANSGSDFGGGGLGLPLRLLRVSVGTQTSRSDWVDLVSWSHPGPTSKSQQVDLVSLFPKHRVDLLSKNDQVDLVAQFLPSKFPPNLAENDLALLVNLEFYRSDLHVYECVHFAAHWEGLSGLPEVYEQLAPQPCVGETLHSSLPRDSELFVPEEGSSEKESEDAPKTSPPTPGKHGLEQTGEEKVMVTVPDKNPPCPCCGTRVNSVLNLIEHLKVSHGKRGVCFRCAKCGKENSNYHSVVCHFKKCRGPETEKAPAGEWICEVCNRDFTTKIGLGQHKRLAHPAVRNQERIVASQPKETSNRGAHKRCWTKEEEELLIRLEAQFEGNKNINKLIAEHITTKTAKQISDKRRLLSRKPAEEPREEPGTCHHTRRAAASLRTEPEMSHHAQAEDRDNGPGRRPLPGRAAAGGRTMDEIRRHPDKGNGQQRPTKQKSEEQLQAYYKKTLEERLSAGALNTFPRAFKQVMEGRDIKLVINQTAQDYFGCLESISQIRTATRDKKDTVTREKHPKKPFQKWMKKRAIKKGNYLRFQRLFYLDRGKLAKIILDDIECLSCDIPLSEIYSVFKTRWETTGSFKSLGDFKTYGKADNTAFRELITAKEIEKNVQEMSKGSAPGPDGITLGDVVKMDPEFSRTMEIFNLWLTTGKIPDMVRGCRTVLIPKSSDPDRLKDINNWRPITIGSILLRLFSRIVTARLSKACPLNPRQRGFIRAAGCSENLKLLQTIIWSAKREHRPLGVVFVDIAKAFDTVSHQHIIHALQQREVDPHIVGLVSNMYENISTYITTKRNTHTDKIQIRVGVKQGDPMSPLLFNLAMDPLLCKLEESGKGYHRGQSSITAMAFADDLVLLSDSWENMNTNISILETFCNLTGLKTQGQKCHGFYIKPTKDSYTINDCAAWTINGTPLNMIDPGESEKYLGLQFDPWIGIARSGLSTKLDFWLQRIDQAPLKPLQKLDILKTYTIPRLIYIADHSEVKTALLETLDQKIRTAVKEWLHLPPCTCDAILYSSTRDGGLGITKLAGLIPSVQARRLHRIAQSSDDTMKCFMEKEKMEQLHKKLWIQAGGDRENIPSIWEAPPSSEPPNNVSTNSEWEAPTQKDKFPKPCNWRKNEFKKWTKLASQGRGIVNFERDKISNHWIQYYRRIPHRKLLTALQLRANVYPTREFLARGRQDQYIKACRHCDADIESCAHIIGNCPVTQDARIKRHNKICELLLEEAKKKDWVVFKEPHIRDSNKELYKPDLIFVKDARALVVDVTVRYEAAKSSLEEAAAEKVRKYKHLETEVRHLTNAKDVTFVGFPLGARGKWHQDNFKLLTELGLSKSRQVKMAETFSTVALFSSVDIVHMFASRARKSMVM

SEQ ID NO: 1538 - protein, 1390 aa, synthetic construct
MASCPKPGPPVSAGAMSLESGLTTHSVLAIERGPNSLANSGSDFGGGGLGLPLRLLRVSVGTQTSRSDWVDLVSWSHPGPTSKSQQVDLVSLFPKHRVDLLSKNDQVDLVAQFLPSKFPPNLAENDLALLVNLEFYRSDLHVYECVHFAAHWEGLSGLPEVYEQLAPQPCVGETLHSSLPRDSELFVPEEGSSEKESEDAPKTSPPTPGKHGLEQTGEEKVMVTVPDKNPPCPCCGTRVNSVLNLIEHLKVSHGKRGVCFRCAKCGKENSNYHSVVCHFKKCRGPETEKAPAGEWICEVCNRDFTTKIGLGQHKRLAHPAVRNQERIVASQPKETSNRGAHKRCWTKEEEELLIRLEAQFEGNKNINKLIAEHITTKTAKQISDKRRLLSRKPAEEPREEPGTCHHTRRAAASLRTEPEMSHHAQAEDRDNGPGRRPLPGRAAAGGRTMDEIRRHPDKGNGQQRPTKQKSEEQLQAYYKKTLEERLSAGALNTFPRAFKQVMEGRDIKLVINQTAQDYFGCLESISQIRTATRDKKDTVTRKKHPKKPFQKWMKKRAIKKGNYLRFQRLFYLDRGKLAKIILDDIECLSCDIPLSEIYSVFKTRWETTGSFKSLGDFKTYGKADNTAFRELITAKEIEKNVQEMSKGSAPGPDGITLGDVVKMDPEFSRTMEIFNLWLTTGKIPDMVRGCRTVLIPKSSDPDRLKDINNWRPITIGSILLRLFSRIVTARLSKACPLNPRQRGFIRAAGCSENLKLLQTIIWSAKREHRPLGVVFVDIAKAFDTVSHQHIIHALQQREVDPHIVGLVSNMYENISTYITTKRNTHTDKIQIRVGVKQGDPMSPLLFNLAMDPLLCKLEESGKGYHRGQSSITAMAFADDLVLLSDSWENMNTNISILETFCNLTGLKTQGQKCHGFYIKPTKDSYTINDCAAWTINGTPLNMIDPGESEKYLGLQFDPWIGIARSGLSTKLDFWLQRIDQAPLKPLQKTDILKTYTIPRLIYIADHSEVKTALLETLDQKIRTAVKEWLHLPPCTCDAILYSSTRDGGLGITKLAGLIPSVQARRLHRIAQSSDDTMKCFMEKEKMEQLHKKLWIQAGGDRENIPSIWEAPPSSEPPNNVSTNSEWEAPTQKDKFPKPCNWRKNEFKKWTKLASQGRGIVNFERDKISNHWIQYYRRIPHRKLLTALQLRANVYPTREFLARGRQDQYIKACRHCDADIESCAHIIGNCPVTQDARIKRHNKICELLLEEAKKKDWVVFKEPHIRDSNKELYKPDLIFVKDARALVVDVTVRYEAAKSSLEEAAAEKVRKYKHLETEVRHLTNAKDVTFVGFPLGARGKWHQDNFKLLTELGLSKSRQVKMAETFSTVALFSSVDIVHMFASRARKSMVM

SEQ ID NO: 1539 - protein, 1390 aa, synthetic construct
MASCPKPGPPVSAGAMSLESGLTTHSVLAIERGPNSLANSGSDFGGGGLGLPLRLLRVSVGTQTSRSDWVDLVSWSHPGPTSKSQQVDLVSLFPKHRVDLLSKNDQVDLVAQFLPSKFPPNLAENDLALLVNLEFYRSDLHVYECVHFAAHWEGLSGLPEVYEQLAPQPCVGETLHSSLPRDSELFVPEEGSSEKESEDAPKTSPPTPGKHGLEQTGEEKVMVTVPDKNPPCPCCGTRVNSVLNLIEHLKVSHGKRGVCFRCAKCGKENSNYHSVVCHFPKCRGPETEKAPAGEWICEVCNRDFTTKIGLGQHKRLAHPAVRNQERIVASQPKETSNRGAHKRCWTKEEEELLIRLEAQFEGNKNINKLIAEHITTKTAKQISDKRRLLSRKPAEEPREEPGTCHHTRRAAASLRTEPEMSHHAQAEDRDNGPGRRPLPGRAAAGGRTMDEIRRHPDKGNGQQRPTKQKSEEQLQAYYKKTLEERLSAGALNTFPRAFKQVMEGRDIKLVINQTAQDCFGCLESISQIRTATRDKKDTVTREKHPKKPFQKWMKKRAIKKGNYLRFQRLFYLDRGKLAKIILDDIECLSCDIPLSEIYSVFKTRWETTGSFKSLGDFKTYGKADNTAFRELITAKEIEKNVQEMSKGSAPGPDGITLGDVVKMDPEFSRTMEIFNLWLTTGKIPDMVRGCRTVLIPKSSKPDRLKDINNWRPITIGSILLRLFSRIVTARLSKACPLNPRQRGFIRAAGCSENLKLLQTIIWSAKREHRPLGVVFVDIAKAFDTVSHQHIIHALQQREVDPHIVGLVSNMYENISTYITTKRNTHTDKIQIRVGVKQGDPMSPLLFNLAMDPLLCKLEESGKGYHRGQSSITAMAFADDLVLLSDSWEGMNTNISILETFCNLTGLKTQGQKCHGFYIKPTKDSYTINDCAAWTINGTPLNMIDPGESEKYLGLQFDPWIGIARSGLSTKLDFWLQRIDQAPLKPLQKTDILKTYTIPRLIYIADHSEVKTALLETLDQKIRTAVKEWLHLPPCTCDAILYSSTRDGGLGITKLAGLIPSVQARRLHRIAQSSDDTMKCFMEKEKMEQLHKKLWIQAGGDRENIPSIWEAPPSSEPPNNVSTNSEWEAPTQKDKFPKPCNWRKNEFKKWTKLASQGRGIVNFERDKISNHWIQYYRRIPHRKLLTALQLRANVYPTREFLARGRQDQYIKACRHCDADIESCAHIIGNCPVTQDARIKRHNYICELLLEEAKKKDWVVFKEPHIRDSNKELYKPDLIFVKDARALVVDVTVRYEAAKSSLEEAAAEKVRKYKHLETEVRHLTNAKDVTFVGFPLGARGKWHQDNFKLLTELGLSKSRQVKMAETFSTVALFSSVDIVHMFASRARKSMVM

SEQ ID NO: 1540 - protein, 1390 aa, synthetic construct
MASCPKPGPPVSAGAMSLESGLTTHSVLAIERGPNSLANSGSDFGGGGLGLPLRLLRVSVGTQTSRSDWVDLVSWSHPGPTSKSQQVDLVSLFPKHRVDLLSKNDQVDLVAQFLPSKFPPNLAENDLALLVNLEFYRSDLHVYECVHFAAHWEGLSGLPEVYEQLAPQPCVGETLHSSLPRDSELFVPEEGSSEKESEDAPKTSPPTPGKHGLEQTGEEKVMVTVPDKNPPCPCCGTRVNSVLNLIEHLKVSHGKRGVCFRCAKCGKENSNYHSVVCHFPKCRGPETEKAPAGEWICEVCNRDFTTKIGLGQHKRLAHPAVRNQERIVASQPKETSNRGAHKRCWTKEEEELLIRLEAQFEGNKNINKLIAEHITTKTAKQISDKRRLLSRKPAEEPREEPGTCHHTRRAAASLRTEPEMSHHAQAEDRDNGPGRRPLPGRAAAGGRTMDEIRRHPDKGNGQQRPTKQKSEEQLQAYYKKTLEERLSAGALNTFPRAFKQVMEGRDIKLVINQTAQDYFGCLESISQIRTATRDKKDTVTREKHPKKPFQKWMKDRAIKKGNYLRFQRLFYLDRGKLAKIILDDIECLSCDIPLSEIYSVFKTRWETTGSFKSLGDFKTYGKADNTAFRELITAKEIEKNVQEMSKGSAPGPDGITLGDVVKMDPEFSRTMEIFNLWLTTGKIPDMVRGCRTVLIPKSSKPDRLKDINNWRPITIGSILLRLFSRIVTARLSKACPLNPRQRGFIRAAGCSENLKLLQTIIWSAKREHRPLGVVFVDIAKAFDTVSHQHIIHALQQREVDPHIVGLVSNMYENISTYITTKRNTHTDKIQIRVGVKQGDPMSPLLFNLAMDPLLCKLEESGKGYHRGQSSITAMAFADDLVLLSDSWENMNTNISILETFCNLTGLKTQGQKCHGFYIKPTKKSYTINDCAAWTINGTPLNMIDPGESEKYLGLQFDPWIGIARSGLSTKLDFWLQRIDQAPLKPLQKTDILKTYTIPRLIYIADHSEVKTALLETLDQKIRTAVKEWLHLPPCTCDAILYSSTRDGGLGITKLAGLIPSVQARRLHRIAQSSDDTMKCFMEKEKMEQLHKKLWIQAGGDRENIPSIWEAPPSSEPPNNVSTNSEWEAPTQKDKFPKPCNWRKNEFKKWTKLASQGRGIVNFERDKISNHWIQYYRRIPHRKLLTALQLRANVYPTREFLARGRQDQYIKACRHCDADIESCAHIIGNCPVTQDARIKRHNYICELLLEEAKKKDWVVFKEPHIRDSNKELYKPDLIFVKDARALVVDVTVRYEAAKSSLEEAAAEKVRKYKHLETEVRHLTNAKDVTFVGFPLGARGKWHQDNFKLLTELGLSKSRQVKMAETFSTVALFSSVDIVHMFASRARKSMVM

SEQ ID NO: 1541 - protein, 1390 aa, synthetic construct
MASCPKPGPPVSAGAMSLESGLTTHSVLAIERGPNSLANSGSDFGGGGLGLPLRLLRVSVGTQTSRSDWVDLVSWSHPGPTSKSQQVDLVSLFPKHRVDLLSKNDQVDLVAQFLPSKFPPNLAENDLALLVNLEFYRSDLHVYECVHFAAHWEGLSGLPEVYEQLAPQPCVGETLHSSLPRDSELFVPEEGSSEKESEDAPKTSPPTPGKHGLEQTGEEKVMVTVPDKNPPCPCCGTRVNSVLNLIEHLKVSHGKRGVCFRCAKCGKENSNYHSVVCHFKKCRGPETEKAPAGEWICEVCNRDFTTKIGLGQHKRLAHPAVRNQERIVASQPKETSNRGAHKRCWTKEEEELLIRLEAQFEGNKNINKLIAEHITTKTAKQISDKRRLLSRKPAEEPREEPGTCHHTRRAAASLRTEPEMSHHAQAEDRDNGPGRRPLPGRAAAGGRTMDEIRRHPDKGNGQQRPTKQKSEEQLQAYYKKTLEERLSAGALNTFPRAFKQVMEGRDIKLVINQTAQDYFGCLESISQIRTATRDKKDTVTREKHPKKPFQKWMKKRAIKKGNYLRFQRLFYLDRGKLAKIILDDIECLSCDIPLSEIYSVFKTRWETTGSFKSLGDFKTYGKADNTAFRELITAKEIEKNVQEMSKGSAPGPDGITLGDVVKMDPEFSRTMEIFNLWLTTGKIPDMVRGCRTVLIPKSSDPDRLKDINNWRPITIGSILLRLFSRIVTARLSKACPLNPRQRGFIRAAGCSENLKLLQTIIWSAKREHRPLGVVFVDIAKAFDTVSHQHIIHALQQREVDPHIVGLVSNMYENISTYITTKRNTHTDKIQIRVGVKQGDPMSPLLFNLAMDPLLCKLEESGKGYHRGQSSITAMAFADDLVLLSDSWENMNTNISILETFCNLTGLKTQGQKCHGFYIKPTKKSYTINDCAAWTINGTPLNMIDPGESEKYLGLQFDPWIGIARSGLSTKLDFWLQRIDQAPLKPLQKTDILKTYTIPRLIYIADHSEVKTGLLETLDQKIRTAVKEWLHLPPCTCDAILYSSTRDGGLGITKLAGLIPSVQARRLHRIAQSSDDTMKCFMEKEKMEQLHKKLWIQAGGDRENIPSIWEAPPSSEPPNNVSTNSEWEAPTQKDKFPKPCNWRKNEFKKWTKLASQGRGIVNFERDKISNHWIQYYRRIPHRKLLTALQLRANVYPTREFLARGRQDQYIKACRHCDADIESCAHIIGNCPVTQDARIKRHNYICELLLEEAKKKDWVVFKEPHIRDSNKELYKPDLIFVKDARALVVDVTVRYEAAKSSLEEAAAEKVRKYKHLETEVRHLTNAKDVTFVGFPLGARGKWHQDNFKLLTELGLSKSRQVKMAETFSTVALFSSVDIVHMFASRARKSMVM

SEQ ID NO: 1542 - protein, 1390 aa, synthetic construct
MASCPKPGPPVSAGAMSLESGLTTHSVLAIERGPNSLANSGSDFGGGGLGLPLRLLRVSVGTQTSRSDWVDLVSWSHPGPTSKSQQVDLVSLFPKHRVDLLSKNDQVDLVAQFLPSKFPPNLAENDLALLVNLEFYRSDLHVYECVHFAAHWEGLSGLPEVYEQLAPQPCVGETLHSSLPRDSELFVPEEGSSEKESEDAPKTSPPTPGKHGLEQTGEEKVMVTVPDKNPPCPCCGTRVNSVLNLIEHLKVSHGKRGVCFRCAKCGKENSNYHSVVCHFKKCRGPETEKAPAGEWICEVCNRDFTTKIGLGQHKRLAHPAVRNQERIVASQPKETSNRGAHKRCWTKEEEELLIRLEAQFEGNKNINKLIAEHITTKTAKQISDKRRLLSRKPAEEPRMEPGTCHHTRRAAASLRTEPEMSHHAQAEDRDNGPGRRPLPGRAAAGGRTMDEIRRHPDKGNGQQRPTKQKSEEQLQAYYKKTLEERLSAGALNTFPRAFKQVMEGRDIKLVINQTAQDYFGCLESISQIRTATRDKKDTVTREKHPKKPFQKWMKKRAIKKGNYLRFQRLFYLDRGKLAKIILDDIECLSCDIPLSEIYSVFKTRWETTGSFKSLGDFKTYGKADNTAFRELITAKEIEKNVQEMSKGSAPGPDGITLGDVVKMDPEFSRTMEIFNLWLTTGKIPDMVRGCRTVLIPKSSDPDRLKDINNWRPITIGSILLRLFSRIVTARLSKACPLNPRQRGFIRAAGCSENLKLLQTIIWSAKREHRPLGVVFVDIAKAFDTVSHQHIIHALQQREVDPHIVGLVSNMYENISTYITTKRNTHTDKIQIRVGVKQGDPMSPLLFNLAMDPLLCKLEESGKGYHRGQSSITAMAFADDLVLLSDSWENMNTNISILETFCNLTGLKTQGQKCHGFYIKPTKKSYTINDCAAWTINGTPLNMIDPGESEKYLGLQFDPWIGIARSGLSTKLDFWLQRIDQAPLKPLQKTDILKTYTIPRLIYIADHSEVKTALLETLDQKIRTAVKEWLHLPPCTCDAILYSSTRDGGLGITKLAGLIPSVQARRLHRIAQSSDDTMKCFMEKEKMEQLHKKLWIQAGGDRENIPSIWEAPPSSEPPNNVSTNSEWEAPTQKDKFPKPCNWRKNEFKKWTKLASQGRGIVNFERDKISNHWIQYYRRIPHRKLLTALQLRANVYPTREFLARGRQDQYIKACRHCDADNESCAHIIGNCPVTQDARIKRHNYICELLLEEAKKKDWVVFKEPHIRDSNKELYKPDLIFVKDARALVVDVTVRYEAAKSSLEEAAAEKVRKYKHLETEVRHLTNAKDVTFVGFPLGARGKWHQDNFKLLTELGLSKSRQVKMAETFSTVALFSSVDIVHMFASRARKSMVM

SEQ ID NO: 1543 - protein, 1390 aa, synthetic construct
MASCPKPGPPVSAGAMSLESGLTTHSVLAIERGPNSLANSGSDFGGGGLGLPLRLLRVSVGTQTSRSDWVDLVSWSHPGPTSKSQQVDLVSLFPKHRVDLLSKNDQVDLVAQFLPSKFPPNLAENDLALLVNLEFYRSDLHVYECVHFAAHWEGLSGLPEVYEQLAPQPCVGETLHSSLPRDSELFVPEEGSSEKESEDAPKTSPPTPGKHGLEQTGEEKVMVTVPDKNPPCPCCGTRVNSVLNLIEHLKVSHGKRGVCFRCAKCGKENSNYHSVVCHFKKCRGPETEKAPAGEWICEVCNRDFTTKIGLGQHKRLWHPAVRNQERIVASQPKETSNRGAHKRCWTKEERELLIRLEAQFEGNKNINKLIAEHITTKTAKQISDKRRLLSRKPAEEPRMEPGTCHHTRRAAASLRTEPEMSHHAQAEDRDNGPGRRPLPGRAAAGGRTMDEIRRHPDKGNGQQRPTKQKSEEQLQAYYKKTLEERLSAGALNTFPRAFKQVMEGRDIKLVINQTAQDCFGCLESISQIRTATRDKKDTVTREKHPKKPFQKWMKKRAIKKGNYLRFQRLFYLDRGKLAKIILDDIECLSCDIPLSEIYSVFKTRWETTGSFKSLGDFKTYGKADNTAFRELITAKEIEKNVQEMSKGSAPGPDGITLGDVVKMDPEFSRTMEIFNLWLTTGKIPDMVRGCRTVLIPKSSKPDRLKDINNWRPITIGSILLRLFSRIVTARLSKACPLNPRQRGFIRAAGCSENLKLLQTIIWSAKREHRPLGVVFVDIAKAFDTVSHQHIIHALQQREVDPHIVGLVSNMYENISTYITTKRNTHTDKIQIRVGVKQGDPMSPLLFNLAMDPLLCKLEESGKGYHRGQSSITAMAFADDLVLLSDSWENMNTNISILETFCNLTGLKTQGQKCHGFYIKPTKKSYTINDCAAWTINGTPLNMIDPGESEKYLGLQFDPWIGIARSGLSTKLDFWLQRIDQAPLKPLQKTDILKTYTIPRLIYIADHSEVKTALLETLDQKIRTAVKEWLHLPPCTCDAILYSSTRDGGLGITKLAGLIPSVQARRLHRIAQSSDDTMKCFMEKEKMEQLHKKLWIQAGGDRENIPSIWEAPPSSEPPNNVSTNSEWEAPTQKDKFPKPCNWRKNEFKKWTKLASQGRGIVNFERDKISNHWIQYYRRIPHRKLLTALQLRANVYPTREFLARGRQDQYIKACRHCDADNESCAHIIGNCPVTQDARIKRHNYICELLLEEAKKKDWVVFKEPHIRDSNKELYKPDLIFVKDARALVVDVTVRYEAAKSSLEEAAAEKVRKYKHLETEVRHLTNAKDVTFVGFPLGARGKWHQDNFKLLTELGLSKSRQVKMAETFSTVALFSSVDIVHMFASRARKSMVM

SEQ ID NO: 1544 - protein, 1390 aa, synthetic construct
MASCPKPGPPVSAGAMSLESGLTTHSVLAIERGPNSLANSGSDFGGGGLGLPLRLLRVSVGTQTSRSDWVDLVSWSHPGPTSKSQQVDLVSLFPKHRVDLLSKNDQVDLVAQFLPSKFPPNLAENDLALLVNLEFYRSDLHVYECVHFAAHWEGLSGLPEVYEQLAPQPCVGETLHSSLPRDSELFVPEEGSSEKESEDAPKTSPPTPGKHGLEQTGEEKVMVTVPDKNPPCPCCGTRVNSVLNLIEHLKVSHGKRGVCFRCAKCGKENSNYHSVVCHFKKCRGPETEKAPAGEWICEVCNRDFTTKIGLGQHKRLWHPAVRNQERIVASQPKETSNRGAHKRCWTKEERELLIRLEAQFEGNKNINKLIAEHITTKTAKQISDKRRLLSRKPAEEPRMMPGTCHHTRRAAASLRTEPEMSHHAQAEDRDNGPGRRPLPGRAAAGGRTMDEIRRHPDKGNGQQRPTKQKSEEQLQAYYKKTLEERLSAGALNTFPRAFKQVMEGRDIKLVINQTAQDCFGCLESISQIRTATRDKKDTVTREKHPKKPFQKWMKKRAIKKGNYLRFQRLFYLDRGKLAKIILDDIECLSCDIPLSEIYSVFKTRWETTGSFKSLGDFKTYGKADNTAFRELITAKEIEKNVQEMSKGSAPGPDGITLGDVVKMDPEFSRTMEIFNLWLTTGKIPDMVRGCRTVLIPKSSKPDRLKDINNWRPITIGSILLRLFSRIVTARLSKACPLNPRQRGFIRAAGCSENLKLLQTIIWSAKREHRPLGVVFVDIAKAFDTVSHQHIIHALQQREVDPHIVGLVSNMYENISTYITTKRNTHTDKIQIRVGVKQGDPMSPLLFNLAMDPLLCKLEESGKGYHRGQSSITAMAFADDLVLLSDSWENMNTNISILETFCNLTGLKTQGQKCHGFYIKPTKKSYTINDCAAWTINGTPLNMIDPGESEKYLGLQFDPWIGIARSGLSTKLDFWLQRIDQAPLKPLQKTDILKTYTIPRLIYIADHSEVKTALLETLDQKIRTAVKEWLHLPPCTCDAILYSSTRDGGLGITKLAGLIPSVQARRLHRIAQSSDDTMKCFMEKEKMEQLHKKLWIQAGGDRENIPSIWEAPPSSEPPNNVSTNSEWEAPTQKDKFPKPCNWRKNEFKKWTKLASQGRGIVNFERDKISNHWIQYYRRIPHRKLLTALQLRANVYPTREFLARGRQDQYIKACRHCDADNESCAHIIGNCPVTQDARIKRHNYICELLLEEAKKKDWVVFKEPHIRDSNKELYKPDLIFVKDARALVVDVTVRYEAAKSSLEEAAAEKVRKYKHLETEVRHLTNAKDVTFVGFPLGARGKWHQDNFKLLTELGLSKSRQVKMAETFSTVALFSSVDIVHMFASRARKSMVM

SEQ ID NO: 1545 - protein, 1390 aa, synthetic construct
MASCPKPGPPVSAGAMSLESGLTTHSVLAIERGPNSLANSGSDFGGGGLGLPLRLLRVSVGTQTSRSDWVDLVSWSHPGPTSKSQQVDLVSLFPKHRVDLLSKNDQVDLVAQFLPSKFPPNLAENDLALLVNLEFYRSDLHVYECVHFAAHWEGLSGLPEVYEQLAPQPCVGETLHSSLPRDSELFVPEEGSSEKESEDAPKTSPPTPGKHGLEQTGEEKVMVTVPDKNPPCPCCGTRVNSVLNLIEHLKVSHGKRGVCFRCAKCGKENSNYHSVVCHFKKCRGPETEKAPAGEWICEVCNRDFTTKIGLGQHKRLWHPAVRNQERIVASQPKETSNRGAHKRCWTKEERELLIRLEAQFEGNKNINKLIAEHITTKTAKQISDKRRLLSRKPAEEPRMMPGTCHHTRRAAASLRTEPEMSHHAQAEDRDNGPGRRPLPGRAAAGGRTMDEIRRHPDKGNGQQRPTKQKSEEQLQAYYKKTLEERLSAGALNTFPRAFKQVMEGRDIKLVINQTAQDCFGCLESISQIRTATRDKKDTVTREKHPKKPFQKWMKKRAIKKGNYLRFQRLFYLDRGKLAKIILDDIECLSCDIPLSEIYSVFKTRWETTGSFKSLGDFKTYGKADNTAFRELITAKEIEKNVQEMSKGSAPGPDGITLGDVVKMDPEGSRTMEIFNLWLTTGKIPDMVRGCRTVLIPKSSKPDRLKDINNWRPITIGSILLRLFSRIVTARLSKACPLNPRQRGFIRAAGCSENLKLLQTIIWSAKREHRPLGVVFVDIAKAFDTVSHQHIIHALQQREVDPHIVGLVSNMYENISTYITTKRNTHTDKIQIRVGVKQGDPMSPLLFNLAMDPLLCKLEESGKGYHRGQSSITAMAFADDLVLLSDSWENMNTNISILETFCNLTGLKTQGQKCHGFYIKPTKKSYTINDCAAWTINGTPLNMIDPGESEKYLGLQFDPWIGIARSGLSTKLDFWLQRIDQAPLKPLQKTDILKTYTIPRLIYIADHSEVKTALLETLDQKIRTAVKEWLHLPPCTCDAILYSSTRDGGLGITKLAGLIPSVQARRLHRIAQSSDDTMKCFMEKEKMEQLHKKLWIQAGGDRENIPSIWEAPPSSEPPNNVSTNSEWEAPTQKDKFPKPCNWRKNEFKKWTKLASQGRGIVNFERDKISNHWIQYYRRIPHRKLLTALQLRANVYPTREFLARGRQDQYIKACRHCDADNESCAHIIGNCPVTQDARIKRHNYICELLLEEAKKKDWVVFKEPHIRDSNKELYKPDLIFVKDARALVVDVTVRYEAAKSSLEEAAAEKVRKYKHLETEVRHLTNAKDVTFVGFPLGARGKWHQDNFKLLTELGLSKSRQVKMAETFSTVALFSSVDIVHMFASRARKSMVM

SEQ ID NO: 1546 - protein, 1390 aa, synthetic construct
MASCPKPGPPVSAGAMSLESGLTTHSVLAIERGPNSLANSGSDFGGGGLGLPLRLLRVSVGTQTSRSDWVDLVSWSHPGPTSKSQQVDLVSLFPKHRVDLLSKNDQVDLVAQFLPSKFPPNLAENDLALLVNLEFYRSDLHVYECVHFAAHWEGLSGLPEVYEQLAPQPCVGETLHSSLPRDSELFVPEEGSSEKESEDAPKTSPPTPGKHGLEQTGEEKVMVTVPDKNPPCPCCGTRVNSVLNLIEHLKVSHGKRGVCFRCAKCGKENSNYHSVVCHFKKCRGPETEKAPAGEWICEVCNRDFTTKIGLGQHKRLWHPAVRNQERIVASQPKETSNRGAHKRCWTKEERELLIRLEAQFEGNKNINKLIAEHITTKTAKQISDKRRLLSRKPAEEPRMMPGTCHHTRRAAASLRTEPEMSHHAQAEDRDNGPGRRPLPGRAAAGGRTMDEIRRHPDKGNGQQRPTKQKSEEQLQAYYKKTLEERLSAGALNTFPRAFKQVMEGRDIKLVINQTAQDCFGCLESISQIRTATRDKKDTVTREKHPKKPFQKWMKKRAIKKGNYLRFQRLFYLDRGKLAKIILDDIECLSCDIPLSEIYSVFKTRWETTGSFKSLGDFKTYGKADNTAFRELITAKEIEKNVQEMSKGSAPGPDGITLGDVVKMDPEFSRTMEIFNLWLTTGKIPDMVRGCRTVLIPKSSDPDRLKDINNWRPITIGSILLRLFSRIVTARLSKACPLNPRQRGFIRAAGCSENLKLLQTIIWSAKREHRPLGVVFVDIAKAFDTVSHQHIIHALQQREVDPHIVGLVSNMYENISTYITTKRNTHTDKIQIRVGVKQGDPMSPLLFNLAMDPLLCKLEESGKGYHRGQSSITAMAFADDLVLLSDSWENMNTNISILETFCNLTGLKTQGQKCHGFYIKPTKKSYTINDCAAWTINGTPLNMIDPGESEKYLGLQFDPWIGIARSGLSTKLDFWLQRIDQAPLKPLQKTDILKTYTIPRLIYIADHSEVKTALLETLDQKIRTAVKEWLHLPPCTCDAILYSSTRDGGLGITKLAGLIPSVQARRLHRIAQSSDDTMKCFMEKEKMEQLHKKLWIQAGGDRENIPSIWEAPPSSEPPNNVSTNSEWEAPTQKDKFPKPCNWRKNEFKKWTKLASQGRGIVNFERDKISNHWIQYYRRIPHRKLLTALQLRANVYPTREFLARGRQDQYIKACRHCDADNESCAHIIGNCPVTQDARIKRHNYICELLLEEAKKKDWVVFKEPHIRDSNKELYKPDLIFVKDARALVVDVTVRYEAAKSSLEEAAAEKVRKYKHLETEVRHLTNAKDVTFVGFPLGARGKWHQDNFKLLTELGLSKSRQVKMAETFSTVALFSSVDIVHMFASRARKSMVM

SEQ ID NO: 1547 - skipped

SEQ ID NO: 1548 - protein, 1390 aa, synthetic construct
MASCPKPGPPVSAGAMSLESGLTTHSVLAIERGPNSLANSGSDFGGGGLGLPLRLLRVSVGTQTSRSDWVDLVSWSHPGPTSKSQQVDLVSLFPKHRVDLLSKNDQVDLVAQFLPSKFPPNLAENDLALLVNLEFYRSDLHVYECVHFAAHWEGLSGLPEVYEQLAPQPCVGETLHSSLPRDSELFVPEEGSSEKESEDAPKTSPPTPGKHGLEQTGEEKVMVTVPDKNPPCPCCGTRVNSVLNLIEHLKVSHGKRGVCFRCAKCGKENSNYHSVVCHFPKCRGPETEKAPAGEWICEVCNRDFTTKIGLGQHKRLAHPAVRNQERIVASQPKETSNRGAHKRCWTKEEEELLIRLEAQFEGNKNINKLIAEHITTKTAKQISDKRRLLSRKPAEEPREEPGTCHHTRRAAASLRTEPEMSHHAQAEDRDNGPGRRPLPGRAAAGGRTMDEIRRHPDKGNGQQRPTKQKSEEQLQAYYKKTLEERLSAGALNTFPRAFKQVMEGRDIKLVINQTAQDCFGCLESISQIRTATRDKKDTVTRKKHPKKPFQKWMKKRAIKKGNYLRFQRLFYLDRGKLAKIILDDIECLSCDIPLSEIYSVFKTRWETTGSFKSLGDFKTYGKADNTAFRELITAKEIEKNVQEMSKGSAPGPDGITLGDVVKMDPEFSRTMEIFNLWLTTGKIPDMVRGCRTVLIPKSSKPDRLKDINNWRPITIGSILLRLFSRIVTARLSKACPLNPRQRGFIRAAGCSENLKLLQTIIWSAKREHRPLGVVFVDIAKAFDTVSHQHIIHALQQREVDPHIVGLVSNMYENISTYITTKRNTHTDKIQIRVGVKQGDPMSPLLFNLAMDPLLCKLEESGKGYHRGQSSITAMAFADDLVLLSDSWEGMNTNISILETFCNLTGLKTQGQKCHGFYIKPTKKSYTINDCAAWTINGTPLNMIDPGESEKYLGLQFDPWIGIARSGLSTKLDFWLQRIDQAPLKPLQKTDILKTYTIPRLIYIADHSEVKTALLETLDQKIRTAVKEWLHLPPCTCDAILYSSTRDGGLGITKLAGLIPSVQARRLHRIAQSSDDTMKCFMEKEKMEQLHKKLWIQAGGDRENIPSIWEAPPSSEPPNNVSTNSEWEAPTQKDKFPKPCNWRKNEFKKWTKLASQGRGIVNFERDKISNHWIQYYRRIPHRKLLTALQLRANVYPTREFLARGRQDQYIKACRHCDADIESCAHIIGNCPVTQDARIKRHNYICELLLEEAKKKDWVVFKEPHIRDSNKELYKPDLIFVKDARALVVDVTVRYEAAKSSLEEAAAEKVRKYKHLETEVRHLTNAKDVTFVGFPLGARGKWHQDNFKLLTELGLSKSRQVKMAETFSTVALFSSVDIVHMFASRARKSMVM

SEQ ID NO: 1549 - protein, 1390 aa, synthetic construct
MASCPKPGPPVSAGAMSLESGLTTHSVLAIERGPNSLANSGSDFGGGGLGLPLRLLRVSVGTQTSRSDWVDLVSWSHPGPTSKSQQVDLVSLFPKHRVDLLSKNDQVDLVAQFLPSKFPPNLAENDLALLVNLEFYRSDLHVYECVHFAAHWEGLSGLPEVYEQLAPQPCVGETLHSSLPRDSELFVPEEGSSEKESEDAPKTSPPTPGKHGLEQTGEEKVMVTVPDKNPPCPCCGTRVNSVLNLIEHLKVSHGKRGVCFRCAKCGKENSNYHSVVCHFPKCRGPETEKAPAGEWICEVCNRDFTTKIGLGQHKRLAHPAVRNQERIVASQPKETSNRGAHKRCWTKEEEELLIRLEAQFEGNKNINKLIAEHITTKTAKQISDKRRLLSRKPAEEPREEPGTCHHTRRAAASLRTEPEMSHHAQAEDRDNGPGRRPLPGRAAAGGRTMDEIRRHPDKGNGQQRPTKQKSEEQLQAYYKKTLEERLSAGALNTFPRAFKQVMEGRDIKLVINQTAQDCFGCLESISQIRTATRDKKDTVTRKKHPKKPFQKWMKKRAIKKGNYLRFQRLFYLDRGKLAKIILDDIECLSCDIPLSEIYSVFKTRWETTGSFKSLGDFKTYGKADNTAFRELITAKEIEKNVQEMSKGSAPGPDGITLGDVVKMDPEGSRTMEIFNLWLTTGKIPDMVRGCRTVLIPKSSKPDRLKDINNWRPITIGSILLRLFSRIVTARLSKACPLNPRQRGFIRAAGCSENLKLLQTIIWSAKREHRPLGVVFVDIAKAFDTVSHQHIIHALQQREVDPHIVGLVSNMYENISTYITTKRNTHTDKIQIRVGVKQGDPMSPLLFNLAMDPLLCKLEESGKGYHRGQSSITAMAFADDLVLLSDSWENMNTNISILETFCNLTGLKTQGQKCHGFYIKPTKKSYTINDCAAWTINGTPLNMIDPGESEKYLGLQFDPWIGIARSGLSTKLDFWLQRIDQAPLKPLQKTDILKTYTIPRLIYIADHSEVKTALLETLDQKIRTAVKEWLHLPPCTCDAILYSSTRDGGLGITKLAGLIPSVQARRLHRIAQSSDDTMKCFMEKEKMEQLHKKLWIQAGGDRENIPSIWEAPPSSEPPNNVSTNSEWEAPTQKDKFPKPCNWRKNEFKKWTKLASQGRGIVNFERDKISNHWIQYYRRIPHRKLLTALQLRANVYPTREFLARGRQDQYIKACRHCDADIESCAHIIGNCPVTQDARIKRHNYICELLLEEAKKKDWVVFKEPHIRDSNKELYKPDLIFVKDARALVVDVTVRYEAAKSSLEEAAAEKVRKYKHLETEVRHLTNAKDVTFVGFPLGARGKWHQDNFKLLTELGLSKSRQVKMAETFSTVALFSSVDIVHMFASRARKSMVM

SEQ ID NO: 1550 - protein, 1390 aa, synthetic construct
MASCPKPGPPVSAGAMSLESGLTTHSVLAIERGPNSLANSGSDFGGGGLGLPLRLLRVSVGTQTSRSDWVDLVSWSHPGPTSKSQQVDLVSLFPKHRVDLLSKNDQVDLVAQFLPSKFPPNLAENDLALLVNLEFYRSDLHVYECVHFAAHWEGLSGLPEVYEQLAPQPCVGETLHSSLPRDSELFVPEEGSSEKESEDAPKTSPPTPGKHGLEQTGEEKVMVTVPDKNPPCPCCGTRVNSVLNLIEHLKVSHGKRGVCFRCAKCGKENSNYHSVVCHFPKCRGPETEKAPAGEWICEVCNRDFTTKIGLGQHKRLAHPAVRNQERIVASQPKETSNRGAHKRCWTKEEEELLIRLEAQFEGNKNINKLIAEHITTKTAKQISDKRRLLSRKPAEEPREEPGTCHHTRRAAASLRTEPEMSHHAQAEDRDNGPGRRPLPGRAAAGGRTMDEIRRHPDKGNGQQRPTKQKSEEQLQAYYKKTLEERLSAGALNTFPRAFKQVMEGRDIKLVINQTAQDCFGCLESISQIRTATRDKKDTVTRKKHPKKPFQKWMKKRAIKKGNYLRFQRLFYLDRGKLAKIILDDIECLSCDIPLSEIYSVFKTRWETTGSFKSLGDFKTYGKADNTAFRELITAKEIEKNVQEMSKGSAPGPDGITLGDVVKMDPEFSRTMEIFNLWLTTGKIPDMVRGCRTVLIPKSSKPDRLKDINNWRPITIGSILLRLFSRIVTARLSKACPLNPRQRGFIRAAGCSENLKLLQTIIWSAKREHRPLGVVFVDIAKAFDTVSHQHIIHALQQREVDPHIVGLVSNMYENISTYITTKRNTHTDKIQIRVGVKQGDPMSPLLFNLAMDPLLCKLEESGKGYHRGQSSITAMAFADDLVLLSDSWEGMNTNISILETFCNLTGLKTQGQKCHGFYIKPTKKSYTINDCAAWTINGTPLNMIDPGESEKYLGLQFDPWIGIARSGLSTKLDFWLQRIDQAPLKPLQKLDILKTYTIPRLIYIADHSEVKTALLETLDQKIRTAVKEWLHLPPCTCDAILYSSTRDGGLGITKLAGLIPSVQARRLHRIAQSSDDTMKCFMEKEKMEQLHKKLWIQAGGDRENIPSIWEAPPSSEPPNNVSTNSEWEAPTQKDKFPKPCNWRKNEFKKWTKLASQGRGIVNFERDKISNHWIQYYRRIPHRKLLTALQLRANVYPTREFLARGRQDQYIKACRHCDADIESCAHIIGNCPVTQDARIKRHNYICELLLEEAKKKDWVVFKEPHIRDSNKELYKPDLIFVKDARALVVDVTVRYEAAKSSLEEAAAEKVRKYKHLETEVRHLTNAKDVTFVGFPLGARGKWHQDNFKLLTELGLSKSRQVKMAETFSTVALFSSVDIVHMFASRARKSMVM

SEQ ID NO: 1551 - protein, 1390 aa, synthetic construct
MASCPKPGPPVSAGAMSLESGLTTHSVLAIERGPNSLANSGSDFGGGGLGLPLRLLRVSVGTQTSRSDWVDLVSWSHPGPTSKSQQVDLVSLFPKHRVDLLSKNDQVDLVAQFLPSKFPPNLAENDLALLVNLEFYRSDLHVYECVHFAAHWEGLSGLPEVYEQLAPQPCVGETLHSSLPRDSELFVPEEGSSEKESEDAPKTSPPTPGKHGLEQTGEEKVMVTVPDKNPPCPCCGTRVNSVLNLIEHLKVSHGKRGVCFRCAKCGKENSNYHSVVCHFPKCRGPETEKAPAGEWICEVCNRDFTTKIGLGQHKRLAHPAVRNQERIVASQPKETSNRGAHKRCWTKEEEELLIRLEAQFEGNKNINKLIAEHITTKTAKQISDKRRLLSRKPAEEPREEPGTCHHTRRAAASLRTEPEMSHHAQAEDRDNGPGRRPLPGRAAAGGRTMDEIRRHPDKGNGQQRPTKQKSEEQLQAYYKKTLEERLSAGALNTFPRAFKQVMEGRDIKLVINQTAQDCFGCLESISQIRTATRDKKDTVTRKKHPKKPFQKWMKKRAIKKGNYLRFQRLFYLDRGKLAKIILDDIECLSCDIPLSEIYSVFKTRWETTGSFKSLGDFKTYGKADNTAFRELITAKEIEKNVQEMSKGSAPGPDGITLGDVVKMDPEGSRTMEIFNLWLTTGKIPDMVRGCRTVLIPKSSKPDRLKDINNWRPITIGSILLRLFSRIVTARLSKACPLNPRQRGFIRAAGCSENLKLLQTIIWSAKREHRPLGVVFVDIAKAFDTVSHQHIIHALQQREVDPHIVGLVSNMYENISTYITTKRNTHTDKIQIRVGVKQGDPMSPLLFNLAMDPLLCKLEESGKGYHRGQSSITAMAFADDLVLLSDSWENMNTNISILETFCNLTGLKTQGQKCHGFYIKPTKKSYTINDCAAWTINGTPLNMIDPGESEKYLGLQFDPWIGIARSGLSTKLDFWLQRIDQAPLKPLQKLDILKTYTIPRLIYIADHSEVKTALLETLDQKIRTAVKEWLHLPPCTCDAILYSSTRDGGLGITKLAGLIPSVQARRLHRIAQSSDDTMKCFMEKEKMEQLHKKLWIQAGGDRENIPSIWEAPPSSEPPNNVSTNSEWEAPTQKDKFPKPCNWRKNEFKKWTKLASQGRGIVNFERDKISNHWIQYYRRIPHRKLLTALQLRANVYPTREFLARGRQDQYIKACRHCDADIESCAHIIGNCPVTQDARIKRHNYICELLLEEAKKKDWVVFKEPHIRDSNKELYKPDLIFVKDARALVVDVTVRYEAAKSSLEEAAAEKVRKYKHLETEVRHLTNAKDVTFVGFPLGARGKWHQDNFKLLTELGLSKSRQVKMAETFSTVALFSSVDIVHMFASRARKSMVM

SEQ ID NO: 1552 - protein, 1390 aa, synthetic construct
MASCPKPGPPVSAGAMSLESGLTTHSVLAIERGPNSLANSGSDFGGGGLGLPLRLLRVSVGTQTSRSDWVDLVSWSHPGPTSKSQQVDLVSLFPKHRVDLLSKNDQVDLVAQFLPSKFPPNLAENDLALLVNLEFYRSDLHVYECVHFAAHWEGLSGLPEVYEQLAPQPCVGETLHSSLPRDSELFVPEEGSSEKESEDAPKTSPPTPGKHGLEQTGEEKVMVTVPDKNPPCPCCGTRVNSVLNLIEHLKVSHGKRGVCFRCAKCGKENSNYHSVVCHFPKCRGPETEKAPAGEWICEVCNRDFTTKIGLGQHKRLAHPAVRNQERIVASQPKETSNRGAHKRCWTKEEEELLIRLEAQFEGNKNINKLIAEHITTKTAKQISDKRRLLSRKPAEEPREEPGTCHHTRRAAASLRTEPEMSHHAQAEDRDNGPGRRPLPGRAAAGGRTMDEIRRHPDKGNGQQRPTKQKSEEQLQAYYKKTLEERLSAGALNTFPRAFKQVMEGRDIKLVINQTAQDCFGCLESISQIRTATRDKKDTVTREKHPKKPFQKWMKKRAIKKGNYLRFQRLFYLDRGKLAKIILDDIECLSCDIPLSEIYSVFKTRWETTGSFKSLGDFKTYGKADNTAFRELITAKEIEKNVQEMSKGSAPGPDGITLGDVVKMDPEFSRTMEIFNLWLTTGKIPDMVRGCRTVLIPKSSKPDRLKDINNWRPITIGSILLRLFSRIVTARLSKACPLNPRQRGFIRAAGCSENLKLLQTIIWSAKREHRPLGVVFVDIAKAFDTVSHQHIIHALQQREVDPHIVGLVSNMYENISTYITTKRNTHTDKIQIRVGVKQGDPMSPLLFNLAMDPLLCKLEESGKGYHRGQSSITAMAFADDLVLLSDSWEGMNTNISILETFCNLTGLKTQGQKCHGFYIKPTKKSYTINDCAAWTINGTPLNMIDPGESEKYLGLQFDPWIGIARSGLSTKLDFWLQRIDQAPLKPLQKLDILKTYTIPRLIYIADHSEVKTALLETLDQKIRTAVKEWLHLPPCTCDAILYSSTRDGGLGITKLAGLIPSVQARRLHRIAQSSDDTMKCFMEKEKMEQLHKKLWIQAGGDRENIPSIWEAPPSSEPPNNVSTNSEWEAPTQKDKFPKPCNWRKNEFKKWTKLASQGRGIVNFERDKISNHWIQYYRRIPHRKLLTALQLRANVYPTREFLARGRQDQYIKACRHCDADIESCAHIIGNCPVTQDARIKRHNYICELLLEEAKKKDWVVFKEPHIRDSNKELYKPDLIFVKDARALVVDVTVRYEAAKSSLEEAAAEKVRKYKHLETEVRHLTNAKDVTFVGFPLGARGKWHQDNFKLLTELGLSKSRQVKMAETFSTVALFSSVDIVHMFASRARKSMVM

SEQ ID NO: 1553-1554 - skipped (2 entries)

SEQ ID NO: 1555 - protein, 1453 aa, synthetic construct
MASCPKPGPPVSAGAMSLESGLTTHSVLAIERGPNSLANSGSDFGGGGLGLPLRLLRVSVGTQTSRSDWVDLVSWSHPGPTSKSQQVDLVSLFPKHRVDLLSKNDQVDLVAQFLPSKFPPNLAENDLALLVNLEFYRSDLHVYECVHFAAHWEGLSGLPEVYEQLAPQPCVGETLHSSLPRDSELFVPEEGSSEKESEDAPKTSPPTPGKHGLEQTGEEKVMVTVPDKNPPCPCCGTRVNSVLNLIEHLKVSHGKRGVCFRCAKCGKENSNYHSVVCHFPKCRGPETEKAPAGEWICEVCNRDFTTKIGLGQHKRLAHPAVRNQERIVASQPKETSNRGAHKRCWTKEEEELLIRLEAQFEGNKNINKLIAEHITTKTAKQISDKRRLLSRKPAEEPREEPGTCHHTRRAAASLRTEPEMSHHAQAEDRDNGPGRRPLPGRAAAGGRTMDEIRRHPDKGNGQQRPTKQKSEEQLQAYYKKTLEERLSAGALNTFPRAFKQVMEGRDIKLVINQTAQDCFGCLESISQIRTATRDKKDTVTREKHPKKPFQKWMKDRAIKKGNYLRFQRLFYLDRGKLAKIILDDIECLSCDIPLSEIYSVFKTRWETTGSFKSLGDFKTYGKADNTAFRELITAKEIEKNVQEMSKGSAPGPDGITLGDVVKMDPEFSRTMEIFNLWLTTGKIPDMVRGCRTVLIPKSSKPDRLKDINNWRPITIGSILLRLFSRIVTARLSKACPLNPRQRGFIRAAGCSENLKLLQTIIWSAKREHRPLGVVFVDIAKAFDTVSHQHIIHALQQREVDPHIVGLVSNMYENISTYITTKRNTHTDKIQIRVGVKQGDPMSPLLFNLAMDPLLCKLEESGKGYHRGQSSITAMAFADDLVLLSDSWENMNTNISILETFCNLTGLKTQGQKCHGFYIKPTKDSYTINDCAAWTINGTPLNMIDPGESEKYLGLQFDPWIGIARSGLSTKLDFWLQRIDQAPLKPLQKTDILKTYTIPRLIYIADHSEVKTALLETLDQKIRTAVKEWLHLPPCTCDAILYSSTRDGGLGITKLAGLIPSVQARRLHRIAQSSDDTMKCFMEKEKMEQLHKKLWIQAGGDRENIPSIWEAPPSSEPPNNVSTNSEWEAPTQKDKFPKPCNWRKNEFKKWTKLASQGRGIVNFERDKISNHWIQYYRRIPHRKLLTALQLRANVYPTREFLARGRQDQYIKACRHCDADIESCAHIIGNCPVTQDARIKRHNYICELLLEEAKKKDWVVFKEPHIRDSNKELYKPDLIFVKDARALVVDVTVRYEAAKSSLEEAAAEKVRKYKHLETEVRHLTNAKDVTFVGFPLGARGKWHQDNFKLLTELGLSKSRQVKMAETFSTVALFSSVDIVHMFASRARKSMVMSGSETPGTSESATPEGSRKRRQTSMTDFYHSKRRLIFSKRKPGGSGKRTADGSEFEPKKKRKV

SEQ ID NO: 1556 - protein, 1390 aa, synthetic construct
MASCPKPGPPVSAGAMSLESGLTTHSVLAIERGPNSLANSGSDFGGGGLGLPLRLLRVSVGTQTSRSDWVDLVSWSHPGPTSKSQQVDLVSLFPKHRVDLLSKNDQVDLVAQFLPSKFPPNLAENDLALLVNLEFYRSDLHVYECVHFAAHWEGLSGLPEVYEQLAPQPCVGETLHSSLPRDSELFVPEEGSSEKESEDAPKTSPPTPGKHGLEQTGEEKVMVTVPDKNPPCPCCGTRVNSVLNLIEHLKVSHGKRGVCFRCAKCGKENSNYHSVVCHFKKCRGPETEKAPAGEWICEVCNRDFTTKIGLGQHKRLAHPAVRNQERIVASQPKETSNRGAHKRCWTKEEEELLIRLEAQFEGNKNINKLIAEHITTKTAKQISDKRRLLSRKPAEEPREEPGTCHHTRRAAASLRTEPEMSHHAQAEDRDNGPGRRPLPGRAAAGGRTMDEIRRHPDKGNGQQRPTKQKSEEQLQAYYKKTLEERLSAGALNTFPRAFKQVMEGRDIKLVINQTAQDYFGCLESISQIRTATRDKKDTVTREKHPKKPFQKWMKKRAIKKGNYLRFQRLFYLDRGKLAKIILDDIECLSCDIPLSEIYSVFKTRWETTGSFKSLGDFKTYGKADNTAFRELITAKEIEKNVQEMSKGSAPGPDGITLGDVVKMDPEGSRTMEIFNLWLTTGKIPDMVRGCRTVLIPKSSDPDRLKDINNWRPITIGSILLRLFSRIVTARLSKACPLNPRQRGFIRAAGCSENLKLLQTIIWSAKREHRPLGVVFVDIAKAFDTVSHQHIIHALQQREVDPHIVGLVSNMYENISTYITTKRNTHTDKIQIRVGVKQGDPMSPLLFNLAMDPLLCKLEESGKGYHRGQSSITAMAFADDLVLLSDSWEGMNTNISILETFCNLTGLKTQGQKCHGFYIKPTKKSYTINDCAAWTINGTPLNMIDPGESEKYLGLQFDPWIGIARSGLSTKLDFWLQRIDQAPLKPLQKTDILKTYTIPRLIYIADHSEVKTALLETLDQKIRTAVKEWLHLPPCTCDAILYSSTRDGGLGITKLAGLIPSVQARRLHRIAQSSDDTMKCFMEKEKMEQLHKKLWIQAGGDRENIPSIWEAPPSSEPPNNVSTNSEWEAPTQKDKFPKPCNWRKNEFKKWTKLASQGRGIVNFERDKISNHWIQYYRRIPHRKLLTALQLRANVYPTREFLARGRQDQYIKACRHCDADIESCAHIIGNCPVTQDARIKRHNKICELLLEEAKKKDWVVFKEPHIRDSNKELYKPDLIFVKDARALVVDVTVRYEAAKSSLEEAAAEKVRKYKHLETEVRHLTNAKDVTFVGFPLGARGKWHQDNFKLLTELGLSKSRQVKMAETFSTVALFSSVDIVHMFASRARKSMVM

SEQ ID NO: 1557 - protein, 1390 aa, synthetic construct
MASCPKPGPPVSAGAMSLESGLTTHSVLAIERGPNSLANSGSDFGGGGLGLPLRLLRVSVGTQTSRSDWVDLVSWSHPGPTSKSQQVDLVSLFPKHRVDLLSKNDQVDLVAQFLPSKFPPNLAENDLALLVNLEFYRSDLHVYECVHFAAHWEGLSGLPEVYEQLAPQPCVGETLHSSLPRDSELFVPEEGSSEKESEDAPKTSPPTPGKHGLEQTGEEKVMVTVPDKNPPCPCCGTRVNSVLNLIEHLKVSHGKRGVCFRCAKCGKENSNYHSVVCHFKKCRGPETEKAPAGEWICEVCNRDFTTKIGLGQHKRLAHPAVRNQERIVASQPKETSNRGAHKRCWTKEEEELLIRLEAQFEGNKNINKLIAEHITTKTAKQISDKRRLLSRKPAEEPREEPGTCHHTRRAAASLRTEPEMSHHAQAEDRDNGPGRRPLPGRAAAGGRTMDEIRRHPDKGNGQQRPTKQKSEEQLQAYYKKTLEERLSAGALNTFPRAFKQVMEGRDIKLVINQTAQDYFGCLESISQIRTATRDKKDTVTRKKHPKKPFQKWMKKRAIKKGNYLRFQRLFYLDRGKLAKIILDDIECLSCDIPLSEIYSVFKTRWETTGSFKSLGDFKTYGKADNTAFRELITAKEIEKNVQEMSKGSAPGPDGITLGDVVKMDPEGSRTMEIFNLWLTTGKIPDMVRGCRTVLIPKSSDPDRLKDINNWRPITIGSILLRLFSRIVTARLSKACPLNPRQRGFIRAAGCSENLKLLQTIIWSAKREHRPLGVVFVDIAKAFDTVSHQHIIHALQQREVDPHIVGLVSNMYENISTYITTKRNTHTDKIQIRVGVKQGDPMSPLLFNLAMDPLLCKLEESGKGYHRGQSSITAMAFADDLVLLSDSWENMNTNISILETFCNLTGLKTQGQKCHGFYIKPTKDSYTINDCAAWTINGTPLNMIDPGESEKYLGLQFDPWIGIARSGLSTKLDFWLQRIDQAPLKPLQKLDILKTYTIPRLIYIADHSEVKTALLETLDQKIRTAVKEWLHLPPCTCDAILYSSTRDGGLGITKLAGLIPSVQARRLHRIAQSSDDTMKCFMEKEKMEQLHKKLWIQAGGDRENIPSIWEAPPSSEPPNNVSTNSEWEAPTQKDKFPKPCNWRKNEFKKWTKLASQGRGIVNFERDKISNHWIQYYRRIPHRKLLTALQLRANVYPTREFLARGRQDQYIKACRHCDADIESCAHIIGNCPVTQDARIKRHNKICELLLEEAKKKDWVVFKEPHIRDSNKELYKPDLIFVKDARALVVDVTVRYEAAKSSLEEAAAEKVRKYKHLETEVRHLTNAKDVTFVGFPLGARGKWHQDNFKLLTELGLSKSRQVKMAETFSTVALFSSVDIVHMFASRARKSMVM

SEQ ID NO: 1558 - protein, 1390 aa, synthetic construct
MASCPKPGPPVSAGAMSLESGLTTHSVLAIERGPNSLANSGSDFGGGGLGLPLRLLRVSVGTQTSRSDWVDLVSWSHPGPTSKSQQVDLVSLFPKHRVDLLSKNDQVDLVAQFLPSKFPPNLAENDLALLVNLEFYRSDLHVYECVHFAAHWEGLSGLPEVYEQLAPQPCVGETLHSSLPRDSELFVPEEGSSEKESEDAPKTSPPTPGKHGLEQTGEEKVMVTVPDKNPPCPCCGTRVNSVLNLIEHLKVSHGKRGVCFRCAKCGKENSNYHSVVCHFKKCRGPETEKAPAGEWICEVCNRDFTTKIGLGQHKRLAHPAVRNQERIVASQPKETSNRGAHKRCWTKEEEELLIRLEAQFEGNKNINKLIAEHITTKTAKQISDKRRLLSRKPAEEPREEPGTCHHTRRAAASLRTEPEMSHHAQAEDRDNGPGRRPLPGRAAAGGRTMDEIRRHPDKGNGQQRPTKQKSEEQLQAYYKKTLEERLSAGALNTFPRAFKQVMEGRDIKLVINQTAQDYFGCLESISQIRTATRDKKDTVTREKHPKKPFQKWMKDRAIKKGNYLRFQRLFYLDRGKLAKIILDDIECLSCDIPLSEIYSVFKTRWETTGSFKSLGDFKTYGKADNTAFRELITAKEIEKNVQEMSKGSAPGPDGITLGDVVKMDPEGSRTMEIFNLWLTTGKIPDMVRGCRTVLIPKSSDPDRLKDINNWRPITIGSILLRLFSRIVTARLSKACPLNPRQRGFIRAAGCSENLKLLQTIIWSAKREHRPLGVVFVDIAKAFDTVSHQHIIHALQQREVDPHIVGLVSNMYENISTYITTKRNTHTDKIQIRVGVKQGDPMSPLLFNLAMDPLLCKLEESGKGYHRGQSSITAMAFADDLVLLSDSWEGMNTNISILETFCNLTGLKTQGQKCHGFYIKPTKKSYTINDCAAWTINGTPLNMIDPGESEKYLGLQFDPWIGIARSGLSTKLDFWLQRIDQAPLKPLQKLDILKTYTIPRLIYIADHSEVKTALLETLDQKIRTAVKEWLHLPPCTCDAILYSSTRDGGLGITKLAGLIPSVQARRLHRIAQSSDDTMKCFMEKEKMEQLHKKLWIQAGGDRENIPSIWEAPPSSEPPNNVSTNSEWEAPTQKDKFPKPCNWRKNEFKKWTKLASQGRGIVNFERDKISNHWIQYYRRIPHRKLLTALQLRANVYPTREFLARGRQDQYIKACRHCDADIESCAHIIGNCPVTQDARIKRHNKICELLLEEAKKKDWVVFKEPHIRDSNKELYKPDLIFVKDARALVVDVTVRYEAAKSSLEEAAAEKVRKYKHLETEVRHLTNAKDVTFVGFPLGARGKWHQDNFKLLTELGLSKSRQVKMAETFSTVALFSSVDIVHMFASRARKSMVM

SEQ ID NO: 1559 - protein, 1390 aa, synthetic construct
MASCPKPGPPVSAGAMSLESGLTTHSVLAIERGPNSLANSGSDFGGGGLGLPLRLLRVSVGTQTSRSDWVDLVSWSHPGPTSKSQQVDLVSLFPKHRVDLLSKNDQVDLVAQFLPSKFPPNLAENDLALLVNLEFYRSDLHVYECVHFAAHWEGLSGLPEVYEQLAPQPCVGETLHSSLPRDSELFVPEEGSSEKESEDAPKTSPPTPGKHGLEQTGEEKVMVTVPDKNPPCPCCGTRVNSVLNLIEHLKVSHGKRGVCFRCAKCGKENSNYHSVVCHFKKCRGPETEKAPAGEWICEVCNRDFTTKIGLGQHKRLAHPAVRNQERIVASQPKETSNRGAHKRCWTKEEEELLIRLEAQFEGNKNINKLIAEHITTKTAKQISDKRRLLSRKPAEEPREEPGTCHHTRRAAASLRTEPEMSHHAQAEDRDNGPGRRPLPGRAAAGGRTMDEIRRHPDKGNGQQRPTKQKSEEQLQAYYKKTLEERLSAGALNTFPRAFKQVMEGRDIKLVINQTAQDYFGCLESISQIRTATRDKKDTVTRKKHPKKPFQKWMKDRAIKKGNYLRFQRLFYLDRGKLAKIILDDIECLSCDIPLSEIYSVFKTRWETTGSFKSLGDFKTYGKADNTAFRELITAKEIEKNVQEMSKGSAPGPDGITLGDVVKMDPEGSRTMEIFNLWLTTGKIPDMVRGCRTVLIPKSSDPDRLKDINNWRPITIGSILLRLFSRIVTARLSKACPLNPRQRGFIRAAGCSENLKLLQTIIWSAKREHRPLGVVFVDIAKAFDTVSHQHIIHALQQREVDPHIVGLVSNMYENISTYITTKRNTHTDKIQIRVGVKQGDPMSPLLFNLAMDPLLCKLEESGKGYHRGQSSITAMAFADDLVLLSDSWENMNTNISILETFCNLTGLKTQGQKCHGFYIKPTKKSYTINDCAAWTINGTPLNMIDPGESEKYLGLQFDPWIGIARSGLSTKLDFWLQRIDQAPLKPLQKLDILKTYTIPRLIYIADHSEVKTALLETLDQKIRTAVKEWLHLPPCTCDAILYSSTRDGGLGITKLAGLIPSVQARRLHRIAQSSDDTMKCFMEKEKMEQLHKKLWIQAGGDRENIPSIWEAPPSSEPPNNVSTNSEWEAPTQKDKFPKPCNWRKNEFKKWTKLASQGRGIVNFERDKISNHWIQYYRRIPHRKLLTALQLRANVYPTREFLARGRQDQYIKACRHCDADIESCAHIIGNCPVTQDARIKRHNKICELLLEEAKKKDWVVFKEPHIRDSNKELYKPDLIFVKDARALVVDVTVRYEAAKSSLEEAAAEKVRKYKHLETEVRHLTNAKDVTFVGFPLGARGKWHQDNFKLLTELGLSKSRQVKMAETFSTVALFSSVDIVHMFASRARKSMVM

SEQ ID NO: 1560 - protein, 1390 aa, synthetic construct
MASCPKPGPPVSAGAMSLESGLTTHSVLAIERGPNSLANSGSDFGGGGLGLPLRLLRVSVGTQTSRSDWVDLVSWSHPGPTSKSQQVDLVSLFPKHRVDLLSKNDQVDLVAQFLPSKFPPNLAENDLALLVNLEFYRSDLHVYECVHFAAHWEGLSGLPEVYEQLAPQPCVGETLHSSLPRDSELFVPEEGSSEKESEDAPKTSPPTPGKHGLEQTGEEKVMVTVPDKNPPCPCCGTRVNSVLNLIEHLKVSHGKRGVCFRCAKCGKENSNYHSVVCHFKKCRGPETEKAPAGEWICEVCNRDFTTKIGLGQHKRLAHPAVRNQERIVASQPKETSNRGAHKRCWTKEEEELLIRLEAQFEGNKNINKLIAEHITTKTAKQISDKRRLLSRKPAEEPREEPGTCHHTRRAAASLRTEPEMSHHAQAEDRDNGPGRRPLPGRAAAGGRTMDEIRRHPDKGNGQQRPTKQKSEEQLQAYYKKTLEERLSAGALNTFPRAFKQVMEGRDIKLVINQTAQDYFGCLESISQIRTATRDKKDTVTRKKHPKKPFQKWMKDRAIKKGNYLRFQRLFYLDRGKLAKIILDDIECLSCDIPLSEIYSVFKTRWETTGSFKSLGDFKTYGKADNTAFRELITAKEIEKNVQEMSKGSAPGPDGITLGDVVKMDPEGSRTMEIFNLWLTTGKIPDMVRGCRTVLIPKSSDPDRLKDINNWRPITIGSILLRLFSRIVTARLSKACPLNPRQRGFIRAAGCSENLKLLQTIIWSAKREHRPLGVVFVDIAKAFDTVSHQHIIHALQQREVDPHIVGLVSNMYENISTYITTKRNTHTDKIQIRVGVKQGDPMSPLLFNLAMDPLLCKLEESGKGYHRGQSSITAMAFADDLVLLSDSWEGMNTNISILETFCNLTGLKTQGQKCHGFYIKPTKKSYTINDCAAWTINGTPLNMIDPGESEKYLGLQFDPWIGIARSGLSTKLDFWLQRIDQAPLKPLQKLDILKTYTIPRLIYIADHSEVKTALLETLDQKIRTAVKEWLHLPPCTCDAILYSSTRDGGLGITKLAGLIPSVQARRLHRIAQSSDDTMKCFMEKEKMEQLHKKLWIQAGGDRENIPSIWEAPPSSEPPNNVSTNSEWEAPTQKDKFPKPCNWRKNEFKKWTKLASQGRGIVNFERDKISNHWIQYYRRIPHRKLLTALQLRANVYPTREFLARGRQDQYIKACRHCDADIESCAHIIGNCPVTQDARIKRHNKICELLLEEAKKKDWVVFKEPHIRDSNKELYKPDLIFVKDARALVVDVTVRYEAAKSSLEEAAAEKVRKYKHLETEVRHLTNAKDVTFVGFPLGARGKWHQDNFKLLTELGLSKSRQVKMAETFSTVALFSSVDIVHMFASRARKSMVM

SEQ ID NO: 1561 - protein, 1390 aa, synthetic construct
MASCPKPGPPVSAGAMSLESGLTTHSVLAIERGPNSLANSGSDFGGGGLGLPLRLLRVSVGTQTSRSDWVDLVSWSHPGPTSKSQQVDLVSLFPKHRVDLLSKNDQVDLVAQFLPSKFPPNLAENDLALLVNLEFYRSDLHVYECVHFAAHWEGLSGLPEVYEQLAPQPCVGETLHSSLPRDSELFVPEEGSSEKESEDAPKTSPPTPGKHGLEQTGEEKVMVTVPDKNPPCPCCGTRVNSVLNLIEHLKVSHGKRGVCFRCAKCGKENSNYHSVVCHFKKCRGPETEKAPAGEWICEVCNRDFTTKIGLGQHKRLAHPAVRNQERIVASQPKETSNRGAHKRCWTKEEEELLIRLEAQFEGNKNINKLIAEHITTKTAKQISDKRRLLSRKPAEEPREEPGTCHHTRRAAASLRTEPEMSHHAQAEDRDNGPGRRPLPGRAAAGGRTMDEIRRHPDKGNGQQRPTKQKSEEQLQAYYKKTLEERLSAGALNTFPRAFKQVMEGRDIKLVINQTAQDYFGCLESISQIRTATRDKKDTVTRKKHPKKPFQKWMKKRAIKKGNYLRFQRLFYLDRGKLAKIILDDIECLSCDIPLSEIYSVFKTRWETTGSFKSLGDFKTYGKADNTAFRELITAKEIEKNVQEMSKGSAPGPDGITLGDVVKMDPEGSRTMEIFNLWLTTGKIPDMVRGCRTVLIPKSSDPDRLKDINNWRPITIGSILLRLFSRIVTARLSKACPLNPRQRGFIRAAGCSENLKLLQTIIWSAKREHRPLGVVFVDIAKAFDTVSHQHIIHALQQREVDPHIVGLVSNMYENISTYITTKRNTHTDKIQIRVGVKQGDPMSPLLFNLAMDPLLCKLEESGKGYHRGQSSITAMAFADDLVLLSDSWEGMNTNISILETFCNLTGLKTQGQKCHGFYIKPTKKSYTINDCAAWTINGTPLNMIDPGESEKYLGLQFDPWIGIARSGLSTKLDFWLQRIDQAPLKPLQKLDILKTYTIPRLIYIADHSEVKTALLETLDQKIRTAVKEWLHLPPCTCDAILYSSTRDGGLGITKLAGLIPSVQARRLHRIAQSSDDTMKCFMEKEKMEQLHKKLWIQAGGDRENIPSIWEAPPSSEPPNNVSTNSEWEAPTQKDKFPKPCNWRKNEFKKWTKLASQGRGIVNFERDKISNHWIQYYRRIPHRKLLTALQLRANVYPTREFLARGRQDQYIKACRHCDADIESCAHIIGNCPVTQDARIKRHNKICELLLEEAKKKDWVVFKEPHIRDSNKELYKPDLIFVKDARALVVDVTVRYEAAKSSLEEAAAEKVRKYKHLETEVRHLTNAKDVTFVGFPLGARGKWHQDNFKLLTELGLSKSRQVKMAETFSTVALFSSVDIVHMFASRARKSMVM

SEQ ID NO: 1562 - protein, 1390 aa, synthetic construct
MASCPKPGPPVSAGAMSLESGLTTHSVLAIERGPNSLANSGSDFGGGGLGLPLRLLRVSVGTQTSRSDWVDLVSWSHPGPTSKSQQVDLVSLFPKHRVDLLSKNDQVDLVAQFLPSKFPPNLAENDLALLVNLEFYRSDLHVYECVHFAAHWEGLSGLPEVYEQLAPQPCVGETLHSSLPRDSELFVPEEGSSEKESEDAPKTSPPTPGKHGLEQTGEEKVMVTVPDKNPPCPCCGTRVNSVLNLIEHLKVSHGKRGVCFRCAKCGKENSNYHSVVCHFKKCRGPETEKAPAGEWICEVCNRDFTTKIGLGQHKRLAHPAVRNQERIVASQPKETSNRGAHKRCWTKEERELLIRLEAQFEGNKNINKLIAEHITTKTAKQISDKRRLLSRKPAEEPRMEPGTCHHTRRAAASLRTEPEMSHHAQAEDRDNGPGRRPLPGRAAAGGRTMDEIRRHPDKGNGQQRPTKQKSEEQLQAYYKKTLEERLSAGALNTFPRAFKQVMEGRDIKLVINQTAQDYFGCLESISQIRTATRDKKDTVTREKHPKKPFQKWMKKRAIKKGNYLRFQRLFYLDRGKLAKIILDDIECLSCDIPLSEIYSVFKTRWETTGSFKSLGDFKTYGKADNTAFRELITAKEIEKNVQEMSKGSAPGPDGITLGDVVKMDPEFSRTMEIFNLWLTTGKIPDMVRGCRTVLIPKSSDPDRLKDINNWRPITIGSILLRLFSRIVTARLSKACPLNPRQRGFIRAAGCSENLKLLQTIIWSAKREHRPLGVVFVDIAKAFDTVSHQHIIHALQQREVDPHIVGLVSNMYENISTYITTKRNTHTDKIQIRVGVKQGDPMSPLLFNLAMDPLLCKLEESGKGYHRGQSSITAMAFADDLVLLSDSWENMNTNISILETFCNLTGLKTQGQKCHGFYIKPTKKSYTINDCAAWTINGTPLNMIDPGESEKYLGLQFDPWIGIARSGLSTKLDFWLQRIDQAPLKPLQKTDILKTYTIPRLIYIADHSEVKTALLETLDQKIRTAVKEWLHLPPCTCDAILYSSTRDGGLGITKLAGLIPSVQARRLHRIAQSSDDTMKCFMEKEKMEQLHKKLWIQAGGDRENIPSIWEAPPSSEPPNNVSTNSEWEAPTQKDKFPKPCNWRKNEFKKWTKLASQGRGIVNFERDKISNHWIQYYRRIPHRKLLTALQLRANVYPTREFLARGRQDQYIKACRHCDADNESCAHIIGNCPVTQDARIKRHNYICELLLEEAKKKDWVVFKEPHIRDSNKELYKPDLIFVKDARALVVDVTVRYEAAKSSLEEAAAEKVRKYKHLETEVRHLTNAKDVTFVGFPLGARGKWHQDNFKLLTELGLSKSRQVKMAETFSTVALFSSVDIVHMFASRARKSMVM

SEQ ID NO: 1563 - protein, 1390 aa, synthetic construct
MASCPKPGPPVSAGAMSLESGLTTHSVLAIERGPNSLANSGSDFGGGGLGLPLRLLRVSVGTQTSRSDWVDLVSWSHPGPTSKSQQVDLVSLFPKHRVDLLSKNDQVDLVAQFLPSKFPPNLAENDLALLVNLEFYRSDLHVYECVHFAAHWEGLSGLPEVYEQLAPQPCVGETLHSSLPRDSELFVPEEGSSEKESEDAPKTSPPTPGKHGLEQTGEEKVMVTVPDKNPPCPCCGTRVNSVLNLIEHLKVSHGKRGVCFRCAKCGKENSNYHSVVCHFKKCRGPETEKAPAGEWICEVCNRDFTTKIGLGQHKRLAHPAVRNQERIVASQPKETSNRGAHKRCWTKEEEELLIRLEAQFEGNKNINKLIAEHITTKTAKQISDKRRLLSRKPAEEPREEPGTCHHTRRAAASLRTEPEMSHHAQAEDRDNGPGRRPLPGRAAAGGRTMDEIRRHPDKGNGQQRPTKQKSEEQLQAYYKKTLEERLSAGALNTFPRAFKQVMEGRDIKLVINQTAQDYFGCLESISQIRTATRDKKDTVTRKKHPKKPFQKWMKDRAIKKGNYLRFQRLFYLDRGKLAKIILDDIECLSCDIPLSEIYSVFKTRWETTGSFKSLGDFKTYGKADNTAFRELITAKEIEKNVQEMSKGSAPGPDGITLGDVVKMDPEGSRTMEIFNLWLTTGKIPDMVRGCRTVLIPKSSDPDRLKDINNWRPITIGSILLRLFSRIVTARLSKACPLNPRQRGFIRAAGCSENLKLLQTIIWSAKREHRPLGVVFVDIAKAFDTVSHQHIIHALQQREVDPHIVGLVSNMYENISTYITTKRNTHTDKIQIRVGVKQGDPMSPLLFNLAMDPLLCKLEESGKGYHRGQSSITAMAFADDLVLLSDSWENMNTNISILETFCNLTGLKTQGQKCHGFYIKPTKKSYTINDCAAWTINGTPLNMIDPGESEKYLGLQFDPWIGIARSGLSTKLDFWLQRIDQAPLKPLQKTDILKTYTIPRLIYIADHSEVKTALLETLDQKIRTAVKEWLHLPPCTCDAILYSSTRDGGLGITKLAGLIPSVQARRLHRIAQSSDDTMKCFMEKEKMEQLHKKLWIQAGGDRENIPSIWEAPPSSEPPNNVSTNSEWEAPTQKDKFPKPCNWRKNEFKKWTKLASQGRGIVNFERDKISNHWIQYYRRIPHRKLLTALQLRANVYPTREFLARGRQDQYIKACRHCDADIESCAHIIGNCPVTQDARIKRHNKICELLLEEAKKKDWVVFKEPHIRDSNKELYKPDLIFVKDARALVVDVTVRYEAAKSSLEEAAAEKVRKYKHLETEVRHLTNAKDVTFVGFPLGARGKWHQDNFKLLTELGLSKSRQVKMAETFSTVALFSSVDIVHMFASRARKSMVM

SEQ ID NO: 1564 - protein, 1390 aa, synthetic construct
MASCPKPGPPVSAGAMSLESGLTTHSVLAIERGPNSLANSGSDFGGGGLGLPLRLLRVSVGTQTSRSDWVDLVSWSHPGPTSKSQQVDLVSLFPKHRVDLLSKNDQVDLVAQFLPSKFPPNLAENDLALLVNLEFYRSDLHVYECVHFAAHWEGLSGLPEVYEQLAPQPCVGETLHSSLPRDSELFVPEEGSSEKESEDAPKTSPPTPGKHGLEQTGEEKVMVTVPDKNPPCPCCGTRVNSVLNLIEHLKVSHGKRGVCFRCAKCGKENSNYHSVVCHFKKCRGPETEKAPAGEWICEVCNRDFTTKIGLGQHKRLAHPAVRNQERIVASQPKETSNRGAHKRCWTKEEEELLIRLEAQFEGNKNINKLIAEHITTKTAKQISDKRRLLSRKPAEEPREEPGTCHHTRRAAASLRTEPEMSHHAQAEDRDNGPGRRPLPGRAAAGGRTMDEIRRHPDKGNGQQRPTKQKSEEQLQAYYKKTLEERLSAGALNTFPRAFKQVMEGRDIKLVINQTAQDYFGCLESISQIRTATRDKKDTVTRKKHPKKPFQKWMKDRAIKKGNYLRFQRLFYLDRGKLAKIILDDIECLSCDIPLSEIYSVFKTRWETTGSFKSLGDFKTYGKADNTAFRELITAKEIEKNVQEMSKGSAPGPDGITLGDVVKMDPEGSRTMEIFNLWLTTGKIPDMVRGCRTVLIPKSSDPDRLKDINNWRPITIGSILLRLFSRIVTARLSKACPLNPRQRGFIRAAGCSENLKLLQTIIWSAKREHRPLGVVFVDIAKAFDTVSHQHIIHALQQREVDPHIVGLVSNMYENISTYITTKRNTHTDKIQIRVGVKQGDPMSPLLFNLAMDPLLCKLEESGKGYHRGQSSITAMAFADDLVLLSDSWEGMNTNISILETFCNLTGLKTQGQKCHGFYIKPTKDSYTINDCAAWTINGTPLNMIDPGESEKYLGLQFDPWIGIARSGLSTKLDFWLQRIDQAPLKPLQKLDILKTYTIPRLIYIADHSEVKTALLETLDQKIRTAVKEWLHLPPCTCDAILYSSTRDGGLGITKLAGLIPSVQARRLHRIAQSSDDTMKCFMEKEKMEQLHKKLWIQAGGDRENIPSIWEAPPSSEPPNNVSTNSEWEAPTQKDKFPKPCNWRKNEFKKWTKLASQGRGIVNFERDKISNHWIQYYRRIPHRKLLTALQLRANVYPTREFLARGRQDQYIKACRHCDADIESCAHIIGNCPVTQDARIKRHNYICELLLEEAKKKDWVVFKEPHIRDSNKELYKPDLIFVKDARALVVDVTVRYEAAKSSLEEAAAEKVRKYKHLETEVRHLTNAKDVTFVGFPLGARGKWHQDNFKLLTELGLSKSRQVKMAETFSTVALFSSVDIVHMFASRARKSMVM

SEQ ID NO: 1565 - protein, 1390 aa, synthetic construct
MASCPKPGPPVSAGAMSLESGLTTHSVLAIERGPNSLANSGSDFGGGGLGLPLRLLRVSVGTQTSRSDWVDLVSWSHPGPTSKSQQVDLVSLFPKHRVDLLSKNDQVDLVAQFLPSKFPPNLAENDLALLVNLEFYRSDLHVYECVHFAAHWEGLSGLPEVYEQLAPQPCVGETLHSSLPRDSELFVPEEGSSEKESEDAPKTSPPTPGKHGLEQTGEEKVMVTVPDKNPPCPCCGTRVNSVLNLIEHLKVSHGKRGVCFRCAKCGKENSNYHSVVCHFKKCRGPETEKAPAGEWICEVCNRDFTTKIGLGQHKRLAHPAVRNQERIVASQPKETSNRGAHKRCWTKEEEELLIRLEAQFEGNKNINKLIAEHITTKTAKQISDKRRLLSRKPAEEPREEPGTCHHTRRAAASLRTEPEMSHHAQAEDRDNGPGRRPLPGRAAAGGRTMDEIRRHPDKGNGQQRPTKQKSEEQLQAYYKKTLEERLSAGALNTFPRAFKQVMEGRDIKLVINQTAQDCFGCLESISQIRTATRDKKDTVTRKKHPKKPFQKWMKDRAIKKGNYLRFQRLFYLDRGKLAKIILDDIECLSCDIPLSEIYSVFKTRWETTGSFKSLGDFKTYGKADNTAFRELITAKEIEKNVQEMSKGSAPGPDGITLGDVVKMDPEGSRTMEIFNLWLTTGKIPDMVRGCRTVLIPKSSDPDRLKDINNWRPITIGSILLRLFSRIVTARLSKACPLNPRQRGFIRAAGCSENLKLLQTIIWSAKREHRPLGVVFVDIAKAFDTVSHQHIIHALQQREVDPHIVGLVSNMYENISTYITTKRNTHTDKIQIRVGVKQGDPMSPLLFNLAMDPLLCKLEESGKGYHRGQSSITAMAFADDLVLLSDSWEGMNTNISILETFCNLTGLKTQGQKCHGFYIKPTKKSYTINDCAAWTINGTPLNMIDPGESEKYLGLQFDPWIGIARSGLSTKLDFWLQRIDQAPLKPLQKLDILKTYTIPRLIYIADHSEVKTALLETLDQKIRTAVKEWLHLPPCTCDAILYSSTRDGGLGITKLAGLIPSVQARRLHRIAQSSDDTMKCFMEKEKMEQLHKKLWIQAGGDRENIPSIWEAPPSSEPPNNVSTNSEWEAPTQKDKFPKPCNWRKNEFKKWTKLASQGRGIVNFERDKISNHWIQYYRRIPHRKLLTALQLRANVYPTREFLARGRQDQYIKACRHCDADIESCAHIIGNCPVTQDARIKRHNYICELLLEEAKKKDWVVFKEPHIRDSNKELYKPDLIFVKDARALVVDVTVRYEAAKSSLEEAAAEKVRKYKHLETEVRHLTNAKDVTFVGFPLGARGKWHQDNFKLLTELGLSKSRQVKMAETFSTVALFSSVDIVHMFASRARKSMVM

SEQ ID NO: 1566 - protein, 1390 aa, synthetic construct
MASCPKPGPPVSAGAMSLESGLTTHSVLAIERGPNSLANSGSDFGGGGLGLPLRLLRVSVGTQTSRSDWVDLVSWSHPGPTSKSQQVDLVSLFPKHRVDLLSKNDQVDLVAQFLPSKFPPNLAENDLALLVNLEFYRSDLHVYECVHFAAHWEGLSGLPEVYEQLAPQPCVGETLHSSLPRDSELFVPEEGSSEKESEDAPKTSPPTPGKHGLEQTGEEKVMVTVPDKNPPCPCCGTRVNSVLNLIEHLKVSHGKRGVCFRCAKCGKENSNYHSVVCHFKKCRGPETEKAPAGEWICEVCNRDFTTKIGLGQHKRRWHPAVRNQERIVASQPKETSNRGAHKRCWTKEERELLIRLEAQFEGNKNINKLIAEHITTKTAKQISDKRRLLSRKPAEEPRMMPGTCHHTRRAAASLRTEPEMSHHAQAEDRDNGPGRRPLPGRAAAGGRTMDEIRRHPDKGNGQQRPTKQKSEEQLQAYYKKTLEERLSAGALNTFPRAFKQVMEGRDIKLVINQTAQDCFGCLESISQIRTATRDKKDTVTREKHPKKPFQKWMKKRAIKKGNYLRFQRLFYLDRGKLAKIILDDIECLSCDIPLSEIYSVFKTRWETTGSFKSLGDFKTYGKADNTAFRELITAKEIEKNVQEMSKGSAPGPDGITLGDVVKMDPEGSRTMEIFNLWLTTGKIPDMVRGCRTVLIPKSSDPDRLKDINNWRPITIGSILLRLFSRIVTARLSKACPLNPRQRGFIRAAGCSENLKLLQTIIWSAKREHRPLGVVFVDIAKAFDTVSHQHIIHALQQREVDPHIVGLVSNMYENISTYITTKRNTHTDKIQIRVGVKQGDPMSPLLFNLAMDPLLCKLEESGKGYHRGQSSITAMAFADDLVLLSDSWENMNTNISILETFCNLTGLKTQGQKCHGFYIKPTKKSYTINDCAAWTINGTPLNMIDPGESEKYLGLQFDPWIGIARSGLSTKLDFWLQRIDQAPLKPLQKTDILKTYTIPRLIYIADHSEVKTALLETLDQKIRTAVKEWLHLPPCTCDAILYSSTRDGGLGITKLAGLIPSVQARRLHRIAQSSDDTMKCFMEKEKMEQLHKKLWIQAGGDRENIPSIWEAPPSSEPPNNVSTNSEWEAPTQKDKFPKPCNWRKNEFKKWTKLASQGRGIVNFERDKISNHWIQYYRRIPHRKLLTALQLRANVYPTREFLARGRQDQYIKACRHCDADNESCAHIIGNCPVTQDARIKRHNYICELLLEEAKKKDWVVFKEPHIRDSNKELYKPDLIFVKDARALVVDVTVRYEAAKSSLEEAAAEKVRKYKHLETEVRHLTNAKDVTFVGFPLGARGKWHQDNFKLLTELGLSKSRQVKMAETFSTVALFSSVDIVHMFASRARKSMVM

SEQ ID NO: 1567 - protein, 1390 aa, synthetic construct
MASCPKPGPPVSAGAMSLESGLTTHSVLAIERGPNSLANSGSDFGGGGLGLPLRLLRVSVGTQTSRSDWVDLVSWSHPGPTSKSQQVDLVSLFPKHRVDLLSKNDQVDLVAQFLPSKFPPNLAENDLALLVNLEFYRSDLHVYECVHFAAHWEGLSGLPEVYEQLAPQPCVGETLHSSLPRDSELFVPEEGSSEKESEDAPKTSPPTPGKHGLEQTGEEKVMVTVPDKNPPCPCCGTRVNSVLNLIEHLKVSHGKRGVCFRCAKCGKENSNYHSVVCHFPKCRGPETEKAPAGEWICEVCNRDFTTKIGLGQHKRLAHPAVRNQERIVASQPKETSNRGAHKRCWTKEEEELLIRLEAQFEGNKNINKLIAEHITTKTAKQISDKRRLLSRKPAEEPREEPGTCHHTRRAAASLRTEPEMSHHAQAEDRDNGPGRRPLPGRAAAGGRTMDEIRRHPDKGNGQQRPTKQKSEEQLQAYYKKTLEERLSAGALNTFPRAFKQVMEGRDIKLVINQTAQDCFGCLESISQIRTATRDKKDTVTRKKHPKKPFQKWMKKRAIKKGNYLRFQRLFYLDRGKLAKIILDDIECLSCDIPLSEIYSVFKTRWETTGSFKSLGDFKTYGKADNTAFRELITAKEIEKNVQEMSKGSAPGPDGITLGDVVKMDPEFSRTMEIFNLWLTTGKIPDMVRGCRTVLIPKSSKPDRLKDINNWRPITIGSILLRLFSRIVTARLSKACPLNPRQRGFIRAAGCSENLKLLQTIIWSAKREHRPLGVVFVDIAKAFDTVSHQHIIHALQQREVDPHIVGLVSNMYENISTYITTKRNTHTDKIQIRVGVKQGDPMSPLLFNLAMDPLLCKLEESGKGYHRGQSSITAMAFADDLVLLSDSWENMNTNISILETFCNLTGLKTQGQKCHGFYIKPTKKSYTINDCAAWTINGTPLNMIDPGESEKYLGLQFDPWIGIARSGLSTKLDFWLQRIDQAPLKPLQKLDILKTYTIPRLIYIADHSEVKTALLETLDQKIRTAVKEWLHLPPCTCDAILYSSTRDGGLGITKLAGLIPSVQARRLHRIAQSSDDTMKCFMEKEKMEQLHKKLWIQAGGDRENIPSIWEAPPSSEPPNNVSTNSEWEAPTQKDKFPKPCNWRKNEFKKWTKLASQGRGIVNFERDKISNHWIQYYRRIPHRKLLTALQLRANVYPTREFLARGRQDQYIKACRHCDADIESCAHIIGNCPVTQDARIKRHNYICELLLEEAKKKDWVVFKEPHIRDSNKELYKPDLIFVKDGRALVVDVTVRYEAAKSSLEEAAAEKVRKYKHLETEVRHLTNAKDVTFVGFPLGARGKWHQDNFKLLTELGLSKSRQVKMAETFSTVALFSSVDIVHMFASRARKSMVM

SEQ ID NO: 1568 - protein, 1390 aa, synthetic construct
MASCPKPGPPVSAGAMSLESGLTTHSVLAIERGPNSLANSGSDFGGGGLGLPLRLLRVSVGTQTSRSDWVDLVSWSHPGPTSKSQQVDLVSLFPKHRVDLLSKNDQVDLVAQFLPSKFPPNLAENDLALLVNLEFYRSDLHVYECVHFAAHWEGLSGLPEVYEQLAPQPCVGETLHSSLPRDSELFVPEEGSSEKESEDAPKTSPPTPGKHGLEQTGEEKVMVTVPDKNPPCPCCGTRVNSVLNLIEHLKVSHGKRGVCFRCAKCGKENSNYHSVVCHFPKCRGPETEKAPAGEWICEVCNRDFTTKIGLGQHKRLAHPAVRNQERIVASQPKETSNRGAHKRCWTKEEEELLIRLEAQFEGNKNINKLIAEHITTKTAKQISDKRRLLSRKPAEEPREEPGTCHHTRRAAASLRTEPEMSHHAQAEDRDNGPGRRPLPGRAAAGGRTMDEIRRHPDKGNGQQRPTKQKSEEQLQAYYKKTLEERLSAGALNTFPRAFKQVMEGRDIKLVINQTAQDCFGCLESISQIRTATRDKKDTVTRKKHPKKPFQKWMKKRAIKKGNYLRFQRLFYLDRGKLAKIILDDIECLSCDIPLSEIYSVFKTRWETTGSFKSLGDFKTYGKADNTAFRELITAKEIEKNVQEMSKGSAPGPDGITLGDVVKMDPEFSRTMEIFNLWLTTGKIPDMVRGCRTVLIPKSSKPDRLKDINNWRPITIGSILLRLFSRIVTARLSKACPLNPRQRGFIRAAGCSENLKLLQTIIWSAKREHRPLGVVFVDIAKAFDTVSHQHIIHALQQREVDPHIVGLVSNMYENISTYITTKRNTHTDKIQIRVGVKQGDPMSPLLFNLAMDPLLCKLEESGKGYHRGQSSITAMAFADDLVLLSDSWENMNTNISILETFCNLTGLKTQGQKCHGFYIKPTKKSYTINDCAAWTINGTPLNMIDPGESEKYLGLQFDPWIGIARSGLSTKLDFWLQRIDQAPLKPLQKLDILKTYTIPRLIYIADHSEVKTALLETLDQKIRTAVKEWLHLPPCTCDAILYSSTRDGGLGITKLAGLIPSVQARRLHRIAQSSDDTMKCFMEKEKMEQLHKKLWIQAGGDRENIPSIWEAPPSSEPPNNVSTNSEWEAPTQKDKFPKPCNWRKNEFKKWTKLASQGRGIVNFERDKISNHWIQYYRRIPHRKLLTALQLRANVYPTREFLARGRQDQYIKACRHCDADIESCAHIIGNCPVTQDARIKRHNYICELLLEEAKKKDWVVFKEPHIRDSNKELYKPDLIFVKDARALVVDVTVRYEAAKSSLEEAAAEKVRKYKHLETEVRHLTNAKDVTFVGFPLGARGKWHQDNFKLLTELGLSKSRQVKMAETFSTVALFSSVDIVHMFASRARKSMVM

SEQ ID NO: 1569 - protein, 1390 aa, synthetic construct
MASCPKPGPPVSAGAMSLESGLTTHSVLAIERGPNSLANSGSDFGGGGLGLPLRLLRVSVGTQTSRSDWVDLVSWSHPGPTSKSQQVDLVSLFPKHRVDLLSKNDQVDLVAQFLPSKFPPNLAENDLALLVNLEFYRSDLHVYECVHFAAHWEGLSGLPEVYEQLAPQPCVGETLHSSLPRDSELFVPEEGSSEKESEDAPKTSPPTPGKHGLEQTGEEKVMVTVPDKNPPCPCCGTRVNSVLNLIEHLKVSHGKRGVCFRCAKCGKENSNYHSVVCHFPKCRGPETEKAPAGEWICEVCNRDFTTKIGLGQHKRLAHPAVRNQERIVASQPKETSNRGAHKRCWTKEEEELLIRLEAQFEGNKNINKLIAEHITTKTAKQISDKRRLLSRKPAEEPREEPGTCHHTRRAAASLRTEPEMSHHAQAEDRDNGPGRRPLPGRAAAGGRTMDEIRRHPDKGNGQQRPTKQKSEEQLQAYYKKTLEERLSAGALNTFPRAFKQVMEGRDIKLVINQTAQDCFGCLESISQIRTATRDKKDTVTRKKHPKKPFQKWMKKRAIKKGNYLRFQRLFYLDRGKLAKIILDDIECLSCDIPLSEIYSVFKTRWETTGSFKSLGDFKTYGKADNTAFRELITAKEIEKNVQEMSKGSAPGPDGITLGDVVKMDPEFSRTMEIFNLWLTTGKIPDMVRGCRTVLIPKSSKPDRLKDINNWRPITIGSILLRLFSRIVTARLSKACPLNPRQRGFIRAAGCSENLKLLQTIIWSAKREHRPLGVVFVDIAKAFDTVSHQHIIHALQQREVDPHIVGLVSNMYENISTYITTKRNTHTDKIQIRVGVKQGDPMSPLLFNLAMDPLLCKLEESGKGYHRGQSSITAMAFADDLVLLSDSWEGMNTNISILETFCNLTGLKTQGQKCHGFYIKPTKKSYTINDCAAWTINGTPLNMIDPGESEKYLGLQFDPWIGIARSGLSTKLDFWLQRIDQAPLKPLQKLDILKTYTIPRLIYIADHSEVKSALLETLDQKIRTAVKEWLHLPPCTCDAILYSSTRDGGLGITKLAGLIPSVQARRLHRIAQSSDDTMKCFMEKEKMEQLHKKLWIQAGGDRENIPSIWEAPPSSEPPNNVSTNSEWEAPTQKDKFPKPCNWRKNEFKKWTKLASQGRGIVNFERDKISNHWIQYYRRIPHRKLLTALQLRANVYPTREFLARGRQDQYIKACRHCDADIESCAHIIGNCPVTQDARIKRHNYICELLLEEAKKKDWVVFKEPHIRDSNKELYKPDLIFVKDARALVVDVTVRYEAAKSSLEEAAAEKVRKYKHLETEVRHLTNAKDVTFVGFPLGARGKWHQDNFKLLTELGLSKSRQVKMAETFSTVALFSSVDIVHMFASRARKSMVM

SEQ ID NO: 1570 - protein, 1390 aa, synthetic construct
MASCPKPGPPVSAGAMSLESGLTTHSVLAIERGPNSLANSGSDFGGGGLGLPLRLLRVSVGTQTSRSDWVDLVSWSHPGPTSKSQQVDLVSLFPKHRVDLLSKNDQVDLVAQFLPSKFPPNLAENDLALLVNLEFYRSDLHVYECVHFAAHWEGLSGLPEVYEQLAPQPCVGETLHSSLPRDSELFVPEEGSSEKESEDAPKTSPPTPGKHGLEQTGEEKVMVTVPDKNPPCPCCGTRVNSVLNLIEHLKVSHGKRGVCFRCAKCGKENSNYHSVVCHFPKCRGPETEKAPAGEWICEVCNRDFTTKIGLGQHKRLAHPAVRNQERIVASQPKETSNRGAHKRCWTKEEEELLIRLEAQFEGNKNINKLIAEHITTKTAKQISDKRRLLSRKPAEEPREEPGTCHHTRRAAASLRTEPEMSHHAQAEDRDNGPGRRPLPGRAAAGGRTMDEIRRHPDKGNGQQRPTKQKSEEQLQAYYKKTLEERLSAGALNTFPRAFKQVMEGRDIKLVINQTAQDCFGCLESISQIRTATRDKKDTVTRKKHPKKPFQKWMKKRAIKKGNYLRFQRLFYLDRGKLAKIILDDIECLSCDIPLSEIYSVFKTRWETTGSFKSLGDFKTYGKADNTAFRELITAKEIEKNVQEMSKGSAPGPDGITLGDVVKMDPEGSRTMEIFNLWLTTGKIPDMVRGCRTVLIPKSSKPDRLKDINNWRPITIGSILLRLFSRIVTARLSKACPLNPRQRGFIRAAGCSENLKLLQTIIWSAKREHRPLGVVFVDIAKAFDTVSHQHIIHALQQREVDPHIVGLVSNMYENISTYITTKRNTHTDKIQIRVGVKQGDPMSPLLFNLAMDPLLCKLEESGKGYHRGQSSITAMAFADDLVLLSDSWEGMNTNISILETFCNLTGLKTQGQKCHGFYIKPTKKSYTINDCAAWTINGTPLNMIDPGESEKYLGLQFDPWIGIARSGLSTKLDFWLQRIDQAPLKPLQKLDILKTYTIPRLIYIADHSEVKTALLETLDQKIRTAVKEWLHLPPCTCDAILYSSTRDGGLGITKLAGLIPSVQARRLHRIAQSSDDTMKCFMEKEKMEQLHKKLWIQAGGDRENIPSIWEAPPSSEPPNNVSTNSEWEAPTQKDKFPKPCNWRKNEFKKWTKLASQGRGIVNFERDKISNHWIQYYRRIPHRKLLTALQLRANVYPTREFLARGRQDQYIKACRHCDADIESCAHIIGNCPVTQDARIKRHNYICELLLEEAKKKDWVVFKEPHIRDSNKELYKPDLIFVKDGRALVVDVTVRYEAAKSSLEEAAAEKVRKYKHLETEVRHLTNAKDVTFVGFPLGARGKWHQDNFKLLTELGLSKSRQVKMAETFSTVALFSSVDIVHMFASRARKSMVM

SEQ ID NO: 1571 - protein, 1390 aa, synthetic construct
MASCPKPGPPVSAGAMSLESGLTTHSVLAIERGPNSLANSGSDFGGGGLGLPLRLLRVSVGTQTSRSDWVDLVSWSHPGPTSKSQQVDLVSLFPKHRVDLLSKNDQVDLVAQFLPSKFPPNLAENDLALLVNLEFYRSDLHVYECVHFAAHWEGLSGLPEVYEQLAPQPCVGETLHSSLPRDSELFVPEEGSSEKESEDAPKTSPPTPGKHGLEQTGEEKVMVTVPDKNPPCPCCGTRVNSVLNLIEHLKVSHGKRGVCFRCAKCGKENSNYHSVVCHFPKCRGPETEKAPAGEWICEVCNRDFTTKIGLGQHKRLAHPAVRNQERIVASQPKETSNRGAHKRCWTKEEEELLIRLEAQFEGNKNINKLIAEHITTKTAKQISDKRRLLSRKPAEEPREEPGTCHHTRRAAASLRTEPEMSHHAQAEDRDNGPGRRPLPGRAAAGGRTMDEIRRHPDKGNGQQRPTKQKSEEQLQAYYKKTLEERLSAGALNTFPRAFKQVMEGRDIKLVINQTAQDCFGCLESISQIRTATRDKKDTVTRKKHPKKPFQKWMKKRAIKKGNYLRFQRLFYLDRGKLAKIILDDIECLSCDIPLSEIYSVFKTRWETTGSFKSLGDFKTYGKADNTAFRELITAKEIEKNVQEMSKGSAPGPDGITLGDVVKMDPEFSRTMEIFNLWLTTGKIPDMVRGCRTVLIPKSSKPDRLKDINNWRPITIGSILLRLFSRIVTARLSKACPLNPRQRGFIRAAGCSENLKLLQTIIWSAKREHRPLGVVFVDIAKAFDTVSHQHIIHALQQREVDPHIVGLVSNMYENISTYITTKRNTHTDKIQIRVGVKQGDPMSPLLFNLAMDPLLCKLEESGKGYHRGQSSITAMAFADDLVLLSDSWEGMNTNISILETFCNLTGLKTQGQKCHGFYIKPTKKSYTINDCAAWTINGTPLNMIDPGESEKYLGLQFDPWIGIARSGLSTKLDFWLQRIDQAPLKPLQKLDILKTYTIPRLIYIADHSEVKTALLETLDQKIRTAVKEWLHLPPCTCDAILYSSTRDGGLGITKLAGLIPSVQARRLHRIAQSSDDTMKCFMEKEKMEQLHKKLWIQAGGDRENIPSIWEAPPSSEPPNNVSTNSEWEAPTQKDKFPKPCNWRKNEFKKWTKLASQGRGIVNFERDKISNHWIQYYRRIPHRKLLTALQLRANVYPTREFLARGRQDQYIKACRHCDADIESCAHIIGNCPVTQDARIKRHNKICELLLEEAKKKDWVVFKEPHIRDSNKELYKPDLIFVKDGRALVVDVTVRYEAAKSSLEEAAAEKVRKYKHLETEVRHLTNAKDVTFVGFPLGARGKWHQDNFKLLTELGLSKSRQVKMAETFSTVALFSSVDIVHMFASRARKSMVM

SEQ ID NO: 1572 - protein, 1390 aa, synthetic construct
MASCPKPGPPVSAGAMSLESGLTTHSVLAIERGPNSLANSGSDFGGGGLGLPLRLLRVSVGTQTSRSDWVDLVSWSHPGPTSKSQQVDLVSLFPKHRVDLLSKNDQVDLVAQFLPSKFPPNLAENDLALLVNLEFYRSDLHVYECVHFAAHWEGLSGLPEVYEQLAPQPCVGETLHSSLPRDSELFVPEEGSSEKESEDAPKTSPPTPGKHGLEQTGEEKVMVTVPDKNPPCPCCGTRVNSVLNLIEHLKVSHGKRGVCFRCAKCGKENSNYHSVVCHFPKCRGPETEKAPAGEWICEVCNRDFTTKIGLGQHKRLAHPAVRNQERIVASQPKETSNRGAHKRCWTKEEEELLIRLEAQFEGNKNINKLIAEHITTKTAKQISDKRRLLSRKPAEEPREEPGTCHHTRRAAASLRTEPEMSHHAQAEDRDNGPGRRPLPGRAAAGGRTMDEIRRHPDKGNGQQRPTKQKSEEQLQAYYKKTLEERLSAGALNTFPRAFKQVMEGRDIKLVINQTAQDCFGCLESISQIRTATRDKKDTVTRKKHPKKPFQKWMKKRAIKKGNYLRFQRLFYLDRGKLAKIILDDIECLSCDIPLSEIYSVFKTRWETTGSFKSLGDFKTYGKADNTAFRELITAKEIEKNVQEMSKGSAPGPDGITLGDVVKMDPEGSRTMEIFNLWLTTGKIPDMVRGCRTVLIPKSSKPDRLKDINNWRPITIGSILLRLFSRIVTARLSKACPLNPRQRGFIRAAGCSENLKLLQTIIWSAKREHRPLGVVFVDIAKAFDTVSHQHIIHALQQREVDPHIVGLVSNMYENISTYITTKRNTHTDKIQIRVGVKQGDPMSPLLFNLAMDPLLCKLEESGKGYHRGQSSITAMAFADDLVLLSDSWENMNTNISILETFCNLTGLKTQGQKCHGFYIKPTKKSYTINDCAAWTINGTPLNMIDPGESEKYLGLQFDPWIGIARSGLSTKLDFWLQRIDQAPLKPLQKLDILKTYTIPRLIYIADHSEVKTALLETLDQKIRTAVKEWLHLPPCTCDAILYSSTRDGGLGITKLAGLIPSVQARRLHRIAQSSDDTMKCFMEKEKMEQLHKKLWIQAGGDRENIPSIWEAPPSSEPPNNVSTNSEWEAPTQKDKFPKPCNWRKNEFKKWTKLASQGRGIVNFERDKISNHWIQYYRRIPHRKLLTALQLRANVYPTREFLARGRQDQYIKACRHCDADIESCAHIIGNCPVTQDARIKRHNYICELLLEEAKKKDWVVFKEPHIRDSNKELYKPDLIFVKDGRALVVDVTVRYEAAKSSLEEAAAEKVRKYKHLETEVRHLTNAKDVTFVGFPLGARGKWHQDNFKLLTELGLSKSRQVKMAETFSTVALFSSVDIVHMFASRARKSMVM

SEQ ID NO: 1573 - protein, 1390 aa, synthetic construct
MASCPKPGPPVSAGAMSLESGLTTHSVLAIERGPNSLANSGSDFGGGGLGLPLRLLRVSVGTQTSRSDWVDLVSWSHPGPTSKSQQVDLVSLFPKHRVDLLSKNDQVDLVAQFLPSKFPPNLAENDLALLVNLEFYRSDLHVYECVHFAAHWEGLSGLPEVYEQLAPQPCVGETLHSSLPRDSELFVPEEGSSEKESEDAPKTSPPTPGKHGLEQTGEEKVMVTVPDKNPPCPCCGTRVNSVLNLIEHLKVSHGKRGVCFRCAKCGKENSNYHSVVCHFPKCRGPETEKAPAGEWICEVCNRDFTTKIGLGQHKRLAHPAVRNQERIVASQPKETSNRGAHKRCWTKEEEELLIRLEAQFEGNKNINKLIAEHITTKTAKQISDKRRLLSRKPAEEPREEPGTCHHTRRAAASLRTEPEMSHHAQAEDRDNGPGRRPLPGRAAAGGRTMDEIRRHPDKGNGQQRPTKQKSEEQLQAYYKKTLEERLSAGALNTFPRAFKQVMEGRDIKLVINQTAQDCFGCLESISQIRTATRDKKDTVTRKKHPKKPFQKWMKKRAIKKGNYLRFQRLFYLDRGKLAKIILDDIECLSCDIPLSEIYSVFKTRWETTGSFKSLGDFKTYGKADNTAFRELITAKEIEKNVQEMSKGSAPGPDGITLGDVVKMDPEGSRTMEIFNLWLTTGKIPDMVRGCRTVLIPKSSKPDRLKDINNWRPITIGSILLRLFSRIVTARLSKACPLNPRQRGFIRAAGCSENLKLLQTIIWSAKREHRPLGVVFVDIAKAFDTVSHQHIIHALQQREVDPHIVGLVSNMYENISTYITTKRNTHTDKIQIRVGVKQGDPMSPLLFNLAMDPLLCKLEESGKGYHRGQSSITAMAFADDLVLLSDSWEGMNTNISILETFCNLTGLKTQGQKCHGFYIKPTKKSYTINDCAAWTINGTPLNMIDPGESEKYLGLQFDPWIGIARSGLSTKLDFWLQRIDQAPLKPLQKLDILKTYTIPRLIYIADHSEVKSALLETLDQKIRTAVKEWLHLPPCTCDAILYSSTRDGGLGITKLAGLIPSVQARRLHRIAQSSDDTMKCFMEKEKMEQLHKKLWIQAGGDRENIPSIWEAPPSSEPPNNVSTNSEWEAPTQKDKFPKPCNWRKNEFKKWTKLASQGRGIVNFERDKISNHWIQYYRRIPHRKLLTALQLRANVYPTREFLARGRQDQYIKACRHCDADIESCAHIIGNCPVTQDARIKRHNYICELLLEEAKKKDWVVFKEPHIRDSNKELYKPDLIFVKDGRALVVDVTVRYEAAKSSLEEAAAEKVRKYKHLETEVRHLTNAKDVTFVGFPLGARGKWHQDNFKLLTELGLSKSRQVKMAETFSTVALFSSVDIVHMFASRARKSMVM

SEQ ID NO: 1574 - protein, 1390 aa, synthetic construct
MASCPKPGPPVSAGAMSLESGLTTHSVLAIERGPNSLANSGSDFGGGGLGLPLRLLRVSVGTQTSRSDWVDLVSWSHPGPTSKSQQVDLVSLFPKHRVDLLSKNDQVDLVAQFLPSKFPPNLAENDLALLVNLEFYRSDLHVYECVHKAAHWEGLSGLPEVYEQLAPQPCVGETLHSSLPRDSELFVPEEGSSEKESEDAPKTSPPTPGKHGLEQTGEEKVMVTVPDKNPPCPCCGTRVNSVLNLIEHLKVSHGKRGVCFRCAKCGKENSNYHSVVCHFKKCRGPETEKAPAGEWICEVCNRDFTTKIGLGQHKRLAHPAVRNQERIVASQPKETSNRGAHKRCWTKEEEELLIRLEAQFEGNKNINKLIAEHITTKTAKQISDKRRLLSRKPAEEPREEPGTCHHTRRAAASLRTEPEMSHHAQAEDRDNGPGRRPLPGRAAAGGRTMDEIRRHPDKGNGQQRPTKQKSEEQLQAYYKKTLEERLSAGALNTFPRAFKQVMEGRDIKLVINQTAQDCFGCLESISQIRTATRDKKDTVTREKHPKKPFQKWMKKRAIKKGNYLRFQRLFYLDRGKLAKIILDDIECLSCDIPLSEIYSVFKTRWETTGSFKSLGDFKTYGKADNTAFRELITAKEIEKNVQEMSKGSAPGPDGITLGDVVKMDPEGSRTMEIFNLWLTTGKIPDMVRGCRTVLIPKSSDPDRLKDINNWRPITIGSILLRLFSRIVTARLSKACPLNPRQRGFIRAAGCSENLKLLQTIIWSAKREHRPLGVVFVDIAKAFDTVSHQHIIHALQQREVDPHIVGLVSNMYENISTYITTKRNTHTDKIQIRVGVKQGDPMSPLLFNLAMDPLLCKLEESGKGYHRGQSSITAMAFADDLVLLSDSWENMNTNISILETFCNLTGLKTQGQKCHGFYIKPTKDSYTINDCAAWTINGTPLNMIDPGESEKYLGLQFDPWIGIARSGLSTKLDFWLQRIDQAPLKPLQKTDILKTYTIPRLIYIADHSEVKTALLETLDQKIRTAVKEWLHLPPCTCDAILYSSTRDGGLGITKLAGLIPSVQARRLHRIAQSSDDTMKCFMEKEKMEQLHKKLWIQAGGDRENIPSIWEAPPSSEPPNNVSTNSEWEAPTQKDKFPKPCNWRKNEFKKWTKLASQGRGIVNFERDKISNHWIQYYRRIPHRKLLTALQLRANVYPTREFLARGRQDQYIKACRHCDADIESCAHIIGNCPVTQDARIKRHNKICELLLEEAKKKDWVVFKEPHIRDSNKELYKPDLIFVKDARALVVDVTVRYEAAKSSLEEAAAEKVRKYKHLETEVRHLTNAKDVTFVGFPLGARGKWHQDNFKLLTELGLSKSRQVKMAETFSTVALFSSVDIVHMFASRARKSMVM

SEQ ID NO: 1575 - protein, 1390 aa, synthetic construct
MASCPKPGPPVSAGAMSLESGLTTHSVLAIERGPNSLANSGSDFGGGGLGLPLRLLRVSVGTQTSRSDWVDLVSWSHPGPTSKSQQVDLVSLFPKHRVDLLSKNDQVDLVAQFLPSKFPPNLAENDLALLVNLEFYRSDLHVYEGVHKAAHWEGLSGLPEVYEQLAPQPCVGETLHSSLPRDSELFVPEEGSSEKESEDAPKTSPPTPGKHGLEQTGEEKVMVTVPDKNPPCPCCGTRVNSVLNLIEHLKVSHGKRGVCFRCAKCGKENSNYHSVVCHFKKCRGPETEKAPAGEWICEVCNRDFTTKIGLGQHKRLAHPAVRNQERIVASQPKETSNRGAHKRCWTKEEEELLIRLEAQFEGNKNINKLIAEHITTKTAKQISDKRRLLSRKPAEEPREEPGTCHHTRRAAASLRTEPEMSHHAQAEDRDNGPGRRPLPGRAAAGGRTMDEIRRHPDKGNGQQRPTKQKSEEQLQAYYKKTLEERLSAGALNTFPRAFKQVMEGRDIKLVINQTAQDCFGCLESISQIRTATRDKKDTVTREKHPKKPFQKWMKKRAIKKGNYLRFQRLFYLDRGKLAKIILDDIECLSCDIPLSEIYSVFKTRWETTGSFKSLGDFKTYGKADNTAFRELITAKEIEKNVQEMSKGSAPGPDGITLGDVVKMDPEGSRTMEIFNLWLTTGKIPDMVRGCRTVLIPKSSDPDRLKDINNWRPITIGSILLRLFSRIVTARLSKACPLNPRQRGFIRAAGCSENLKLLQTIIWSAKREHRPLGVVFVDIAKAFDTVSHQHIIHALQQREVDPHIVGLVSNMYENISTYITTKRNTHTDKIQIRVGVKQGDPMSPLLFNLAMDPLLCKLEESGKGYHRGQSSITAMAFADDLVLLSDSWENMNTNISILETFCNLTGLKTQGQKCHGFYIKPTKDSYTINDCAAWTINGTPLNMIDPGESEKYLGLQFDPWIGIARSGLSTKLDFWLQRIDQAPLKPLQKLDILKTYTIPRLIYIADHSEVKTALLETLDQKIRTAVKEWLHLPPCTCDAILYSSTRDGGLGITKLAGLIPSVQARRLHRIAQSSDDTMKCFMEKEKMEQLHKKLWIQAGGDRENIPSIWEAPPSSEPPNNVSTNSEWEAPTQKDKFPKPCNWRKNEFKKWTKLASQGRGIVNFERDKISNHWIQYYRRIPHRKLLTALQLRANVYPTREFLARGRQDQYIKACRHCDADIESCAHIIGNCPVTQDARIKRHNKICELLLEEAKKKDWVVFKEPHIRDSNKELYKPDLIFVKDARALVVDVTVRYEAAKSSLEEAAAEKVRKYKHLETEVRHLTNAKDVTFVGFPLGARGKWHQDNFKLLTELGLSKSRQVKMAETFSTVALFSSVDIVHMFASRARKSMVM

SEQ ID NO: 1576 - protein, 1390 aa, synthetic construct
MASCPKPGPPVSAGAMSLESGLTTHSVLAIERGPNSLANSGSDFGGGGLGLPLRLLRVSVGTQTSRSDWVDLVSWSHPGPTSKSQQVDLVSLFPKHRVDLLSKNDQVDLVAQFLPSKFPPNLAENDLALLVNLEFYRSDLHVYEGVHFAAHWEGLSGLPEVYEQLAPQPCVGETLHSSLPRDSELFVPEEGSSEKESEDAPKTSPPTPGKHGKRQTGEEKVMVTVPDKNPPCPCCGTRVNSVLNLIEHLKVSHGKRRVCFRCAKCGKENSNYHSVVCHFPKCRGPETEKAPAGEWICEVCNRDFTTKIGLGQHKRLAHPAVRNQERIVASQPKETSNRGAHKRCWTKEEEELLIRLEAQFEGNKNINKLIAEHITTKTAKQISDKRRLLSRKPAEEPREEPGTCHHTRRAAASLRTEPEMSHHAQAEDRDNGPGRRPLPGRAAAGGRTMDEIRRHPDKGNGQQRPTKQKSEEQLQAYYKKTLEERLSAGALNTFPRAFKQVMEGRDIKLVINQTAQDCFGCLESISQIRTATRDKKYTVTREKHPKKPFQKWMKKRAIKKGNYLRFQRLFYLDRGKLAKIILDDIECLSCDIPLSEIYSVFKTRWETTGSFKSLGDFKTYGKADNTAFRELITAKEIEKNVQEMSKGSAPGPDGITLGDVVKMDPEFSRTMEIFNLWLTTGKIPDMVRGCRTVLIPKSSKPDRLKDINNWRPITIGSILLRLFSRIVTARLSKACPLNPRQRGFIRAAGCSENLKLLQTIIWSAKREHRPLGVVFVDIAKAFDTVSHQHIIHALQQREVDPHIVGLVSNMYENISTYITTKRNTHTDKIQIRVGVKQGDPMSPLLFNLAMDPLLCKLEESGKGYHRGQSSITAMAFADDLVLLSDSWENMNTNISILETFCNLTGLKTQGQKCHGFYIKPTKDSYTINDCAAWTINGTPLNMIDPGESEKYLGLQFDPWIGIARSGLSTKLDFWLQRIDQAPLKPLQKTDILKTYTIPRLIYIADHSEVKTALLETLDQKIRTAVKEWLHLPPCTCDAILYSSTRDGGLGITKLAGLIPSVQARRLHRIAQSSDDTMKCFMEKEKMEQLHKKLWIQAGGDRENIPSIWEAPPSSEPPNNVSTNSEWEAPTQKDKFPKPCNWRKNEFKKWTKLASQGRGIVNFERDKISNHWIQYYRRIPHRKLLTALQLRANVYPTREFLARGRQDQYIKACRHCDADIESCAHIIGNCPVTQDARIKRHNYICELLLEEAKKKDWVVFKEPHIRDSNKELYKPDLIFVKDGRALVVDVTVRYEAAKSSLEEAAAEKVRKYKHLETEVRHLTNAKDVTFVGFPLGARGKWHQDNFKLLTELGLSKSRQVKMAETFSTVALFSSVDIVHMFASRARKSMVM

SEQ ID NO: 1577 - protein, 1390 aa, synthetic construct; identical to SEQ ID NO: 238

SEQ ID NO: 1578 - protein, 1390 aa, synthetic construct
MASCPKPGPPVSAGAMSLESGLTTHSVLAIERGPNSLANSGSDFGGGGLGLPLRLLRVSVGTQTSRSDWVDLVSWSHPGPTSKSQQVDLVSLFPKHRVDLLSKNDQVDLVAQFLPSKFPPNLAENDLALLVNLEFYRSDLHVYECVHFAAHWEGLSGLPEVYEQLAPQPCVGETLHSSLPRDSELFVPEEGSSEKESEDAPKTSPPTPGKHGLEQTGEEKVMVTVPDKNPPCPCCGTRVNSVLNLIEHLKVSHGKRGVCFRCAKCGKENSNYHSVVCHFPKCRGPETEKAPAGEWICEVCNRDFTTKIGLGQHKRLAHPAVRNQERIVASQPKETSNRGAHKRCWTKEEEELLIRLEAQFEGNKNINKLIAEHITTKTAKQISDKRRLLSRKPAEEPREEPGTCHHTRRAAASLRTEPEMSHHAQAEDRDNGPGRRPLPGRAAAGGRTMDEIRRHPDKGNGQQRPTKQKSEEQLQAYYKKTLEERLSAGALNTFPRAFKQVMEGRDIKLVINQTAQDCFGCLESISQIRTATRDKKDTVTREKHPKKPFQKWMKDRAIKKGNYLRFQRLFYLDRGKLAKIILDDIECLSCDIPLSEIYSVFKTRWETTGSFKSLGDFKTYGKADNTAFRELITAKEIEKNVQEMSKGSAPGPDGITLGDVVKMDPEFSLTMEIFNLWLTTGKIPDMVRGCRTVLIPKSSKPDRLKDINNWRPITIGSILLRLFSRIVTARLSKACPLNPRQRGFIRAAGCSENLKLLQTIIWSAKREHRPLGVVFVDIAKAFDTVSHQHIIHALQQREVDPHIVGLVSNMYENISTYITTKRNTHTDKIQIRVGVKQGDPMSPLLFNLAMDPLLCKLEESGKGYHRGQSSITAMAFADDLVLLSDSWENMNTNISILETFCNLTGLKTQGQKCHGFYIKPTKDSYTINDCAAWTINGTPLNMIDPGESEKYLGLQFDPWIGIARSGLSTKLDFWLQRIDQAPLKPLQKTDILKTYTIPRLIYIADHSEVKTALLETLDQKIRTAVKEWLHLPPCTCDAILYSSTRDGGLGITKLAGLIPSVQARRLHRIAQSSDDTMKCFMEKEKMEQLHKKLWIQAGGDRENIPSIWEAPPSSEPPNNVSTNSEWEAPTQKPKFPKPCNWRKNEFKKWTKLASQGRGIVNFERDKISNHWIQYYRRIPHRKLLTALQLRANVYPTREFLARGRQDQYIKACRHCDADIESCAHIIGNCPVTQDARIKRHNYICELLLEEAKKKDWVVFKEPHIRDSNKELYKPDLIFVKDARALVVDVTVRYEAAKSSLEEAAAEKVRKYKHLETEVRHLTNAKDVTFVGFPLGARGKWHQDNFKLLTELGLSKSRQVKMAETFSTVALFSSVDIVHMFASRARKSMVM

SEQ ID NO: 1579 - protein, 1390 aa, synthetic construct
MASCPKPGPPVSAGAMSLESGLTTHSVLAIERGPNSLANSGSDFGGGGLGLPLRLLRVSVGTQTSRSDWVDLVSWSHPGPTSKSQQVDLVSLFPKHRVDLLSKNDQVDLVAQFLPSKFPPNLAENDLALLVNLEFYRSDLHVYECVHFAAHWEGLSGLPEVYEQLAPQPCVGETLHSSLPRDSELFVPEEGSSEKESEDAPKTSPPTPGKHGLEQTGEEKVMVTVPDKNPPCPCCGTRVNSVLNLIEHLKVSHGKRGVCFRCAKCGKENSNYHSVVCHFPKCRGPETEKAPAGEWICEVCNRDFTTKIGLGQHKRLAHPAVRNQERIVASQPKETSNRGAHKRCWTKEEEELLIRLEAQFEGNKNINKLIAEHITTKTAKQISDKRRLLSRKPAEEPREEPGTCHHTRRAAASLRTEPEMSHHAQAEDRDNGPGRRPLPGRAAAGGRTMDEIRRHPDKGNGQQRPTKQKSEEQLQAYYKKTLEERLSAGALNTFPRAFKQVMEGRDIKLVINQTAQDCFGCLESISQIRTATRDKKYTVTREKHPKKPFQKWMKDRAIKKGNYLRFQRLFYLDRGKLAKIILDDIECLSCDIPLSEIYSVFKTRWETTGSFKSLGDFKTYGKADNTAFRELITAKEIEKNVQEMSKGSAPGPDGITLGDVVKMDPEFSLTMEIFNLWLTTGKIPDMVRGCRTVLIPKSSKPDRLKDINNWRPITIGSILLRLFSRIVTARLSKACPLNPRQRGFIRAAGCSENLKLLQTIIWSAKREHRPLGVVFVDIAKAFDTVSHQHIIHALQQREVDPHIVGLVSNMYENISTYITTKRNTHTDKIQIRVGVKQGDPMSPLLFNLAMDPLLCKLEESGKGYHRGQSSITAMAFADDLVLLSDSWENMNTNISILETFCNLTGLKTQGQKCHGFYIKPTKDSYTINDCAAWTINGTPLNMIDPGESEKYLGLQFDPWIGIARSGLSTKLDFWLQRIDQAPLKPLQKTDILKTYTIPRLIYIADHSEVKTALLETLDQKIRTAVKEWLHLPPCTCDAILYSSTRDGGLGITKLAGLIPSVQARRLHRIAQSSDDTMKCFMEKEKMEQLHKKLWIQAGGDRENIPSIWEAPPSSEPPNNVSTNSEWEAPTQKPKFPKPCNWRKNEFKKWTKLASQGRGIVNFERDKISNHWIQYYRRIPHRKLLTALQLRANVYPTREFLARGRQDQYIKACRHCDADIESCAHIIGNCPVTQDARIKRHNYICELLLEEAKKKDWVVFKEPHIRDSNKELYKPDLIFVKDARALVVDVTVRYEAAKSSLEEAAAEKVRKYKHLETEVRHLTNAKDVTFVGFPLGARGKWHQDNFKLLTELGLSKSRQVKMAETFSTVALFSSVDIVHMFASRARKSMVM

SEQ ID NO: 1580 - protein, 1390 aa, synthetic construct; identical to SEQ ID NO: 1375

SEQ ID NO: 1581 - protein, 1390 aa, synthetic construct; identical to SEQ ID NO: 1443

SEQ ID NO: 1582 - protein, 1671 aa, synthetic construct
MGTALTPLLTKFATRYEMGTTPEEVANTLKQTCFKGQVNDSQMVALLIVADQYKLNPFTKELYAFPDKNNGIVPVVGVDGWARIINENPQFDGMEFSMDQQGTECTCKIYRKDRSHAISATEYMAECKRNTQPWQSHPRRMLRHKAMIQCARLAFGFAGIYDQDEAERIVERDVTPAEQYEDVSEAICLIKDSPTMEDLQAAFSNAWKAYKTKGARDQLTAAKDQRKKELLDAPIDVEFEETGDDRAASGGSSGGSSGSETPGTSESATPESSGGSSGGSSMASCPKPGPPVSAGAMSLESGLTTHSVLAIERGPNSLANSGSDFGGGGLGLPLRLLRVSVGTQTSRSDWVDLVSWSHPGPTSKSQQVDLVSLFPKHRVDLLSKNDQVDLVAQFLPSKFPPNLAENDLALLVNLEFYRSDLHVYECVHFAAHWEGLSGLPEVYEQLAPQPCVGETLHSSLPRDSELFVPEEGSSEKESEDAPKTSPPTPGKHGLEQTGEEKVMVTVPDKNPPCPCCGTRVNSVLNLIEHLKVSHGKRGVCFRCAKCGKENSNYHSVVCHFPKCRGPETEKAPAGEWICEVCNRDFTTKIGLGQHKRLAHPAVRNQERIVASQPKETSNRGAHKRCWTKEEEELLIRLEAQFEGNKNINKLIAEHITTKTAKQISDKRRLLSRKPAEEPREEPGTCHHTRRAAASLRTEPEMSHHAQAEDRDNGPGRRPLPGRAAAGGRTMDEIRRHPDKGNGQQRPTKQKSEEQLQAYYKKTLEERLSAGALNTFPRAFKQVMEGRDIKLVINQTAQDCFGCLESISQIRTATRDKKDTVTREKHPKKPFQKWMKDRAIKKGNYLRFQRLFYLDRGKLAKIILDDIECLSCDIPLSEIYSVFKTRWETTGSFKSLGDFKTYGKADNTAFRELITAKEIEKNVQEMSKGSAPGPDGITLGDVVKMDPEFSRTMEIFNLWLTTGKIPDMVRGCRTVLIPKSSKPDRLKDINNWRPITIGSILLRLFSRIVTARLSKACPLNPRQRGFIRAAGCSENLKLLQTIIWSAKREHRPLGVVFVDIAKAFDTVSHQHIIHALQQREVDPHIVGLVSNMYENISTYITTKRNTHTDKIQIRVGVKQGDPMSPLLFNLAMDPLLCKLEESGKGYHRGQSSITAMAFADDLVLLSDSWENMNTNISILETFCNLTGLKTQGQKCHGFYIKPTKDSYTINDCAAWTINGTPLNMIDPGESEKYLGLQFDPWIGIARSGLSTKLDFWLQRIDQAPLKPLQKTDILKTYTIPRLIYIADHSEVKTALLETLDQKIRTAVKEWLHLPPCTCDAILYSSTRDGGLGITKLAGLIPSVQARRLHRIAQSSDDTMKCFMEKEKMEQLHKKLWIQAGGDRENIPSIWEAPPSSEPPNNVSTNSEWEAPTQKPKFPKPCNWRKNEFKKWTKLASQGRGIVNFERDKISNHWIQYYRRIPHRKLLTALQLRANVYPTREFLARGRQDQYIKACRHCDADIESCAHIIGNCPVTQDARIKRHNYICELLLEEAKKKDWVVFKEPHIRDSNKELYKPDLIFVKDARALVVDVTVRYEAAKSSLEEAAAEKVRKYKHLETEVRHLTNAKDVTFVGFPLGARGKWHQDNFKLLTELGLSKSRQVKMAETFSTVALFSSVDIVHMFASRARKSMVM

SEQ ID NO: 1583 - protein, 1671 aa, synthetic construct
MGTALTPLLTKFATRYEMGTTPEEVANTLKQTCFKGQVNDSQMVALLIVADQYKLNPFTKELYAFPDKNNGIVPVVGVDGWARIINENPQFDGMEFSMDQQGTECTCKIYRKDRSHAISATEYMAECKRNTQPWQSHPRRMLRHKAMIQCARLAFGFAGIYDQDEAERIVERDVTPAEQYEDVSEAICLIKDSPTMEDLQAAFSNAWKAYKTKGARDQLTAAKDQRKKELLDAPIDVEFEETGDDRAASGGSSGGSSGSETPGTSESATPESSGGSSGGSSMASCPKPGPPVSAGAMSLESGLTTHSVLAIERGPNSLANSGSDFGGGGLGLPLRLLRVSVGTQTSRSDWVDLVSWSHPGPTSKSQQVDLVSLFPKHRVDLLSKNDQVDLVAQFLPSKFPPNLAENDLALLVNLEFYRSDLHVYECVHFAAHWEGLSGLPEVYEQLAPQPCVGETLHSSLPRDSELFVPEEGSSEKESEDAPKTSPPTPGKHGLEQTGEEKVMVTVPDKNPPCPCCGTRVNSVLNLIEHLKVSHGKRGVCFRCAKCGKENSNYHSVVCHFPKCRGPETEKAPAGEWICEVCNRDFTTKIGLGQHKRLAHPAVRNQERIVASQPKETSNRGAHKRCWTKEEEELLIRLEAQFEGNKNINKLIAEHITTKTAKQISDKRRLLSRKPAEEPREEPGTCHHTRRAAASLRTEPEMSHHAQAEDRDNGPGRRPLPGRAAAGGRTMDEIRRHPDKGNGQQRPTKQKSEEQLQAYYKKTLEERLSAGALNTFPRAFKQVMEGRDIKLVINQTAQDCFGCLESISQIRTATRDKKDTVTREKHPKKPFQKWMKKRAIKKGNYLRFQRLFYLDRGKLAKIILDDIECLSCDIPLSEIYSVFKTRWETTGSFKSLGDFKTYGKADNTAFRELITAKEIEKNVQEMSKGSAPGPDGITLGDVVKMDPEFSRTMEIFNLWLTTGKIPDMVRGCRTVLIPKSSKPDRLKDINNWRPITIGSILLRLFSRIVTARLSKACPLNPRQRGFIRAAGCSENLKLLQTIIWSAKREHRPLGVVFVDIAKAFDTVSHQHIIHALQQREVDPHIVGLVSNMYENISTYITTKRNTHTDKIQIRVGVKQGDPMSPLLFNLAMDPLLCKLEESGKGYHRGQSSITAMAFADDLVLLSDSWENMNTNISILETFCNLTGLKTQGQKCHGFYIKPTKDSYTINDCAAWTINGTPLNMIDPGESEKYLGLQFDPWIGIARSGLSTKLDFWLQRIDQAPLKPLQKTDILKTYTIPRLIYIADHSEVKTALLETLDQKIRTAVKEWLHLPPCTCDAILYSSTRDGGLGITKLAGLIPSVQARRLHRIAQSSDDTMKCFMEKEKMEQLHKKLWIQAGGDRENIPSIWEAPPSSEPPNNVSTNSEWEAPTQKDKFPKPCNWRKNEFKKWTKLASQGRGIVNFERDKISNHWIQYYRRIPHRKLLTALQLRANVYPTREFLARGRQDQYIKACRHCDADIESCAHIIGNCPVTQDARIKRHNYICELLLEEAKKKDWVVFKEPHIRDSNKELYKPDLIFVKDARALVVDVTVRYEAAKSSLEEAAAEKVRKYKHLETEVRHLTNAKDVTFVGFPLGARGKWHQDNFKLLTELGLSKSRQVKMAETFSTVALFSSVDIVHMFASRARKSMVM

SEQ ID NO: 1584 - protein, 1671 aa, synthetic construct
MGTALTPLLTKFATRYEMGTTPEEVANTLKQTCFKGQVNDSQMVALLIVADQYKLNPFTKELYAFPDKNNGIVPVVGVDGWARIINENPQFDGMEFSMDQQGTECTCKIYRKDRSHAISATEYMAECKRNTQPWQSHPRRMLRHKAMIQCARLAFGFAGIYDQDEAERIVERDVTPAEQYEDVSEAICLIKDSPTMEDLQAAFSNAWKAYKTKGARDQLTAAKDQRKKELLDAPIDVEFEETGDDRAASGGSSGGSSGSETPGTSESATPESSGGSSGGSSMASCPKPGPPVSAGAMSLESGLTTHSVLAIERGPNSLANSGSDFGGGGLGLPLRLLRVSVGTQTSRSDWVDLVSWSHPGPTSKSQQVDLVSLFPKHRVDLLSKNDQVDLVAQFLPSKFPPNLAENDLALLVNLEFYRSDLHVYECVHFAAHWEGLSGLPEVYEQLAPQPCVGETLHSSLPRDSELFVPEEGSSEKESEDAPKTSPPTPGKHGLEQTGEEKVMVTVPDKNPPCPCCGTRVNSVLNLIEHLKVSHGKRGVCFRCAKCGKENSNYHSVVCHFKKCRGPETEKAPAGEWICEVCNRDFTTKIGLGQHKRLAHPAVRNQERIVASQPKETSNRGAHKRCWTKEEEELLIRLEAQFEGNKNINKLIAEHITTKTAKQISDKRRLLSRKPAEEPREEPGTCHHTRRAAASLRTEPEMSHHAQAEDRDNGPGRRPLPGRAAAGGRTMDEIRRHPDKGNGQQRPTKQKSEEQLQAYYKKTLEERLSAGALNTFPRAFKQVMEGRDIKLVINQTAQDCFGCLESISQIRTATRDKKDTVTREKHPKKPFQKWMKKRAIKKGNYLRFQRLFYLDRGKLAKIILDDIECLSCDIPLSEIYSVFKTRWETTGSFKSLGDFKTYGKADNTAFRELITAKEIEKNVQEMSKGSAPGPDGITLGDVVKMDPEFSRTMEIFNLWLTTGKIPDMVRGCRTVLIPKSSKPDRLKDINNWRPITIGSILLRLFSRIVTARLSKACPLNPRQRGFIRAAGCSENLKLLQTIIWSAKREHRPLGVVFVDIAKAFDTVSHQHIIHALQQREVDPHIVGLVSNMYENISTYITTKRNTHTDKIQIRVGVKQGDPMSPLLFNLAMDPLLCKLEESGKGYHRGQSSITAMAFADDLVLLSDSWENMNTNISILETFCNLTGLKTQGQKCHGFYIKPTKDSYTINDCAAWTINGTPLNMIDPGESEKYLGLQFDPWIGIARSGLSTKLDFWLQRIDQAPLKPLQKTDILKTYTIPRLIYIADHSEVKTALLETLDQKIRTAVKEWLHLPPCTCDAILYSSTRDGGLGITKLAGLIPSVQARRLHRIAQSSDDTMKCFMEKEKMEQLHKKLWIQAGGDRENIPSIWEAPPSSEPPNNVSTNSEWEAPTQKDKFPKPCNWRKNEFKKWTKLASQGRGIVNFERDKISNHWIQYYRRIPHRKLLTALQLRANVYPTREFLARGRQDQYIKACRHCDADIESCAHIIGNCPVTQDARIKRHNYICELLLEEAKKKDWVVFKEPHIRDSNKELYKPDLIFVKDARALVVDVTVRYEAAKSSLEEAAAEKVRKYKHLETEVRHLTNAKDVTFVGFPLGARGKWHQDNFKLLTELGLSKSRQVKMAETFSTVALFSSVDIVHMFASRARKSMVM

SEQ ID NO: 1585 - protein, 1390 aa, synthetic construct; identical to SEQ ID NO: 238

SEQ ID NO: 1586 - protein, 1686 aa, synthetic construct; identical to SEQ ID NO: 148

SEQ ID NO: 1587 - protein, 1390 aa, synthetic construct
MASCPKPGPPVSAGAMSLESGLTTHSVLAIERGPNSLANSGSDFGGGGLGLPLRLLRVSVGTQTSRSDWVDLVSWSHPGPTSKSQQVDLVSLFPKHRVDLLSKNDQVDLVAQFLPSKFPPNLAENDLALLVNLEFYRSDLHVYECVHFAAHWEGLSGLPEVYEQLAPQPCVGETLHSSLPRDSELFVPEEGSSEKESEDAPKTSPPTPGKHGLEQTGEEKVMVTVPDKNPPCPCCGTRVNSVLNLIEHLKVSHGKRGVCFRCAKCGKENSNYHSVVCHFPKCRGPETEKAPAGEWICEVCNRDFTTKIGLGQHKRLAHPAVRNQERIVASQPKETSNRGAHKRCWTKEEEELLIRLEAQFEGNKNINKLIAEHITTKTAKQISDKRRLLSRKPAEEPREEPGTCHHTRRAAASLRTEPEMSHHAQAEDRDNGPGRRPLPGRAAAGGRTMDEIRRHPDKGNGQQRPTKQKSEEQLQAYYKKTLEERLSAGALNTFPRAFKQVMEGRDIKLVINQTAQDCFGCLESISQIRTATRDKKDTVTRKKHPKKPFQKWMKKRAIKKGNYLRFQRLFYLDRGKLAKIILDDIECLSCDIPLSEIYSVFKTRWETTGSFKSLGDFKTYGKADNTAFRELITAKEIEKNVQEMSKGSAPGPDGITLGDVVKMDPEFSRTMEIFNLWLTTGKIPDMVRGCRTVLIPKSSKPDRLKDINNWRPITIGSILLRLFSRIVTARLSKACPLNPRQRGFIRAAGCSENLKLLQTIIWSAKREHRPLGVVFVDIAKAFDTVSHQHIIHALQQREVDPHIVGLVSNMYENISTYITTKRNTHTDKIQIRVGVKQGDPMSPLLFNLAMDPLLCKLEESGKGYHRGQSSITAMAFADDLVLLSDSWENMNTNISILETFCNLTGLKTQGQKCHGFYIKPTKKSYTINDCAAWTINGTPLNMIDPGESEKYLGLQFDPWIGIARSGLSTKLDFWLQRIDQAPLKPLQKLDILKTYTIPRLIYIADHSEVKSALLETLDQKIRTAVKEWLHLPPCTCDAILYSSTRDGGLGITKLAGLIPSVQARRLHRIAQSSDDTMKCFMEKEKMEQLHKKLWIQAGGDRENIPSIWEAPPSSEPPNNVSTNSEWEAPTQKDKFPKPCNWRKNEFKKWTKLASQGRGIVNFERDKISNHWIQYYRRIPHRKLLTALQLRANVYPTREFLARGRQDQYIKACRHCDADIESCAHIIGNCPVTQDARIKRHNYICELLLEEAKKKDWVVFKEPHIRDSNKELYKPDLIFVKDGRALVVDVTVRYEAAKSSLEEAAAEKVRKYKHLETEVRHLTNAKDVTFVGFPLGARGKWHQDNFKLLTELGLSKSRQVKMAETFSTVALFSSVDIVHMFASRARKSMVM

SEQ ID NO: 1588 - protein, 1390 aa, synthetic construct
MASCPKPGPPVSAGAMSLESGLTTHSVLAIERGPNSLANSGSDFGGGGLGLPLRLLRVSVGTQTSRSDWVDLVSWSHPGPTSKSQQVDLVSLFPKHRVDLLSKNDQVDLVAQFLPSKFPPNLAENDLALLVNLEFYRSDLHVYECVHFAAHWEGLSGLPEVYEQLAPQPCVGETLHSSLPRDSELFVPEEGSSEKESEDAPKTSPPTPGKHGLEQTGEEKVMVTVPDKNPPCPCCGTRVNSVLNLIEHLKVSHGKRGVCFRCAKCGKENSNYHSVVCHFPKCRGPETEKAPAGEWICEVCNRDFTTKIGLGQHKRLAHPAVRNQERIVASQPKETSNRGAHKRCWTKEEEELLIRLEAQFEGNKNINKLIAEHITTKTAKQISDKRRLLSRKPAEEPREEPGTCHHTRRAAASLRTEPEMSHHAQAEDRDNGPGRRPLPGRAAAGGRTMDEIRRHPDKGNGQQRPTKQKSEEQLQAYYKKTLEERLSAGALNTFPRAFKQVMEGRDIKLVINQTAQDCFGCLESISQIRTATRDKKDTVTRKKHPKKPFQKWMKKRAIKKGNYLRFQRLFYLDRGKLAKIILDDIECLSCDIPLSEIYSVFKTRWETTGSFKSLGDFKTYGKADNTAFRELITAKEIEKNVQEMSKGSAPGPDGITLGDVVKMDPEFSRTMEIFNLWLTTGKIPDMVRGCRTVLIPKSSKPDRLKDINNWRPITIGSILLRLFSRIVTARLSKACPLNPRQRGFIRAAGCSENLKLLQTIIWSAKREHRPLGVVFVDIAKAFDTVSHQHIIHALQQREVDPHIVGLVSNMYENISTYITTKRNTHTDKIQIRVGVKQGDPMSPLLFNLAMDPLLCKLEESGKGYHRGQSSITAMAFADDLVLLSDSWENMNTNISILETFCNLTGLKTQGQKCHGFYIKPTKKSYTINDCAAWTINGTPLNMIDPGESEKYLGLQFDPWIGIARSGLSTKLDFWLQRIDQAPLKPLQKLDILKTYTIPRLIYIADHSEVKSALLETLDQKIRTAVKEWLHLPPCTCDAILYSSTRDGGLGITKLAGLIPSVQARRLHRIAQSSDDTMKCFMEKEKMEQLHKKLWIQAGGDRENIPSIWEAPPSSEPPNNVSTNSEWEAPTQKDKFPKPCNWRKNEFKKWTKLASQGRGIVNFERDKISNHWIQYYRRIPHRKLLTALQLRANVYPTREFLARGRQDQYIKACRHCDADIESCAHIIGNCPVTQDARIKRHNYICELLLEEAKKKDWVVFKEPHIRDSNKELYKPDLIFVKDARALVVDVTVRYEAAKSSLEEAAAEKVRKYKHLETEVRHLTNAKDVTFVGFPLGARGKWHQDNFKLLTELGLSKSRQVKMAETFSTVALFSSVDIVHMFASRARKSMVM

SEQ ID NO: 1589 - protein, 1390 aa, synthetic construct
MASCPKPGPPVSAGAMSLESGLTTHSVLAIERGPNSLANSGSDFGGGGLGLPLRLLRVSVGTQTSRSDWVDLVSWSHPGPTSKSQQVDLVSLFPKHRVDLLSKNDQVDLVAQFLPSKFPPNLAENDLALLVNLEFYRSDLHVYECVHFAAHWEGLSGLPEVYEQLAPQPCVGETLHSSLPRDSELFVPEEGSSEKESEDAPKTSPPTPGKHGLEQTGEEKVMVTVPDKNPPCPCCGTRVNSVLNLIEHLKVSHGKRGVCFRCAKCGKENSNYHSVVCHFPKCRGPETEKAPAGEWICEVCNRDFTTKIGLGQHKRLAHPAVRNQERIVASQPKETSNRGAHKRCWTKEEEELLIRLEAQFEGNKNINKLIAEHITTKTAKQISDKRRLLSRKPAEEPREEPGTCHHTRRAAASLRTEPEMSHHAQAEDRDNGPGRRPLPGRAAAGGRTMDEIRRHPDKGNGQQRPTKQKSEEQLQAYYKKTLEERLSAGALNTFPRAFKQVMEGRDIKLVINQTAQDCFGCLESISQIRTATRDKKDTVTRKKHPKKPFQKWMKKRAIKKGNYLRFQRLFYLDRGKLAKIILDDIECLSCDIPLSEIYSVFKTRWETTGSFKSLGDFKTYGKADNTAFRELITAKEIEKNVQEMSKGSAPGPDGITLGDVVKMDPEFSRTMEIFNLWLTTGKIPDMVRGCRTVLIPKSSKPDRLKDINNWRPITIGSILLRLFSRIVTARLSKACPLNPRQRGFIRAAGCSENLKLLQTIIWSAKREHRPLGVVFVDIAKAFDTVSHQHIIHALQQREVDPHIVGLVSNMYENISTYITTKRNTHTDKIQIRVGVKQGDPMSPLLFNLAMDPLLCKLEESGKGYHRGQSSITAMAFADDLVLLSDSWENMNTNISILETFCNLTGLKTQGQKCHGFYIKPTKKSYTINDCAAWTINGTPLNMIDPGESEKYLGLQFDPWIGIARSGLSTKLDFWLQRIDQAPLKPLQKLDILKTYTIPRLIYIADHSEVKTALLETLDQKIRTAVKEWLHLPPCTCDAILYSSTRDGGLGITKLAGLIPSVQARRLHRIAQSSDDTMKCFMEKEKMEQLHKKLWIQAGGDRENIPSIWEAPPSSEPPNNVSTNSEWEAPTQKDKFPKPCNWRKNEFKKWTKLASQGRGIVNFERDKISNHWIQYYRRIPHRKLLTALQLRANVYPTREFLARGRQDQYIKACRHCDADNESCAHIIGNCPVTQDARIKRHNYICELLLEEAKKKDWVVFKEPHIRDSNKELYKPDLIFVKDGRALVVDVTVRYEAAKSSLEEAAAEKVRKYKHLETEVRHLTNAKDVTFVGFPLGARGKWHQDNFKLLTELGLSKSRQVKMAETFSTVALFSSVDIVHMFASRARKSMVM

SEQ ID NO: 1590 - protein, 1390 aa, synthetic construct
MASCPKPGPPVSAGAMSLESGLTTHSVLAIERGPNSLANSGSDFGGGGLGLPLRLLRVSVGTQTSRSDWVDLVSWSHPGPTSKSQQVDLVSLFPKHRVDLLSKNDQVDLVAQFLPSKFPPNLAENDLALLVNLEFYRSDLHVYECVHFAAHWEGLSGLPEVYEQLAPQPCVGETLHSSLPRDSELFVPEEGSSEKESEDAPKTSPPTPGKHGLEQTGEEKVMVTVPDKNPPCPCCGTRVNSVLNLIEHLKVSHGKRGVCFRCAKCGKENSNYHSVVCHFPKCRGPETEKAPAGEWICEVCNRDFTTKIGLGQHKRLAHPAVRNQERIVASQPKETSNRGAHKRCWTKEEEELLIRLEAQFEGNKNINKLIAEHITTKTAKQISDKRRLLSRKPAEEPREEPGTCHHTRRAAASLRTEPEMSHHAQAEDRDNGPGRRPLPGRAAAGGRTMDEIRRHPDKGNGQQRPTKQKSEEQLQAYYKKTLEERLSAGALNTFPRAFKQVMEGRDIKLVINQTAQDCFGCLESISQIRTATRDKKDTVTRKKHPKKPFQKWMKKRAIKKGNYLRFQRLFYLDRGKLAKIILDDIECLSCDIPLSEIYSVFKTRWETTGSFKSLGDFKTYGKADNTAFRELITAKEIEKNVQEMSKGSAPGPDGITLGDVVKMDPEGSRTMEIFNLWLTTGKIPDMVRGCRTVLIPKSSKPDRLKDINNWRPITIGSILLRLFSRIVTARLSKACPLNPRQRGFIRAAGCSENLKLLQTIIWSAKREHRPLGVVFVDIAKAFDTVSHQHIIHALQQREVDPHIVGLVSNMYENISTYITTKRNTHTDKIQIRVGVKQGDPMSPLLFNLAMDPLLCKLEESGKGYHRGQSSITAMAFADDLVLLSDSWENMNTNISILETFCNLTGLKTQGQKCHGFYIKPTKKSYTINDCAAWTINGTPLNMIDPGESEKYLGLQFDPWIGIARSGLSTKLDFWLQRIDQAPLKPLQKLDILKTYTIPRLIYIADHSEVKTALLETLDQKIRTAVKEWLHLPPCTCDAILYSSTRDGGLGITKLAGLIPSVQARRLHRIAQSSDDTMKCFMEKEKMEQLHKKLWIQAGGDRENIPSIWEAPPSSEPPNNVSTNSEWEAPTQKDKFPKPCNWRKNEFKKWTKLASQGRGIVNFERDKISNHWIQYYRRIPHRKLLTALQLRANVYPTREFLARGRQDQYIKACRHCDADNESCAHIIGNCPVTQDARIKRHNKICELLLEEAKKKDWVVFKEPHIRDSNKELYKPDLIFVKDGRALVVDVTVRYEAAKSSLEEAAAEKVRKYKHLETEVRHLTNAKDVTFVGFPLGARGKWHQDNFKLLTELGLSKSRQVKMAETFSTVALFSSVDIVHMFASRARKSMVM

SEQ ID NO: 1591 - protein, 1390 aa, synthetic construct
MASCPKPGPPVSAGAMSLESGLTTHSVLAIERGPNSLANSGSDFGGGGLGLPLRLLRVSVGTQTSRSDWVDLVSWSHPGPTSKSQQVDLVSLFPKHRVDLLSKNDQVDLVAQFLPSKFPPNLAENDLALLVNLEFYRSDLHVYECVHFAAHWEGLSGLPEVYEQLAPQPCVGETLHSSLPRDSELFVPEEGSSEKESEDAPKTSPPTPGKHGLEQTGEEKVMVTVPDKNPPCPCCGTRVNSVLNLIEHLKVSHGKRGVCFRCAKCGKENSNYHSVVCHFPKCRGPETEKAPAGEWICEVCNRDFTTKIGLGQHKRLAHPAVRNQERIVASQPKETSNRGAHKRCWTKEEEELLIRLEAQFEGNKNINKLIAEHITTKTAKQISDKRRLLSRKPAEEPREEPGTCHHTRRAAASLRTEPEMSHHAQAEDRDNGPGRRPLPGRAAAGGRTMDEIRRHPDKGNGQQRPTKQKSEEQLQAYYKKTLEERLSAGALNTFPRAFKQVMEGRDIKLVINQTAQDCFGCLESISQIRTATRDKKDTVTRKKHPKKPFQKWMKKRAIKKGNYLRFQRLFYLDRGKLAKIILDDIECLSCDIPLSEIYSVFKTRWETTGSFKSLGDFKTYGKADNTAFRELITAKEIEKNVQEMSKGSAPGPDGITLGDVVKMDPEFSRTMEIFNLWLTTGKIPDMVRGCRTVLIPKSSKPDRLKDINNWRPITIGSILLRLFSRIVTARLSKACPLNPRQRGFIRAAGCSENLKLLQTIIWSAKREHRPLGVVFVDIAKAFDTVSHQHIIHALQQREVDPHIVGLVSNMYENISTYITTKRNTHTDKIQIRVGVKQGDPMSPLLFNLAMDPLLCKLEESGKGYHRGQSSITAMAFADDLVLLSDSWENMNTNISILETFCNLTGLKTQGQKCHGFYIKPTKKSYTINDCAAWTINGTPLNMIDPGESEKYLGLQFDPWIGIARSGLSTKLDFWLQRIDQAPLKPLQKLDILKTYTIPRLIYIADHSEVKTALLETLDQKIRTAVKEWLHLPPCTCDAILYSSTRDGGLGITKLAGLIPSVQARRLHRIAQSSDDTMKCFMEKEKMEQLHKKLWIQAGGDRENIPSIWEAPPSSEPPNNVSTNSEWEAPTQKDKFPKPCNWRKNEFKKWTKLASQGRGIVNFERDKISNHWIQYYRRIPHRKLLTALQLRANVYPTREFLARGRQDQYIKACRHCDADNESCAHIIGNCPVTQDARIKRHNKICELLLEEAKKKDWVVFKEPHIRDSNKELYKPDLIFVKDGRALVVDVTVRYEAAKSSLEEAAAEKVRKYKHLETEVRHLTNAKDVTFVGFPLGARGKWHQDNFKLLTELGLSKSRQVKMAETFSTVALFSSVDIVHMFASRARKSMVM

SEQ ID NO: 1592 - protein, 1390 aa, synthetic construct
MASCPKPGPPVSAGAMSLESGLTTHSVLAIERGPNSLANSGSDFGGGGLGLPLRLLRVSVGTQTSRSDWVDLVSWSHPGPTSKSQQVDLVSLFPKHRVDLLSKNDQVDLVAQFLPSKFPPNLAENDLALLVNLEFYRSDLHVYECVHFAAHWEGLSGLPEVYEQLAPQPCVGETLHSSLPRDSELFVPEEGSSEKESEDAPKTSPPTPGKHGLEQTGEEKVMVTVPDKNPPCPCCGTRVNSVLNLIEHLKVSHGKRGVCFRCAKCGKENSNYHSVVCHFPKCRGPETEKAPAGEWICEVCNRDFTTKIGLGQHKRLAHPAVRNQERIVASQPKETSNRGAHKRCWTKEEEELLIRLEAQFEGNKNINKLIAEHITTKTAKQISDKRRLLSRKPAEEPREEPGTCHHTRRAAASLRTEPEMSHHAQAEDRDNGPGRRPLPGRAAAGGRTMDEIRRHPDKGNGQQRPTKQKSEEQLQAYYKKTLEERLSAGALNTFPRAFKQVMEGRDIKLVINQTAQDCFGCLESISQIRTATRDKKYTVTREKHPKKPFQKWMKDRAIKKGNYLRFQRLFYLDRGKLAKIILDDIECLSCDIPLSEIYSVFKTRWETTGSFKSLGDFKTYGKADNTAFRELITAKEIEKNVQEMSKGSAPGPDGITLGDVVKMDPEFSLTMEIFNLWLTTGKIPDMVRGCRTVLIPKSSKPDRLKDINNWRPITIGSILLRLFSRIVTARLSKACPLNPRQRGFIRAAGCSENLKLLQTIIWSAKREHRPLGVVFVDIAKAFDTVSHQHIIHALQQREVDPHIVGLVSNMYENISTYITTKRNTHTDKIQIRVGVKQGDPMSPLLFNLAMDPLLCKLEESGKGYHRGQSSITAMAFADDLVLLSDSWENMNTNISILETFCNLTGLKTQGQKCHGFYIKPTKDSYTINDCAAWTINGTPLNMIDPGESEKYLGLQFDPWIGIARSGLSTKLDFWLQRIDQAPLKPLQKTDILKTYTIPRLIYIADHSEVKAALLETLDQKIRTAVKEWLHLPPCTCDAILYSSTRDGGLGITKLAGLIPSVQARRLHRIAQSSDDTMKCFMEKEKMEQLHKKLWIQAGGDRENIPSIWEAPPSSEPPNNVSTNSEWEAPTQKPKFPKPCNWRKNEFKKWTKLASQGRGIVNFERDKISNHWIQYYRRIPHRKLLTALQLRANVYPTREFLARGRQDQYIKACRHCDADIESCAHIIGNCPVTQDARIKRHNYICELLLEEAKKKDWVVFKEPHIRDSNKELYKPDLIFVKDARALVVDVTVRYEAAKSSLEEAAAEKVRKYKHLETEVRHLTNAKDVTFVGFPLGARGKWHQDNFKLLTELGLSKSRQVKMAETFSTVALFSSVDIVHMFASRARKSMVM

SEQ ID NO: 1593 - protein, 1390 aa, synthetic construct
MASCPKPGPPVSAGAMSLESGLTTHSVLAIERGPNSLANSGSDFGGGGLGLPLRLLRVSVGTQTSRSDWVDLVSWSHPGPTSKSQQVDLVSLFPKHRVDLLSKNDQVDLVAQFLPSKFPPNLAENDLALLVNLEFYRSDLHVYECVHFAAHWEGLSGLPEVYEQLAPQPCVGETLHSSLPRDSELFVPEEGSSEKESEDAPKTSPPTPGKHGLEQTGEEKVMVTVPDKNPPCPCCGTRVNSVLNLIEHLKVSHGKRGVCFRCAKCGKENSNYHSVVCHFKKCRGPETEKAPAGEWICEVCNRDFTTKIGLGQHKRLAHPAVRNQERIVASQPKETSNRGAHKRCWTKEEEELLIRLEAQFEGNKNINKLIAEHITTKTAKQISDKRRLLSRKPAEEPREEPGTCHHTRRAAASLRTEPEMSHHAQAEDRDNGPGRRPLPGRAAAGGRTMDEIRRHPDKGNGQQRPTKQKSEEQLQAYYKKTLEERLSAGALNTFPRAFKQVMEGRDIKLVINQTAQDCFGCLESISQIRTATRDKKDTVTREKHPKKPFQKWMKKRAIKKGNYLRFQRLFYLDRGKLAKIILDDIECLSCDIPLSEIYSVFKTRWETTGSFKSLGDFKTYGKADNTAFRELITAKEIEKNVQEMSKGSAPGPDGITLGDVVKMDPEFSRTMEIFNLWLTTGKIPDMVRGCRTVLIPKSSKPDRLKDINNWRPITIGSILLRLFSRIVTARLSKACPLNPRQRGFIRAAGCSENLKLLQTIIWSAKREHRPLGVVFVDIAKAFDTVSHQHIIHALQQREVDPHIVGLVSNMYENISTYITTKRNTHTDKIQIRVGVKQGDPMSPLLFNLAMDPLLCKLEESGKGYHRGQSSITAMAFADDLVLLSDSWENMNTNISILETFCNLTGLKTQGQKCHGFYIKPTKDSYTINDCAAWTINGTPLNMIDPGESEKYLGLQFDPWIGIARSGLSTKLDFWLQRIDQAPLKPLQKTDILKTYTIPRLIYIADHSEVKTALLETLDQKIRTAVKEWLHLPPCTCDAILYSSTRDGGLGITKLAGLIPSVQARRLHRIAQSSDDTMKCFMEKEKMEQLHKKLWIQAGGDRENIPSIWEAPPSSEPPNNVSTNSEWEAPTQKPKFPKPCNWRKNEFKKWTKLASQGRGIVNFERDKISNHWIQYYRRIPHRKLLTALQLRANVYPTREFLARGRQDQYIKACRHCDADIESCAHIIGNCPVTQDARIKRHNYICELLLEEAKKKDWVVFKEPHIRDSNKELYKPDLIFVKDARALVVDVTVRYEAAKSSLEEAAAEKVRKYKHLETEVRHLTNAKDVTFVGFPLGARGKWHQDNFKLLTELGLSKSRQVKMAETFSTVALFSSVDIVHMFASRARKSMVM

SEQ ID NO: 1594 - protein, 1390 aa, synthetic construct
MASCPKPGPPVSAGAMSLESGLTTHSVLAIERGPNSLANSGSDFGGGGLGLPLRLLRVSVGTQTSRSDWVDLVSWSHPGPTSKSQQVDLVSLFPKHRVDLLSKNDQVDLVAQFLPSKFPPNLAENDLALLVNLEFYRSDLHVYECVHFAAHWEGLSGLPEVYEQLAPQPCVGETLHSSLPRDSELFVPEEGSSEKESEDAPKTSPPTPGKHGLEQTGEEKVMVTVPDKNPPCPCCGTRVNSVLNLIEHLKVSHGKRGVCFRCAKCGKENSNYHSVVCHFKKCRGPETEKAPAGEWICEVCNRDFTTKIGLGQHKRLAHPAVRNQERIVASQPKETSNRGAHKRCWTKEEEELLIRLEAQFEGNKNINKLIAEHITTKTAKQISDKRRLLSRKPAEEPREEPGTCHHTRRAAASLRTEPEMSHHAQAEDRDNGPGRRPLPGRAAAGGRTMDEIRRHPDKGNGQQRPTKQKSEEQLQAYYKKTLEERLSAGALNTFPRAFKQVMEGRDIKLVINQTAQDCFGCLESISQIRTATRDKKYTVTREKHPKKPFQKWMKKRAIKKGNYLRFQRLFYLDRGKLAKIILDDIECLSCDIPLSEIYSVFKTRWETTGSFKSLGDFKTYGKADNTAFRELITAKEIEKNVQEMSKGSAPGPDGITLGDVVKMDPEFSLTMEIFNLWLTTGKIPDMVRGCRTVLIPKSSKPDRLKDINNWRPITIGSILLRLFSRIVTARLSKACPLNPRQRGFIRAAGCSENLKLLQTIIWSAKREHRPLGVVFVDIAKAFDTVSHQHIIHALQQREVDPHIVGLVSNMYENISTYITTKRNTHTDKIQIRVGVKQGDPMSPLLFNLAMDPLLCKLEESGKGYHRGQSSITAMAFADDLVLLSDSWENMNTNISILETFCNLTGLKTQGQKCHGFYIKPTKDSYTINDCAAWTINGTPLNMIDPGESEKYLGLQFDPWIGIARSGLSTKLDFWLQRIDQAPLKPLQKTDILKTYTIPRLIYIADHSEVKTALLETLDQKIRTAVKEWLHLPPCTCDAILYSSTRDGGLGITKLAGLIPSVQARRLHRIAQSSDDTMKCFMEKEKMEQLHKKLWIQAGGDRENIPSIWEAPPSSEPPNNVSTNSEWEAPTQKPKFPKPCNWRKNEFKKWTKLASQGRGIVNFERDKISNHWIQYYRRIPHRKLLTALQLRANVYPTREFLARGRQDQYIKACRHCDADIESCAHIIGNCPVTQDARIKRHNYICELLLEEAKKKDWVVFKEPHIRDSNKELYKPDLIFVKDARALVVDVTVRYEAAKSSLEEAAAEKVRKYKHLETEVRHLTNAKDVTFVGFPLGARGKWHQDNFKLLTELGLSKSRQVKMAETFSTVALFSSVDIVHMFASRARKSMVM

SEQ ID NO: 1595 - protein, 1671 aa, synthetic construct
MGTALTPLLTKFATRYEMGTTPEEVANTLKQTCFKGQVNDSQMVALLIVADQYKLNPFTKELYAFPDKNNGIVPVVGVDGWARIINENPQFDGMEFSMDQQGTECTCKIYRKDRSHAISATEYMAECKRNTQPWQSHPRRMLRHKAMIQCARLAFGFAGIYDQDEAERIVERDVTPAEQYEDVSEAICLIKDSPTMEDLQAAFSNAWKAYKTKGARDQLTAAKDQRKKELLDAPIDVEFEETGDDRAASGGSSGGSSGSETPGTSESATPESSGGSSGGSSMASCPKPGPPVSAGAMSLESGLTTHSVLAIERGPNSLANSGSDFGGGGLGLPLRLLRVSVGTQTSRSDWVDLVSWSHPGPTSKSQQVDLVSLFPKHRVDLLSKNDQVDLVAQFLPSKFPPNLAENDLALLVNLEFYRSDLHVYECVHFAAHWEGLSGLPEVYEQLAPQPCVGETLHSSLPRDSELFVPEEGSSEKESEDAPKTSPPTPGKHGLEQTGEEKVMVTVPDKNPPCPCCGTRVNSVLNLIEHLKVSHGKRGVCFRCAKCGKENSNYHSVVCHFPKCRGPETEKAPAGEWICEVCNRDFTTKIGLGQHKRLAHPAVRNQERIVASQPKETSNRGAHKRCWTKEEEELLIRLEAQFEGNKNINKLIAEHITTKTAKQISDKRRLLSRKPAEEPREEPGTCHHTRRAAASLRTEPEMSHHAQAEDRDNGPGRRPLPGRAAAGGRTMDEIRRHPDKGNGQQRPTKQKSEEQLQAYYKKTLEERLSAGALNTFPRAFKQVMEGRDIKLVINQTAQDCFGCLESISQIRTATRDKKDTVTREKHPKKPFQKWMKDRAIKKGNYLRFQRLFYLDRGKLAKIILDDIECLSCDIPLSEIYSVFKTRWETTGSFKSLGDFKTYGKADNTAFRELITAKEIEKNVQEMSKGSAPGPDGITLGDVVKMDPEFSRTMEIFNLWLTTGKIPDMVRGCRTVLIPKSSKPDRLKDINNWRPITIGSILLRLFSRIVTARLSKACPLNPRQRGFIRAAGCSENLKLLQTIIWSAKREHRPLGVVFVDIAKAFDTVSHQHIIHALQQREVDPHIVGLVSNMYENISTYITTKRNTHTDKIQIRVGVKQGDPMSPLLFNLAMDPLLCKLEESGKGYHRGQSSITAMAFADDLVLLSDSWENMNTNISILETFCNLTGLKTQGQKCHGFYIKPTKDSYTINDCAAWTINGTPLNMIDPGESEKYLGLQFDPWIGIARSGLSTKLDFWLQRIDQAPLKPLQKTDILKTYTIPRLIYIADHSEVKTALLETLDQKIRTAVKEWLHLPPCTCDAILYSSTRDGGLGITKLAGLIPSVQARRLHRIAQSSDDTMKCFMEKEKMEQLHKKLWIQAGGDRENIPSIWEAPPSSEPPNNVSTNSEWEAPTQKDKFPKPCNWRKNEFKKWTKLASQGRGIVNFERDKISNHWIQYYRRIPHRKLLTALQLRANVYPTREFLARGRQDQYIKACRHCDADIESCAHIIGNCPVTQDARIKRHNYICELLLEEAKKKDWVVFKEPHIRDSNKELYKPDLIFVKDARALVVDVTVRYEAAKSSLEEAAAEKVRKYKHLETEVRHLTNAKDVTFVGFPLGARGKWHQDNFKLLTELGLSKSRQVKMAETFSTVALFSSVDIVHMFASRARKSMVM

SEQ ID NO: 1596 - protein, 1390 aa, synthetic construct
MASCPKPGPPVSAGAMSLESGLTTHSVLAIERGPNSLANSGSDFGGGGLGLPLRLLRVSVGTQTSRSDWVDLVSWSHPGPTSKSQQVDLVSLFPKHRVDLLSKNDQVDLVAQFLPSKFPPNLAENDLALLVNLEFYRSDLHVYECVHKAAHWEGLSGLPEVYEQLAPQPCVGETLHSSLPRDSELFVPEEGSSEKESEDAPKTSPPTPGKHGLRQTGEEKVMVTVPDKNPPCPCCGTRVNSVLNLIEHLKVSHGKRGVCFRCAKCGKENSNYHSVVCHFKKCRGPETEKAPAGEWICEVCNRDFTTKIGLGQHKRLAHPAVRNQERIVASQPKETSNRGAHKRCWTKEEEELLIRLEAQFEGNKNINKLIAEHITTKTAKQISDKRRLLSRKPAEEPREEPGTCHHTRRAAASLRTEPEMSHHAQAEDRDNGPGRRPLPGRAAAGGRTMDEIRRHPDKGNGQQRPTKQKSEEQLQAYYKKTLEERLSAGALNTFPRAFKQVMEGRDIKLVINQTAQDCFGCLESISQIRTATRDKKDTVTREKHPKKPFQKWMKKRAIKKGNYLRFQRLFYLDRGKLAKIILDDIECLSCDIPLSEIYSVFKTRWETTGSFKSLGDFKTYGKADNTAFRELITAKEIEKNVQEMSKGSAPGPDGITLGDVVKMDPEFSRTMEIFNLWLTTGKIPDMVRGCRTVLIPKSSKPDRLKDINNWRPITIGSILLRLFSRIVTARLSKACPLNPRQRGFIRAAGCSENLKLLQTIIWSAKREHRPLGVVFVDIAKAFDTVSHQHIIHALQQREVDPHIVGLVSNMYENISTYITTKRNTHTDKIQIRVGVKQGDPMSPLLFNLAMDPLLCKLEESGKGYHRGQSSITAMAFADDLVLLSDSWENMNTNISILETFCNLTGLKTQGQKCHGFYIKPTKDSYTINDCAAWTINGTPLNMIDPGESEKYLGLQFDPWIGIARSGLSTKLDFWLQRIDQAPLKPLQKTDILKTYTIPRLIYIADHSEVKSALLETLDQKIRTAVKEWLHLPPCTCDAILYSSTRDGGLGITKLAGLIPSVQARRLHRIAQSSDDTMKCFMEKEKMEQLHKKLWIQAGGDRENIPSIWEAPPSSEPPNNVSTNSEWEAPTQKDKFPKPCNWRKNEFKKWTKLASQGRGIVNFERDKISNHWIQYYRRIPHRKLLTALQLRANVYPTREFLARGRQDQYIKACRHCDADNESCAHIIGNCPVTQDARIKRHNYICELLLEEAKKKDWVVFKEPHIRDSNKELYKPDLIFVKDGRALVVDVTVRYEAAKSSLEEAAAEKVRKYKHLETEVRHLTNAKDVTFVGFPLGARGKWHQDNFKLLTELGLSKSRQVKMAETFSTVALFSSVDIVHMFASRARKSMVM

SEQ ID NO: 1597 - protein, 1473 aa, synthetic construct
MASCPKPGPPVSAGAMSLESGLTTHSVLAIERGPNSLANSGSDFGGGGLGLPLRLLRVSVGTQTSRSDWVDLVSWSHPGPTSKSQQVDLVSLFPKHRVDLLSKNDQVDLVAQFLPSKFPPNLAENDLALLVNLEFYRSDLHVYECVHKAAHWEGLSGLPEVYEQLAPQPCVGETLHSSLPRDSELFVPEEGSSEKESEDAPKTSPPTPGKHGLEQTGEEKVMVTVPDKNPPCPCCGTRVNSVLNLIEHLKVSHGKRGVCFRCAKCGKENSNYHSVVCHFKKCRGPETEKAPAGEWICEVCNRDFTTKIGLGQHKRLAHPAVRNQERIVASQPKETSNRGAHKRCWTKEEEELLIRLEAQFEGNKNINKLIAEHITTKTAKQISDKRRLLSRKPAEEPREEPGTCHHTRRAAASLRTEPEMSHHAQAEDRDNGPGRRPLPGRAAAGGRTMDEIRRHPDKGNGQQRPTKQKSEEQLQAYYKKTLEERLSAGALNTFPRAFKQVMEGRDIKLVINQTAQDCFGCLESISQIRTATRDKKDTVTREKHPKKPFQKWMKKRAIKKGNYLRFQRLFYLDRGKLAKIILDDIECLSCDIPLSEIYSVFKTRWETTGSFKSLGDFKTYGKADNTADTSNLMEQILSSDNLNRAYLQVVRNKGAEGVDGMKYTELKEHLAKNGETIKGQLRTAAYKPQPARRVEIPKPDGGVRNLGVPTVTDRFIQQAIAQVLTPIYEEQFHDHSYGFRPNRCAQQAILTALNIMNDGNDWIVDIDLEKFFDTVNHDKLMTLIGRTIADGDVISIVRKYLVSGIMIDDEYEDSIVGTPQGGNLSPLLANIMLNELDKEMEAAGLNFVRYADDCIIMVGSEMSANRVMRNISRFIEEKLGLKVNMTKSKVDRPSGLKYLGFGFYFDPRAHQFKAKPHAKSVAKFKKRMKELTCRSWGVSNSYKVEKLNQLIRGWINYFKIGSMKTLCKELDSRIRYRLRMCIWKQWKTPQNQEKNLVKLGIDRNTARRVAYTGKRIAYVCNKGAVNVAISNKRLASFQFDPWIGIARSGLSTKLDFWLQRIDQAPLKPLQKTDILKTYTIPRLIYIADHSEVKSALLETLDQKIRTAVKEWLHLPPCTCDAILYSSTRDGGLGITKLAGLIPSVQARRLHRIAQSSDDTMKCFMEKEKMEQLHKKLWIQAGGDRENIPSIWEAPPSSEPPNNVSTNSEWEAPTQKDKFPKPCNWRKNEFKKWTKLASQGRGIVNFERDKISNHWIQYYRRIPHRKLLTALQLRANVYPTREFLARGRQDQYIKACRHCDADNESCAHIIGNCPVTQDARIKRHNYICELLLEEAKKKDWVVFKEPHIRDSNKELYKPDLIFVKDGRALVVDVTVRYEAAKSSLEEAAAEKVRKYKHLETEVRHLTNAKDVTFVGFPLGARGKWHQDNFKLLTELGLSKSRQVKMAETFSTVALFSSVDIVHMFASRARKSMVM

SEQ ID NO: 1598 - protein, 1710 aa, synthetic construct
MAPKKKRKVNISGSSCGSPNSADTSSDFKDLWTKLKECHDREVQGLQVKVTKLKQERILDAQRLEEFFTKNQQLREQQKVLHETIKVLEDRLRAGLCDRCAVTEEHMRKKQQEFENIRQQNLKLITELMNERNTLQEENKKLSEQLQQKIENDQQHQAAELECEEDVIPDSPITAFSFSGVNRLRRKENPHVRYIEQTHTKLEHSVCANEMRKVSKSSTHPQHNPNENEILVADTYDQSQSPMAKAHGTSSYTPDKSSFNLATVVAETLGLGVQEESETQGPMSPLGDELYHCLEGNHKKQPFESGSETPGTSESATPEGSASCPKPGPPVSAGAMSLESGLTTHSVLAIERGPNSLANSGSDFGGGGLGLPLRLLRVSVGTQTSRSDWVDLVSWSHPGPTSKSQQVDLVSLFPKHRVDLLSKNDQVDLVAQFLPSKFPPNLAENDLALLVNLEFYRSDLHVYECVHKAAHWEGLSGLPEVYEQLAPQPCVGETLHSSLPRDSELFVPEEGSSEKESEDAPKTSPPTPGKHGLEQTGEEKVMVTVPDKNPPCPCCGTRVNSVLNLIEHLKVSHGKRGVCFRCAKCGKENSNYHSVVCHFKKCRGPETEKAPAGEWICEVCNRDFTTKIGLGQHKRLAHPAVRNQERIVASQPKETSNRGAHKRCWTKEEEELLIRLEAQFEGNKNINKLIAEHITTKTAKQISDKRRLLSRKPAEEPREEPGTCHHTRRAAASLRTEPEMSHHAQAEDRDNGPGRRPLPGRAAAGGRTMDEIRRHPDKGNGQQRPTKQKSEEQLQAYYKKTLEERLSAGALNTFPRAFKQVMEGRDIKLVINQTAQDCFGCLESISQIRTATRDKKDTVTREKHPKKPFQKWMKKRAIKKGNYLRFQRLFYLDRGKLAKIILDDIECLSCDIPLSEIYSVFKTRWETTGSFKSLGDFKTYGKADNTAFRELITAKEIEKNVQEMSKGSAPGPDGITLGDVVKMDPEFSRTMEIFNLWLTTGKIPDMVRGCRTVLIPKSSKPDRLKDINNWRPITIGSILLRLFSRIVTARLSKACPLNPRQRGFIRAAGCSENLKLLQTIIWSAKREHRPLGVVFVDIAKAFDTVSHQHIIHALQQREVDPHIVGLVSNMYENISTYITTKRNTHTDKIQIRVGVKQGDPMSPLLFNLAMDPLLCKLEESGKGYHRGQSSITAMAFADDLVLLSDSWENMNTNISILETFCNLTGLKTQGQKCHGFYIKPTKDSYTINDCAAWTINGTPLNMIDPGESEKYLGLQFDPWIGIARSGLSTKLDFWLQRIDQAPLKPLQKTDILKTYTIPRLIYIADHSEVKSALLETLDQKIRTAVKEWLHLPPCTCDAILYSSTRDGGLGITKLAGLIPSVQARRLHRIAQSSDDTMKCFMEKEKMEQLHKKLWIQAGGDRENIPSIWEAPPSSEPPNNVSTNSEWEAPTQKDKFPKPCNWRKNEFKKWTKLASQGRGIVNFERDKISNHWIQYYRRIPHRKLLTALQLRANVYPTREFLARGRQDQYIKACRHCDADNESCAHIIGNCPVTQDARIKRHNYICELLLEEAKKKDWVVFKEPHIRDSNKELYKPDLIFVKDGRALVVDVTVRYEAAKSSLEEAAAEKVRKYKHLETEVRHLTNAKDVTFVGFPLGARGKWHQDNFKLLTELGLSKSRQVKMAETFSTVALFSSVDIVHMFASRARKSMVM

SEQ ID NO: 1599 - protein, 1550 aa, synthetic construct; identical to SEQ ID NO: 1391

SEQ ID NO: 1600 - protein, 1550 aa, synthetic construct
MAPKKKRKVNISGSSCGSPNSADTSSDFKDLWTKLKECHDREVQGLQVKVTKLKQERILDAQRLEEFFTKNQQLREQQKVLHETIKVLEDRLRAGLCDRCAVTEEHMRKKQQEFENIRQQNLKLITELMNERNTLQEENKKLSEQLQQKIENDQQHQAAELECEEDVIPDSPITAFSFSGVNRLRRKENPHVRYIEQTHTKLEHSVCANEMRKVSKSSTHPQHNPNENEILVADTYDQSQSPMAKAHGTSSYTPDKSSFNLATVVAETLGLGVQEESETQGPMSPLGDELYHCLEGNHKKQPFESGSETPGTSESATPEGSYEQLAPQPCVGETLHSSLPRDSELFVPEEGSSEKESEDAPKTSPPTPGKHGLEQTGEEKVMVTVPDKNPPCPCCGTRVNSVLNLIEHLKVSHGKRGVCFRCAKCGKENSNYHSVVCHFKKCRGPETEKAPAGEWICEVCNRDFTTKIGLGQHKRLAHPAVRNQERIVASQPKETSNRGAHKRCWTKEEEELLIRLEAQFEGNKNINKLIAEHITTKTAKQISDKRRLLSRKPAEEPREEPGTCHHTRRAAASLRTEPEMSHHAQAEDRDNGPGRRPLPGRAAAGGRTMDEIRRHPDKGNGQQRPTKQKSEEQLQAYYKKTLEERLSAGALNTFPRAFKQVMEGRDIKLVINQTAQDYFGCLESISQIRTATRDKKDTVTREKHPKKPFQKWMKKRAIKKGNYLRFQRLFYLDRGKLAKIILDDIECLSCDIPLSEIYSVFKTRWETTGSFKSLGDFKTYGKADNTAFRELITAKEIEKNVQEMSKGSAPGPDGITLGDVVKMDPEFSRTMEIFNLWLTTGKIPDMVRGCRTVLIPKSSKPDRLKDINNWRPITIGSILLRLFSRIVTARLSKACPLNPRQRGFIRAAGCSENLKLLQTIIWSAKREHRPLGVVFVDIAKAFDTVSHQHIIHALQQREVDPHIVGLVSNMYENISTYITTKRNTHTDKIQIRVGVKQGDPMSPLLFNLAMDPLLCKLEESGKGYHRGQSSITAMAFADDLVLLSDSWENMNTNISILETFCNLTGLKTQGQKCHGFYIKPTKDSYTINDCAAWTINGTPLNMIDPGESEKYLGLQFDPWIGIARSGLSTKLDFWLQRIDQAPLKPLQKTDILKTYTIPRLIYIADHSEVKSALLETLDQKIRTAVKEWLHLPPCTCDAILYSSTRDGGLGITKLAGLIPSVQARRLHRIAQSSDDTMKCFMEKEKMEQLHKKLWIQAGGDRENIPSIWEAPPSSEPPNNVSTNSEWEAPTQKDKFPKPCNWRKNEFKKWTKLASQGRGIVNFERDKISNHWIQYYRRIPHRKLLTALQLRANVYPTREFLARGRQDQYIKACRHCDADNESCAHIIGNCPVTQDARIKRHNYICELLLEEAKKKDWVVFKEPHIRDSNKELYKPDLIFVKDGRALVVDVTVRYEAAKSSLEEAAAEKVRKYKHLETEVRHLTNAKDVTFVGFPLGARGKWHQDNFKLLTELGLSKSRQVKMAETFSTVALFSSVDIVHMFASRARKSMVM

SEQ ID NO: 1601 - skipped

SEQ ID NO: 1602 - protein, 1571 aa, synthetic construct
MAPKKKRKVNISGSSCGSPNSADTSSDFKDLWTKLKECHDREVQGLQVKVTKLKQERILDAQRLEEFFTKNQQLREQQKVLHETIKVLEDRLRAGLCDRCAVTEEHMRKKQQEFENIRQQNLKLITELMNERNTLQEENKKLSEQLQQKIENDQQHQAAELECEEDVIPDSPITAFSFSGVNRLRRKENPHVRYIEQTHTKLEHSVCANEMRKVSKSSTHPQHNPNENEILVADTYDQSQSPMAKAHGTSSYTPDKSSFNLATVVAETLGLGVQEESETQGPMSPLGDELYHCLEGNHKKQPFESGSETPGTSESATPEGSYEQLAPQPCVGETLHSSLPRDSELFVPEEGSSEKESEDAPKTSPPTPGKHGLEQTGEEKVMVTVPDKNPPCPCCGTRVNSVLNLIEHLKVSHGKRGVCFRCAKCGKENSNYHSVVCHFKKCRGPETEKAPAGEWICEVCNRDFTTKIGLGQHKRLAHPAVRNQERIVASQPKETSNRGAHKRCWTKEEEELLIRLEAQFEGNKNINKLIAEHITTKTAKQISDKRRLLSRKPAEEPREEPGTCHHTRRAAASLRTEPEMSHHAQAEDRDNGPGRRPLPGRAAAGGRTMDEIRRHPDKGNGQQRPTKQKSEEQLQAYYKKTLEERLSAGALNTFPRAFKQVMEGRDIKLVINQTAQDCFGCLESISQIRTATRDKKDTVTREKHPKKPFQKWMKKRAIKKGNYLRFQRLFYLDRGKLAKIILDDIECLSCDIPLSEIYSVFKTRWETTGSFKSLGDFKTYGKADNTAFRELITAKEIEKNVQEMSKGSAPGPDGITLGDVVKMDPEFSRTMEIFNLWLTTGKIPDMVRGCRTVLIPKSSKPDRLKDINNWRPITIGSILLRLFSRIVTARLSKACPLNPRQRGFIRAAGCSENLKLLQTIIWSAKREHRPLGVVFVDIAKAFDTVSHQHIIHALQQREVDPHIVGLVSNMYENISTYITTKRNTHTDKIQIRVGVKQGDPMSPLLFNLAMDPLLCKLEESGKGYHRGQSSITAMAFADDLVLLSDSWENMNTNISILETFCNLTGLKTQGQKCHGFYIKPTKDSYTINDCAAWTINGTPLNMIDPGESEKYLGLQFDPWIGIARSGLSTKLDFWLQRIDQAPLKPLQKTDILKTYTIPRLIYIADHSEVKSALLETLDQKIRTAVKEWLHLPPCTCDAILYSSTRDGGLGITKLAGLIPSVQARRLHRIAQSSDDTMKCFMEKEKMEQLHKKLWIQAGGDRENIPSIWEAPPSSEPPNNVSTNSEWEAPTQKDKFPKPCNWRKNEFKKWTKLASQGRGIVNFERDKISNHWIQYYRRIPHRKLLTALQLRANVYPTREFLARGRQDQYIKACRHCDADNESCAHIIGNCPVTQDARIKRHNYICELLLEEAKKKDWVVFKEPHIRDSNKELYKPDLIFVKDGRALVVDVTVRYEAAKSSLEEAAAEKVRKYKHLETEVRHLTNAKDVTFVGFPLGARGKWHQDNFKLLTELGLSKSRQVKMAETFSTVALFSSVDIVHMFASRARKSMVMSGGSKRTADGSEFEPKKKRKV

SEQ ID NO: 1603 - protein, 1277 aa, synthetic construct; identical to SEQ ID NO: 256

SEQ ID NO: 1604 - protein, 1561 aa, synthetic construct
MAKRTADGSEFESPKKKRKVNISGSSCGSPNSADTSSDFKDLWTKLKECHDREVQGLQVKVTKLKQERILDAQRLEEFFTKNQQLREQQKVLHETIKVLEDRLRAGLCDRCAVTEEHMRKKQQEFENIRQQNLKLITELMNERNTLQEENKKLSEQLQQKIENDQQHQAAELECEEDVIPDSPITAFSFSGVNRLRRKENPHVRYIEQTHTKLEHSVCANEMRKVSKSSTHPQHNPNENEILVADTYDQSQSPMAKAHGTSSYTPDKSSFNLATVVAETLGLGVQEESETQGPMSPLGDELYHCLEGNHKKQPFESGSETPGTSESATPEGSYEQLAPQPCVGETLHSSLPRDSELFVPEEGSSEKESEDAPKTSPPTPGKHGLEQTGEEKVMVTVPDKNPPCPCCGTRVNSVLNLIEHLKVSHGKRGVCFRCAKCGKENSNYHSVVCHFKKCRGPETEKAPAGEWICEVCNRDFTTKIGLGQHKRLAHPAVRNQERIVASQPKETSNRGAHKRCWTKEEEELLIRLEAQFEGNKNINKLIAEHITTKTAKQISDKRRLLSRKPAEEPREEPGTCHHTRRAAASLRTEPEMSHHAQAEDRDNGPGRRPLPGRAAAGGRTMDEIRRHPDKGNGQQRPTKQKSEEQLQAYYKKTLEERLSAGALNTFPRAFKQVMEGRDIKLVINQTAQDCFGCLESISQIRTATRDKKDTVTREKHPKKPFQKWMKKRAIKKGNYLRFQRLFYLDRGKLAKIILDDIECLSCDIPLSEIYSVFKTRWETTGSFKSLGDFKTYGKADNTAFRELITAKEIEKNVQEMSKGSAPGPDGITLGDVVKMDPEFSRTMEIFNLWLTTGKIPDMVRGCRTVLIPKSSKPDRLKDINNWRPITIGSILLRLFSRIVTARLSKACPLNPRQRGFIRAAGCSENLKLLQTIIWSAKREHRPLGVVFVDIAKAFDTVSHQHIIHALQQREVDPHIVGLVSNMYENISTYITTKRNTHTDKIQIRVGVKQGDPMSPLLFNLAMDPLLCKLEESGKGYHRGQSSITAMAFADDLVLLSDSWENMNTNISILETFCNLTGLKTQGQKCHGFYIKPTKDSYTINDCAAWTINGTPLNMIDPGESEKYLGLQFDPWIGIARSGLSTKLDFWLQRIDQAPLKPLQKTDILKTYTIPRLIYIADHSEVKSALLETLDQKIRTAVKEWLHLPPCTCDAILYSSTRDGGLGITKLAGLIPSVQARRLHRIAQSSDDTMKCFMEKEKMEQLHKKLWIQAGGDRENIPSIWEAPPSSEPPNNVSTNSEWEAPTQKDKFPKPCNWRKNEFKKWTKLASQGRGIVNFERDKISNHWIQYYRRIPHRKLLTALQLRANVYPTREFLARGRQDQYIKACRHCDADNESCAHIIGNCPVTQDARIKRHNYICELLLEEAKKKDWVVFKEPHIRDSNKELYKPDLIFVKDGRALVVDVTVRYEAAKSSLEEAAAEKVRKYKHLETEVRHLTNAKDVTFVGFPLGARGKWHQDNFKLLTELGLSKSRQVKMAETFSTVALFSSVDIVHMFASRARKSMVM

SEQ ID NO: 1605 - skipped

SEQ ID NO: 1606 - protein, 1390 aa, synthetic construct
MASCPKPGPPVSAGAMSLESGLTTHSVLAIERGPNSLANSGSDFGGGGLGLPLRLLRVSVGTQTSRSDWVDLVSWSHPGPTSKSQQVDLVSLFPKHRVDLLSKNDQVDLVAQFLPSKFPPNLAENDLALLVNLEFYRSDLHVYECVHKAAHWEGLSGLPEVYEQLAPQPCVGETLHSSLPRDSELFVPEEGSSEKESEDAPKTSPPTPGKHGLEQTGEEKVMVTVPDKNPPCPCCGTRVNSVLNLIEHLKVSHGKRGVCFRCAKCGKENSNYHSVVCHFKKCRGPETEKAPAGEWICEVCNRDFTTKIGLGQHKRLAHPAVRNQERIVASQPKETSNRGAHKRCWTKEEEELLIRLEAQFEGNKNINKLIAEHITTKTAKQISDKRRLLSRKPAEEPREEPGTCHHTRRAAASLRTEPEMSHHAQAEDRDNGPGRRPLPGRAAAGGRTMDEIRRHPDKGNGQQRPTKQKSEEQLQAYYKKTLEERLSAGALNTFPRAFKQVMEGRDIKLVINQTAQDCFGCLESISQIRTATRDKKDTVTREKHPKKPFQKWMKKRAIKKGNYLRFQRLFYLDRGKLAKIILDDIECLSCDIPLSEIYSVFKTRWETTGSFKSLGDFKTYGKADNTAFRELITAKEIEKNVREMSKGSAPGPDGITLGDVVKMDPEFSRTMEIFNLWLTTGKIPDMVRGCRTVLIPKSSKPDRLKDINNWRPITIGSILLRLFSRIVTARLSKACPLNPRQRGFIRAAGCSENLKLLQTIIWSAKREHRPLGVVFVDIAKAFDTVSHQHIIHALQQREVDPHIVGLVSNMYENISTYITTKRNTHTDKIQIRVGVKQGDPMSPLLFNLAMDPLLCKLEESGKGYHRGQSSITAMAFADDLVLLSDSWENMNTNISILETFCNLTGLKTQGQKCHGFYIKPTKDSYTINDCAAWTINGTPLNMIDPGESEKYLGLQFDPWIGIARSGLSTKLDFWLQRIDQAPLKPLQKTDILKTYTIPRLIYIADHSEVKSALLETLDQKIRTAVKEWLHLPPCTCDAILYSSTRDGGLGITKLAGLIPSVQARRLHRIAQSSDDTMKCFMEKEKMEQLHKKLWIQAGGDRENIPSIWEAPPSSEPPNNVSTNSEWEAPTQKDKFPKPCNWRKNEFKKWTKLASQGRGIVNFERDKISNHWIQYYRRIPHRKLLTALQLRANVYPTREFLARGRQDQYIKACRHCDADNESCAHIIGNCPVTQDARIKRHNYICELLLEEAKKKDWVVFKEPHIRDSNKELYKPDLIFVKDGRALVVDVTVRYEAAKSSLEEAAAEKVRKYKHLETEVRHLTNAKDVTFVGFPLGARGKWHQDNFKLLTELGLSKSRQVKMAETFSTVALFSSVDIVHMFASRARKSMVM

SEQ ID NO: 1607 - protein, 1390 aa, synthetic construct
MASCPKPGPPVSAGAMSLESGLTTHSVLAIERGPNSLANSGSDFGGGGLGLPLRLLRVSVGTQTSRSDWVDLVSWSHPGPTSKSQQVDLVSLFPKHRVDLLSKNDQVDLVAQFLPSKFPPNLAENDLALLVNLEFYRSDLHVYECVHKAAHWEGLSGLPEVYEQLAPQPCVGETLHSSLPRDSELFVPEEGSSEKESEDAPKTSPPTPGKHGLEQTGEEKVMVTVPDKNPPCPCCGTRVNSVLNLIEHLKVSHGKRGVCFRCAKCGKENSNYHSVVCHFKKCRGPETEKAPAGEWICEVCNRDFTTKIGLGQHKRLAHPAVRNQERIVASQPKETSNRGAHKRCWTKEEEELLIRLEAQFEGNKNINKLIAEHITTKTAKQISDKRRLLSRKPAEEPREEPGTCHHTRRAAASLRTEPEMSHHAQAEDRDNGPGRRPLPGRAAAGGRTMDEIRRHPDKGNGQQRPTKQKSEEQLQAYYKKTLEERLSAGALNTFPRAFKQVMEGRDIKLVINQTAQDCFGCLESISQIRTATRDKKDTVTREKHPKKPFQKWMKKRAIKKGNYLRFQRLFYLDRGKLAKIILDDIECLSCDIPLSEIYSVFKTRWETTGSFKSLGDFKTYGKADNTAFRELITAKEIEKNVQRMSKGSAPGPDGITLGDVVKMDPEFSRTMEIFNLWLTTGKIPDMVRGCRTVLIPKSSKPDRLKDINNWRPITIGSILLRLFSRIVTARLSKACPLNPRQRGFIRAAGCSENLKLLQTIIWSAKREHRPLGVVFVDIAKAFDTVSHQHIIHALQQREVDPHIVGLVSNMYENISTYITTKRNTHTDKIQIRVGVKQGDPMSPLLFNLAMDPLLCKLEESGKGYHRGQSSITAMAFADDLVLLSDSWENMNTNISILETFCNLTGLKTQGQKCHGFYIKPTKDSYTINDCAAWTINGTPLNMIDPGESEKYLGLQFDPWIGIARSGLSTKLDFWLQRIDQAPLKPLQKTDILKTYTIPRLIYIADHSEVKSALLETLDQKIRTAVKEWLHLPPCTCDAILYSSTRDGGLGITKLAGLIPSVQARRLHRIAQSSDDTMKCFMEKEKMEQLHKKLWIQAGGDRENIPSIWEAPPSSEPPNNVSTNSEWEAPTQKDKFPKPCNWRKNEFKKWTKLASQGRGIVNFERDKISNHWIQYYRRIPHRKLLTALQLRANVYPTREFLARGRQDQYIKACRHCDADNESCAHIIGNCPVTQDARIKRHNYICELLLEEAKKKDWVVFKEPHIRDSNKELYKPDLIFVKDGRALVVDVTVRYEAAKSSLEEAAAEKVRKYKHLETEVRHLTNAKDVTFVGFPLGARGKWHQDNFKLLTELGLSKSRQVKMAETFSTVALFSSVDIVHMFASRARKSMVM

SEQ ID NO: 1608 - protein, 1390 aa, synthetic construct
MASCPKPGPPVSAGAMSLESGLTTHSVLAIERGPNSLANSGSDFGGGGLGLPLRLLRVSVGTQTSRSDWVDLVSWSHPGPTSKSQQVDLVSLFPKHRVDLLSKNDQVDLVAQFLPSKFPPNLAENDLALLVNLEFYRSDLHVYECVHKAAHWEGLSGLPEVYEQLAPQPCVGETLHSSLPRDSELFVPEEGSSEKESEDAPKTSPPTPGKHGLEQTGEEKVMVTVPDKNPPCPCCGTRVNSVLNLIEHLKVSHGKRGVCFRCAKCGKENSNYHSVVCHFKKCRGPETEKAPAGEWICEVCNRDFTTKIGLGQHKRLAHPAVRNQERIVASQPKETSNRGAHKRCWTKEEEELLIRLEAQFEGNKNINKLIAEHITTKTAKQISDKRRLLSRKPAEEPREEPGTCHHTRRAAASLRTEPEMSHHAQAEDRDNGPGRRPLPGRAAAGGRTMDEIRRHPDKGNGQQRPTKQKSEEQLQAYYKKTLEERLSAGALNTFPRAFKQVMEGRDIKLVINQTAQDCFGCLESISQIRTATRDKKDTVTREKHPKKPFQKWMKKRAIKKGNYLRFQRLFYLDRGKLAKIILDDIECLSCDIPLSEIYSVFKTRWETTGSFKSLGDFKTYGKADNTAFRELITAKEIEKNVQEMKKGSAPGPDGITLGDVVKMDPEFSRTMEIFNLWLTTGKIPDMVRGCRTVLIPKSSKPDRLKDINNWRPITIGSILLRLFSRIVTARLSKACPLNPRQRGFIRAAGCSENLKLLQTIIWSAKREHRPLGVVFVDIAKAFDTVSHQHIIHALQQREVDPHIVGLVSNMYENISTYITTKRNTHTDKIQIRVGVKQGDPMSPLLFNLAMDPLLCKLEESGKGYHRGQSSITAMAFADDLVLLSDSWENMNTNISILETFCNLTGLKTQGQKCHGFYIKPTKDSYTINDCAAWTINGTPLNMIDPGESEKYLGLQFDPWIGIARSGLSTKLDFWLQRIDQAPLKPLQKTDILKTYTIPRLIYIADHSEVKSALLETLDQKIRTAVKEWLHLPPCTCDAILYSSTRDGGLGITKLAGLIPSVQARRLHRIAQSSDDTMKCFMEKEKMEQLHKKLWIQAGGDRENIPSIWEAPPSSEPPNNVSTNSEWEAPTQKDKFPKPCNWRKNEFKKWTKLASQGRGIVNFERDKISNHWIQYYRRIPHRKLLTALQLRANVYPTREFLARGRQDQYIKACRHCDADNESCAHIIGNCPVTQDARIKRHNYICELLLEEAKKKDWVVFKEPHIRDSNKELYKPDLIFVKDGRALVVDVTVRYEAAKSSLEEAAAEKVRKYKHLETEVRHLTNAKDVTFVGFPLGARGKWHQDNFKLLTELGLSKSRQVKMAETFSTVALFSSVDIVHMFASRARKSMVM

SEQ ID NO: 1609 - protein, 1390 aa, synthetic construct
MASCPKPGPPVSAGAMSLESGLTTHSVLAIERGPNSLANSGSDFGGGGLGLPLRLLRVSVGTQTSRSDWVDLVSWSHPGPTSKSQQVDLVSLFPKHRVDLLSKNDQVDLVAQFLPSKFPPNLAENDLALLVNLEFYRSDLHVYECVHKAAHWEGLSGLPEVYEQLAPQPCVGETLHSSLPRDSELFVPEEGSSEKESEDAPKTSPPTPGKHGLEQTGEEKVMVTVPDKNPPCPCCGTRVNSVLNLIEHLKVSHGKRGVCFRCAKCGKENSNYHSVVCHFKKCRGPETEKAPAGEWICEVCNRDFTTKIGLGQHKRLAHPAVRNQERIVASQPKETSNRGAHKRCWTKEEEELLIRLEAQFEGNKNINKLIAEHITTKTAKQISDKRRLLSRKPAEEPREEPGTCHHTRRAAASLRTEPEMSHHAQAEDRDNGPGRRPLPGRAAAGGRTMDEIRRHPDKGNGQQRPTKQKSEEQLQAYYKKTLEERLSAGALNTFPRAFKQVMEGRDIKLVINQTAQDCFGCLESISQIRTATRDKKDTVTREKHPKKPFQKWMKKRAIKKGNYLRFQRLFYLDRGKLAKIILDDIECLSCDIPLSEIYSVFKTRWETTGSFKSLGDFKTYGKADNTAFRELITAKEIEKNVQEMSKGSSPGPDGITLGDVVKMDPEFSRTMEIFNLWLTTGKIPDMVRGCRTVLIPKSSKPDRLKDINNWRPITIGSILLRLFSRIVTARLSKACPLNPRQRGFIRAAGCSENLKLLQTIIWSAKREHRPLGVVFVDIAKAFDTVSHQHIIHALQQREVDPHIVGLVSNMYENISTYITTKRNTHTDKIQIRVGVKQGDPMSPLLFNLAMDPLLCKLEESGKGYHRGQSSITAMAFADDLVLLSDSWENMNTNISILETFCNLTGLKTQGQKCHGFYIKPTKDSYTINDCAAWTINGTPLNMIDPGESEKYLGLQFDPWIGIARSGLSTKLDFWLQRIDQAPLKPLQKTDILKTYTIPRLIYIADHSEVKSALLETLDQKIRTAVKEWLHLPPCTCDAILYSSTRDGGLGITKLAGLIPSVQARRLHRIAQSSDDTMKCFMEKEKMEQLHKKLWIQAGGDRENIPSIWEAPPSSEPPNNVSTNSEWEAPTQKDKFPKPCNWRKNEFKKWTKLASQGRGIVNFERDKISNHWIQYYRRIPHRKLLTALQLRANVYPTREFLARGRQDQYIKACRHCDADNESCAHIIGNCPVTQDARIKRHNYICELLLEEAKKKDWVVFKEPHIRDSNKELYKPDLIFVKDGRALVVDVTVRYEAAKSSLEEAAAEKVRKYKHLETEVRHLTNAKDVTFVGFPLGARGKWHQDNFKLLTELGLSKSRQVKMAETFSTVALFSSVDIVHMFASRARKSMVM

SEQ ID NO: 1610 - protein, 1390 aa, synthetic construct
MASCPKPGPPVSAGAMSLESGLTTHSVLAIERGPNSLANSGSDFGGGGLGLPLRLLRVSVGTQTSRSDWVDLVSWSHPGPTSKSQQVDLVSLFPKHRVDLLSKNDQVDLVAQFLPSKFPPNLAENDLALLVNLEFYRSDLHVYECVHKAAHWEGLSGLPEVYEQLAPQPCVGETLHSSLPRDSELFVPEEGSSEKESEDAPKTSPPTPGKHGLEQTGEEKVMVTVPDKNPPCPCCGTRVNSVLNLIEHLKVSHGKRGVCFRCAKCGKENSNYHSVVCHFKKCRGPETEKAPAGEWICEVCNRDFTTKIGLGQHKRLAHPAVRNQERIVASQPKETSNRGAHKRCWTKEEEELLIRLEAQFEGNKNINKLIAEHITTKTAKQISDKRRLLSRKPAEEPREEPGTCHHTRRAAASLRTEPEMSHHAQAEDRDNGPGRRPLPGRAAAGGRTMDEIRRHPDKGNGQQRPTKQKSEEQLQAYYKKTLEERLSAGALNTFPRAFKQVMEGRDIKLVINQTAQDCFGCLESISQIRTATRDKKDTVTREKHPKKPFQKWMKKRAIKKGNYLRFQRLFYLDRGKLAKIILDDIECLSCDIPLSEIYSVFKTRWETTGSFKSLGDFKTYGKADNTAFRELITAKEIEKNVQEMSKGSAPGPDGITLGDVVKMDPEFSRTMEIFNLWLTTGKIPDMVRGCRTTLIPKSSKPDRLKDINNWRPITIGSILLRLFSRIVTARLSKACPLNPRQRGFIRAAGCSENLKLLQTIIWSAKREHRPLGVVFVDIAKAFDTVSHQHIIHALQQREVDPHIVGLVSNMYENISTYITTKRNTHTDKIQIRVGVKQGDPMSPLLFNLAMDPLLCKLEESGKGYHRGQSSITAMAFADDLVLLSDSWENMNTNISILETFCNLTGLKTQGQKCHGFYIKPTKDSYTINDCAAWTINGTPLNMIDPGESEKYLGLQFDPWIGIARSGLSTKLDFWLQRIDQAPLKPLQKTDILKTYTIPRLIYIADHSEVKSALLETLDQKIRTAVKEWLHLPPCTCDAILYSSTRDGGLGITKLAGLIPSVQARRLHRIAQSSDDTMKCFMEKEKMEQLHKKLWIQAGGDRENIPSIWEAPPSSEPPNNVSTNSEWEAPTQKDKFPKPCNWRKNEFKKWTKLASQGRGIVNFERDKISNHWIQYYRRIPHRKLLTALQLRANVYPTREFLARGRQDQYIKACRHCDADNESCAHIIGNCPVTQDARIKRHNYICELLLEEAKKKDWVVFKEPHIRDSNKELYKPDLIFVKDGRALVVDVTVRYEAAKSSLEEAAAEKVRKYKHLETEVRHLTNAKDVTFVGFPLGARGKWHQDNFKLLTELGLSKSRQVKMAETFSTVALFSSVDIVHMFASRARKSMVM

SEQ ID NO: 1611 - protein, 1390 aa, synthetic construct
MASCPKPGPPVSAGAMSLESGLTTHSVLAIERGPNSLANSGSDFGGGGLGLPLRLLRVSVGTQTSRSDWVDLVSWSHPGPTSKSQQVDLVSLFPKHRVDLLSKNDQVDLVAQFLPSKFPPNLAENDLALLVNLEFYRSDLHVYECVHKAAHWEGLSGLPEVYEQLAPQPCVGETLHSSLPRDSELFVPEEGSSEKESEDAPKTSPPTPGKHGLEQTGEEKVMVTVPDKNPPCPCCGTRVNSVLNLIEHLKVSHGKRGVCFRCAKCGKENSNYHSVVCHFKKCRGPETEKAPAGEWICEVCNRDFTTKIGLGQHKRLAHPAVRNQERIVASQPKETSNRGAHKRCWTKEEEELLIRLEAQFEGNKNINKLIAEHITTKTAKQISDKRRLLSRKPAEEPREEPGTCHHTRRAAASLRTEPEMSHHAQAEDRDNGPGRRPLPGRAAAGGRTMDEIRRHPDKGNGQQRPTKQKSEEQLQAYYKKTLEERLSAGALNTFPRAFKQVMEGRDIKLVINQTAQDCFGCLESISQIRTATRDKKDTVTREKHPKKPFQKWMKKRAIKKGNYLRFQRLFYLDRGKLAKIILDDIECLSCDIPLSEIYSVFKTRWETTGSFKSLGDFKTYGKADNTAFRELITAKEIEKNVQEMSKGSAPGPDGITLGDVVKMDPEFSRTMEIFNLWLTTGKIPDMVRGCRTVLIPKSSKPDRLKDINNWRPITIGSILLRLFSRIVTARLSKACPLNPRQRGFRRAAGCSENLKLLQTIIWSAKREHRPLGVVFVDIAKAFDTVSHQHIIHALQQREVDPHIVGLVSNMYENISTYITTKRNTHTDKIQIRVGVKQGDPMSPLLFNLAMDPLLCKLEESGKGYHRGQSSITAMAFADDLVLLSDSWENMNTNISILETFCNLTGLKTQGQKCHGFYIKPTKDSYTINDCAAWTINGTPLNMIDPGESEKYLGLQFDPWIGIARSGLSTKLDFWLQRIDQAPLKPLQKTDILKTYTIPRLIYIADHSEVKSALLETLDQKIRTAVKEWLHLPPCTCDAILYSSTRDGGLGITKLAGLIPSVQARRLHRIAQSSDDTMKCFMEKEKMEQLHKKLWIQAGGDRENIPSIWEAPPSSEPPNNVSTNSEWEAPTQKDKFPKPCNWRKNEFKKWTKLASQGRGIVNFERDKISNHWIQYYRRIPHRKLLTALQLRANVYPTREFLARGRQDQYIKACRHCDADNESCAHIIGNCPVTQDARIKRHNYICELLLEEAKKKDWVVFKEPHIRDSNKELYKPDLIFVKDGRALVVDVTVRYEAAKSSLEEAAAEKVRKYKHLETEVRHLTNAKDVTFVGFPLGARGKWHQDNFKLLTELGLSKSRQVKMAETFSTVALFSSVDIVHMFASRARKSMVM

SEQ ID NO: 1612 - protein, 1390 aa, synthetic construct
MASCPKPGPPVSAGAMSLESGLTTHSVLAIERGPNSLANSGSDFGGGGLGLPLRLLRVSVGTQTSRSDWVDLVSWSHPGPTSKSQQVDLVSLFPKHRVDLLSKNDQVDLVAQFLPSKFPPNLAENDLALLVNLEFYRSDLHVYECVHKAAHWEGLSGLPEVYEQLAPQPCVGETLHSSLPRDSELFVPEEGSSEKESEDAPKTSPPTPGKHGLEQTGEEKVMVTVPDKNPPCPCCGTRVNSVLNLIEHLKVSHGKRGVCFRCAKCGKENSNYHSVVCHFKKCRGPETEKAPAGEWICEVCNRDFTTKIGLGQHKRLAHPAVRNQERIVASQPKETSNRGAHKRCWTKEEEELLIRLEAQFEGNKNINKLIAEHITTKTAKQISDKRRLLSRKPAEEPREEPGTCHHTRRAAASLRTEPEMSHHAQAEDRDNGPGRRPLPGRAAAGGRTMDEIRRHPDKGNGQQRPTKQKSEEQLQAYYKKTLEERLSAGALNTFPRAFKQVMEGRDIKLVINQTAQDCFGCLESISQIRTATRDKKDTVTREKHPKKPFQKWMKKRAIKKGNYLRFQRLFYLDRGKLAKIILDDIECLSCDIPLSEIYSVFKTRWETTGSFKSLGDFKTYGKADNTAFRELITAKEIEKNVQEMSKGSAPGPDGITLGDVVKMDPEFSRTMEIFNLWLTTGKIPDMVRGCRTVLIPKSSKPDRLKDINNWRPITIGSILLRLFSRIVTARLSKACPLNPRQRGFIRAAGCSENLKLLQTIIWSAKREHRPLAVVFVDIAKAFDTVSHQHIIHALQQREVDPHIVGLVSNMYENISTYITTKRNTHTDKIQIRVGVKQGDPMSPLLFNLAMDPLLCKLEESGKGYHRGQSSITAMAFADDLVLLSDSWENMNTNISILETFCNLTGLKTQGQKCHGFYIKPTKDSYTINDCAAWTINGTPLNMIDPGESEKYLGLQFDPWIGIARSGLSTKLDFWLQRIDQAPLKPLQKTDILKTYTIPRLIYIADHSEVKSALLETLDQKIRTAVKEWLHLPPCTCDAILYSSTRDGGLGITKLAGLIPSVQARRLHRIAQSSDDTMKCFMEKEKMEQLHKKLWIQAGGDRENIPSIWEAPPSSEPPNNVSTNSEWEAPTQKDKFPKPCNWRKNEFKKWTKLASQGRGIVNFERDKISNHWIQYYRRIPHRKLLTALQLRANVYPTREFLARGRQDQYIKACRHCDADNESCAHIIGNCPVTQDARIKRHNYICELLLEEAKKKDWVVFKEPHIRDSNKELYKPDLIFVKDGRALVVDVTVRYEAAKSSLEEAAAEKVRKYKHLETEVRHLTNAKDVTFVGFPLGARGKWHQDNFKLLTELGLSKSRQVKMAETFSTVALFSSVDIVHMFASRARKSMVM

SEQ ID NO: 1613 - protein, 1390 aa, synthetic construct
MASCPKPGPPVSAGAMSLESGLTTHSVLAIERGPNSLANSGSDFGGGGLGLPLRLLRVSVGTQTSRSDWVDLVSWSHPGPTSKSQQVDLVSLFPKHRVDLLSKNDQVDLVAQFLPSKFPPNLAENDLALLVNLEFYRSDLHVYECVHKAAHWEGLSGLPEVYEQLAPQPCVGETLHSSLPRDSELFVPEEGSSEKESEDAPKTSPPTPGKHGLEQTGEEKVMVTVPDKNPPCPCCGTRVNSVLNLIEHLKVSHGKRGVCFRCAKCGKENSNYHSVVCHFKKCRGPETEKAPAGEWICEVCNRDFTTKIGLGQHKRLAHPAVRNQERIVASQPKETSNRGAHKRCWTKEEEELLIRLEAQFEGNKNINKLIAEHITTKTAKQISDKRRLLSRKPAEEPREEPGTCHHTRRAAASLRTEPEMSHHAQAEDRDNGPGRRPLPGRAAAGGRTMDEIRRHPDKGNGQQRPTKQKSEEQLQAYYKKTLEERLSAGALNTFPRAFKQVMEGRDIKLVINQTAQDCFGCLESISQIRTATRDKKDTVTREKHPKKPFQKWMKKRAIKKGNYLRFQRLFYLDRGKLAKIILDDIECLSCDIPLSEIYSVFKTRWETTGSFKSLGDFKTYGKADNTAFRELITAKEIEKNVQEMSKGSAPGPDGITLGDVVKMDPEFSRTMEIFNLWLTTGKIPDMVRGCRTVLIPKSSKPDRLKDINNWRPITIGSILLRLFSRIVTARLSKACPLNPRQRGFIRSAGCSENLKLLQTIIWSAKREHRPLGVVFVDIAKAFDTVSHQHIIHALQQREVDPHIVGLVSNMYENISTYITTKRNTHTDKIQIRVGVKQGDPMSPLLFNLAMDPLLCKLEESGKGYHRGQSSITAMAFADDLVLLSDSWENMNTNISILETFCNLTGLKTQGQKCHGFYIKPTKDSYTINDCAAWTINGTPLNMIDPGESEKYLGLQFDPWIGIARSGLSTKLDFWLQRIDQAPLKPLQKTDILKTYTIPRLIYIADHSEVKSALLETLDQKIRTAVKEWLHLPPCTCDAILYSSTRDGGLGITKLAGLIPSVQARRLHRIAQSSDDTMKCFMEKEKMEQLHKKLWIQAGGDRENIPSIWEAPPSSEPPNNVSTNSEWEAPTQKDKFPKPCNWRKNEFKKWTKLASQGRGIVNFERDKISNHWIQYYRRIPHRKLLTALQLRANVYPTREFLARGRQDQYIKACRHCDADNESCAHIIGNCPVTQDARIKRHNYICELLLEEAKKKDWVVFKEPHIRDSNKELYKPDLIFVKDGRALVVDVTVRYEAAKSSLEEAAAEKVRKYKHLETEVRHLTNAKDVTFVGFPLGARGKWHQDNFKLLTELGLSKSRQVKMAETFSTVALFSSVDIVHMFASRARKSMVM

SEQ ID NO: 1614 - protein, 1390 aa, synthetic construct
MASCPKPGPPVSAGAMSLESGLTTHSVLAIERGPNSLANSGSDFGGGGLGLPLRLLRVSVGTQTSRSDWVDLVSWSHPGPTSKSQQVDLVSLFPKHRVDLLSKNDQVDLVAQFLPSKFPPNLAENDLALLVNLEFYRSDLHVYECVHKAAHWEGLSGLPEVYEQLAPQPCVGETLHSSLPRDSELFVPEEGSSEKESEDAPKTSPPTPGKHGLEQTGEEKVMVTVPDKNPPCPCCGTRVNSVLNLIEHLKVSHGKRGVCFRCAKCGKENSNYHSVVCHFKKCRGPETEKAPAGEWICEVCNRDFTTKIGLGQHKRLAHPAVRNQERIVASQPKETSNRGAHKRCWTKEEEELLIRLEAQFEGNKNINKLIAEHITTKTAKQISDKRRLLSRKPAEEPREEPGTCHHTRRAAASLRTEPEMSHHAQAEDRDNGPGRRPLPGRAAAGGRTMDEIRRHPDKGNGQQRPTKQKSEEQLQAYYKKTLEERLSAGALNTFPRAFKQVMEGRDIKLVINQTAQDCFGCLESISQIRTATRDKKDTVTREKHPKKPFQKWMKKRAIKKGNYLRFQRLFYLDRGKLAKIILDDIECLSCDIPLSEIYSVFKTRWETTGSFKSLGDFKTYGKADNTAFRELITAKEIEKNVQEMSKGSAPGPDGITLGDVVKMDPEFSRTMEIFNLWLTTGKIPDMVRGCRTVLIPKSSKPDRLKDINNWRPITIGSILLRLFSRIVTARLSKACPLNPRQRGFIRAPGCSENLKLLQTIIWSAKREHRPLGVVFVDIAKAFDTVSHQHIIHALQQREVDPHIVGLVSNMYENISTYITTKRNTHTDKIQIRVGVKQGDPMSPLLFNLAMDPLLCKLEESGKGYHRGQSSITAMAFADDLVLLSDSWENMNTNISILETFCNLTGLKTQGQKCHGFYIKPTKDSYTINDCAAWTINGTPLNMIDPGESEKYLGLQFDPWIGIARSGLSTKLDFWLQRIDQAPLKPLQKTDILKTYTIPRLIYIADHSEVKSALLETLDQKIRTAVKEWLHLPPCTCDAILYSSTRDGGLGITKLAGLIPSVQARRLHRIAQSSDDTMKCFMEKEKMEQLHKKLWIQAGGDRENIPSIWEAPPSSEPPNNVSTNSEWEAPTQKDKFPKPCNWRKNEFKKWTKLASQGRGIVNFERDKISNHWIQYYRRIPHRKLLTALQLRANVYPTREFLARGRQDQYIKACRHCDADNESCAHIIGNCPVTQDARIKRHNYICELLLEEAKKKDWVVFKEPHIRDSNKELYKPDLIFVKDGRALVVDVTVRYEAAKSSLEEAAAEKVRKYKHLETEVRHLTNAKDVTFVGFPLGARGKWHQDNFKLLTELGLSKSRQVKMAETFSTVALFSSVDIVHMFASRARKSMVM

SEQ ID NO: 1615 - protein, 1390 aa, synthetic construct
MASCPKPGPPVSAGAMSLESGLTTHSVLAIERGPNSLANSGSDFGGGGLGLPLRLLRVSVGTQTSRSDWVDLVSWSHPGPTSKSQQVDLVSLFPKHRVDLLSKNDQVDLVAQFLPSKFPPNLAENDLALLVNLEFYRSDLHVYECVHKAAHWEGLSGLPEVYEQLAPQPCVGETLHSSLPRDSELFVPEEGSSEKESEDAPKTSPPTPGKHGLEQTGEEKVMVTVPDKNPPCPCCGTRVNSVLNLIEHLKVSHGKRGVCFRCAKCGKENSNYHSVVCHFKKCRGPETEKAPAGEWICEVCNRDFTTKIGLGQHKRLAHPAVRNQERIVASQPKETSNRGAHKRCWTKEEEELLIRLEAQFEGNKNINKLIAEHITTKTAKQISDKRRLLSRKPAEEPREEPGTCHHTRRAAASLRTEPEMSHHAQAEDRDNGPGRRPLPGRAAAGGRTMDEIRRHPDKGNGQQRPTKQKSEEQLQAYYKKTLEERLSAGALNTFPRAFKQVMEGRDIKLVINQTAQDCFGCLESISQIRTATRDKKDTVTREKHPKKPFQKWMKKRAIKKGNYLRFQRLFYLDRGKLAKIILDDIECLSCDIPLSEIYSVFKTRWETTGSFKSLGDFKTYGKADNTAFRELITAKEIEKNVQEMSKGSAPGPDGITLGDVVKMDPEFSRTMEIFNLWLTTGKIPDMVRGCRTVLIPKSSKPDRLKDINNWRPITIGSILLRLFSRIVTARLSKACPLNPRQRGFIRAAGCSENLKLLQTIIWSAKREHRPLGVVFVDFAKAFDTVSHQHIIHALQQREVDPHIVGLVSNMYENISTYITTKRNTHTDKIQIRVGVKQGDPMSPLLFNLAMDPLLCKLEESGKGYHRGQSSITAMAFADDLVLLSDSWENMNTNISILETFCNLTGLKTQGQKCHGFYIKPTKDSYTINDCAAWTINGTPLNMIDPGESEKYLGLQFDPWIGIARSGLSTKLDFWLQRIDQAPLKPLQKTDILKTYTIPRLIYIADHSEVKSALLETLDQKIRTAVKEWLHLPPCTCDAILYSSTRDGGLGITKLAGLIPSVQARRLHRIAQSSDDTMKCFMEKEKMEQLHKKLWIQAGGDRENIPSIWEAPPSSEPPNNVSTNSEWEAPTQKDKFPKPCNWRKNEFKKWTKLASQGRGIVNFERDKISNHWIQYYRRIPHRKLLTALQLRANVYPTREFLARGRQDQYIKACRHCDADNESCAHIIGNCPVTQDARIKRHNYICELLLEEAKKKDWVVFKEPHIRDSNKELYKPDLIFVKDGRALVVDVTVRYEAAKSSLEEAAAEKVRKYKHLETEVRHLTNAKDVTFVGFPLGARGKWHQDNFKLLTELGLSKSRQVKMAETFSTVALFSSVDIVHMFASRARKSMVM

SEQ ID NO: 1616 - protein, 1390 aa, synthetic construct
MASCPKPGPPVSAGAMSLESGLTTHSVLAIERGPNSLANSGSDFGGGGLGLPLRLLRVSVGTQTSRSDWVDLVSWSHPGPTSKSQQVDLVSLFPKHRVDLLSKNDQVDLVAQFLPSKFPPNLAENDLALLVNLEFYRSDLHVYECVHKAAHWEGLSGLPEVYEQLAPQPCVGETLHSSLPRDSELFVPEEGSSEKESEDAPKTSPPTPGKHGLEQTGEEKVMVTVPDKNPPCPCCGTRVNSVLNLIEHLKVSHGKRGVCFRCAKCGKENSNYHSVVCHFKKCRGPETEKAPAGEWICEVCNRDFTTKIGLGQHKRLAHPAVRNQERIVASQPKETSNRGAHKRCWTKEEEELLIRLEAQFEGNKNINKLIAEHITTKTAKQISDKRRLLSRKPAEEPREEPGTCHHTRRAAASLRTEPEMSHHAQAEDRDNGPGRRPLPGRAAAGGRTMDEIRRHPDKGNGQQRPTKQKSEEQLQAYYKKTLEERLSAGALNTFPRAFKQVMEGRDIKLVINQTAQDCFGCLESISQIRTATRDKKDTVTREKHPKKPFQKWMKKRAIKKGNYLRFQRLFYLDRGKLAKIILDDIECLSCDIPLSEIYSVFKTRWETTGSFKSLGDFKTYGKADNTAFRELITAKEIEKNVQEMSKGSAPGPDGITLGDVVKMDPEFSRTMEIFNLWLTTGKIPDMVRGCRTVLIPKSSKPDRLKDINNWRPITIGSILLRLFSRIVTARLSKACPLNPRQRGFIRAAGCSENLKLLQTIIWSAKREHRPLGVVFVDIAKAFDTVSHQHIIHALQQREVDPHIVGLVSNMYENISTYITTKRNTHTDKIQIRVGVKQGDPLSPLLFNLAMDPLLCKLEESGKGYHRGQSSITAMAFADDLVLLSDSWENMNTNISILETFCNLTGLKTQGQKCHGFYIKPTKDSYTINDCAAWTINGTPLNMIDPGESEKYLGLQFDPWIGIARSGLSTKLDFWLQRIDQAPLKPLQKTDILKTYTIPRLIYIADHSEVKSALLETLDQKIRTAVKEWLHLPPCTCDAILYSSTRDGGLGITKLAGLIPSVQARRLHRIAQSSDDTMKCFMEKEKMEQLHKKLWIQAGGDRENIPSIWEAPPSSEPPNNVSTNSEWEAPTQKDKFPKPCNWRKNEFKKWTKLASQGRGIVNFERDKISNHWIQYYRRIPHRKLLTALQLRANVYPTREFLARGRQDQYIKACRHCDADNESCAHIIGNCPVTQDARIKRHNYICELLLEEAKKKDWVVFKEPHIRDSNKELYKPDLIFVKDGRALVVDVTVRYEAAKSSLEEAAAEKVRKYKHLETEVRHLTNAKDVTFVGFPLGARGKWHQDNFKLLTELGLSKSRQVKMAETFSTVALFSSVDIVHMFASRARKSMVM

SEQ ID NO: 1617 - protein, 1390 aa, synthetic construct
MASCPKPGPPVSAGAMSLESGLTTHSVLAIERGPNSLANSGSDFGGGGLGLPLRLLRVSVGTQTSRSDWVDLVSWSHPGPTSKSQQVDLVSLFPKHRVDLLSKNDQVDLVAQFLPSKFPPNLAENDLALLVNLEFYRSDLHVYECVHKAAHWEGLSGLPEVYEQLAPQPCVGETLHSSLPRDSELFVPEEGSSEKESEDAPKTSPPTPGKHGLEQTGEEKVMVTVPDKNPPCPCCGTRVNSVLNLIEHLKVSHGKRGVCFRCAKCGKENSNYHSVVCHFKKCRGPETEKAPAGEWICEVCNRDFTTKIGLGQHKRLAHPAVRNQERIVASQPKETSNRGAHKRCWTKEEEELLIRLEAQFEGNKNINKLIAEHITTKTAKQISDKRRLLSRKPAEEPREEPGTCHHTRRAAASLRTEPEMSHHAQAEDRDNGPGRRPLPGRAAAGGRTMDEIRRHPDKGNGQQRPTKQKSEEQLQAYYKKTLEERLSAGALNTFPRAFKQVMEGRDIKLVINQTAQDCFGCLESISQIRTATRDKKDTVTREKHPKKPFQKWMKKRAIKKGNYLRFQRLFYLDRGKLAKIILDDIECLSCDIPLSEIYSVFKTRWETTGSFKSLGDFKTYGKADNTAFRELITAKEIEKNVQEMSKGSAPGPDGITLGDVVKMDPEFSRTMEIFNLWLTTGKIPDMVRGCRTVLIPKSSKPDRLKDINNWRPITIGSILLRLFSRIVTARLSKACPLNPRQRGFIRAAGCSENLKLLQTIIWSAKREHRPLGVVFVDIAKAFDTVSHQHIIHALQQREVDPHIVGLVSNMYENISTYITTKRNTHTDKIQIRVGVKQGDPMSPLLFNLALDPLLCKLEESGKGYHRGQSSITAMAFADDLVLLSDSWENMNTNISILETFCNLTGLKTQGQKCHGFYIKPTKDSYTINDCAAWTINGTPLNMIDPGESEKYLGLQFDPWIGIARSGLSTKLDFWLQRIDQAPLKPLQKTDILKTYTIPRLIYIADHSEVKSALLETLDQKIRTAVKEWLHLPPCTCDAILYSSTRDGGLGITKLAGLIPSVQARRLHRIAQSSDDTMKCFMEKEKMEQLHKKLWIQAGGDRENIPSIWEAPPSSEPPNNVSTNSEWEAPTQKDKFPKPCNWRKNEFKKWTKLASQGRGIVNFERDKISNHWIQYYRRIPHRKLLTALQLRANVYPTREFLARGRQDQYIKACRHCDADNESCAHIIGNCPVTQDARIKRHNYICELLLEEAKKKDWVVFKEPHIRDSNKELYKPDLIFVKDGRALVVDVTVRYEAAKSSLEEAAAEKVRKYKHLETEVRHLTNAKDVTFVGFPLGARGKWHQDNFKLLTELGLSKSRQVKMAETFSTVALFSSVDIVHMFASRARKSMVM

SEQ ID NO: 1618 - protein, 1390 aa, synthetic construct
MASCPKPGPPVSAGAMSLESGLTTHSVLAIERGPNSLANSGSDFGGGGLGLPLRLLRVSVGTQTSRSDWVDLVSWSHPGPTSKSQQVDLVSLFPKHRVDLLSKNDQVDLVAQFLPSKFPPNLAENDLALLVNLEFYRSDLHVYECVHKAAHWEGLSGLPEVYEQLAPQPCVGETLHSSLPRDSELFVPEEGSSEKESEDAPKTSPPTPGKHGLEQTGEEKVMVTVPDKNPPCPCCGTRVNSVLNLIEHLKVSHGKRGVCFRCAKCGKENSNYHSVVCHFKKCRGPETEKAPAGEWICEVCNRDFTTKIGLGQHKRLAHPAVRNQERIVASQPKETSNRGAHKRCWTKEEEELLIRLEAQFEGNKNINKLIAEHITTKTAKQISDKRRLLSRKPAEEPREEPGTCHHTRRAAASLRTEPEMSHHAQAEDRDNGPGRRPLPGRAAAGGRTMDEIRRHPDKGNGQQRPTKQKSEEQLQAYYKKTLEERLSAGALNTFPRAFKQVMEGRDIKLVINQTAQDCFGCLESISQIRTATRDKKDTVTREKHPKKPFQKWMKKRAIKKGNYLRFQRLFYLDRGKLAKIILDDIECLSCDIPLSEIYSVFKTRWETTGSFKSLGDFKTYGKADNTAFRELITAKEIEKNVQEMSKGSAPGPDGITLGDVVKMDPEFSRTMEIFNLWLTTGKIPDMVRGCRTVLIPKSSKPDRLKDINNWRPITIGSILLRLFSRIVTARLSKACPLNPRQRGFIRAAGCSENLKLLQTIIWSAKREHRPLGVVFVDIAKAFDTVSHQHIIHALQQREVDPHIVGLVSNMYENISTYITTKRNTHTDKIQIRVGVKQGDPMSPLLFNLAMDPLLCKLEESGKGYHRGQSSITAMAFADDLVLLSDSWENMNTNISILETFCNLTGLKTQGQKCHGFYIKPTKDSYTINDCAAWTINGTPLNMIDPGESLKYLGLQFDPWIGIARSGLSTKLDFWLQRIDQAPLKPLQKTDILKTYTIPRLIYIADHSEVKSALLETLDQKIRTAVKEWLHLPPCTCDAILYSSTRDGGLGITKLAGLIPSVQARRLHRIAQSSDDTMKCFMEKEKMEQLHKKLWIQAGGDRENIPSIWEAPPSSEPPNNVSTNSEWEAPTQKDKFPKPCNWRKNEFKKWTKLASQGRGIVNFERDKISNHWIQYYRRIPHRKLLTALQLRANVYPTREFLARGRQDQYIKACRHCDADNESCAHIIGNCPVTQDARIKRHNYICELLLEEAKKKDWVVFKEPHIRDSNKELYKPDLIFVKDGRALVVDVTVRYEAAKSSLEEAAAEKVRKYKHLETEVRHLTNAKDVTFVGFPLGARGKWHQDNFKLLTELGLSKSRQVKMAETFSTVALFSSVDIVHMFASRARKSMVM

SEQ ID NO: 1619 - protein, 1390 aa, synthetic construct
MASCPKPGPPVSAGAMSLESGLTTHSVLAIERGPNSLANSGSDFGGGGLGLPLRLLRVSVGTQTSRSDWVDLVSWSHPGPTSKSQQVDLVSLFPKHRVDLLSKNDQVDLVAQFLPSKFPPNLAENDLALLVNLEFYRSDLHVYECVHKAAHWEGLSGLPEVYEQLAPQPCVGETLHSSLPRDSELFVPEEGSSEKESEDAPKTSPPTPGKHGLEQTGEEKVMVTVPDKNPPCPCCGTRVNSVLNLIEHLKVSHGKRGVCFRCAKCGKENSNYHSVVCHFKKCRGPETEKAPAGEWICEVCNRDFTTKIGLGQHKRLAHPAVRNQERIVASQPKETSNRGAHKRCWTKEEEELLIRLEAQFEGNKNINKLIAEHITTKTAKQISDKRRLLSRKPAEEPREEPGTCHHTRRAAASLRTEPEMSHHAQAEDRDNGPGRRPLPGRAAAGGRTMDEIRRHPDKGNGQQRPTKQKSEEQLQAYYKKTLEERLSAGALNTFPRAFKQVMEGRDIKLVINQTAQDCFGCLESISQIRTATRDKKDTVTREKHPKKPFQKWMKKRAIKKGNYLRFQRLFYLDRGKLAKIILDDIECLSCDIPLSEIYSVFKTRWETTGSFKSLGDFKTYGKADNTAFRELITAKEIEKNVQEMSKGSAPGPDGITLGDVVKMDPEFSRTMEIFNLWLTTGKIPDMVRGCRTVLIPKSSKPDRLKDINNWRPITIGSILLRLFSRIVTARLSKACPLNPRQRGFIRAAGCSENLKLLQTIIWSAKREHRPLGVVFVDIAKAFDTVSHQHIIHALQQREVDPHIVGLVSNMYENISTYITTKRNTHTDKIQIRVGVKQGDPMSPLLFNLAMDPLLCKLEESGKGYHRGQSSITAMAFADDLVLLSDSWENMNTNISILETFCNLTGLKTQGQKCHGFYIKPTKDSYTINDCAAWTINGTPLNMIDPGESEKYLGLRFDPWIGIARSGLSTKLDFWLQRIDQAPLKPLQKTDILKTYTIPRLIYIADHSEVKSALLETLDQKIRTAVKEWLHLPPCTCDAILYSSTRDGGLGITKLAGLIPSVQARRLHRIAQSSDDTMKCFMEKEKMEQLHKKLWIQAGGDRENIPSIWEAPPSSEPPNNVSTNSEWEAPTQKDKFPKPCNWRKNEFKKWTKLASQGRGIVNFERDKISNHWIQYYRRIPHRKLLTALQLRANVYPTREFLARGRQDQYIKACRHCDADNESCAHIIGNCPVTQDARIKRHNYICELLLEEAKKKDWVVFKEPHIRDSNKELYKPDLIFVKDGRALVVDVTVRYEAAKSSLEEAAAEKVRKYKHLETEVRHLTNAKDVTFVGFPLGARGKWHQDNFKLLTELGLSKSRQVKMAETFSTVALFSSVDIVHMFASRARKSMVM

SEQ ID NO: 1620 - protein, 1390 aa, synthetic construct
MASCPKPGPPVSAGAMSLESGLTTHSVLAIERGPNSLANSGSDFGGGGLGLPLRLLRVSVGTQTSRSDWVDLVSWSHPGPTSKSQQVDLVSLFPKHRVDLLSKNDQVDLVAQFLPSKFPPNLAENDLALLVNLEFYRSDLHVYECVHFAAHWEGLSGLPEVYEQLAPQPCVGETLHSSLPRDSELFVPEEGSSEKESEDAPKTSPPTPGKHGLEQTGEEKVMVTVPDKNPPCPCCGTRVNSVLNLIEHLKVSHGKRGVCFRCAKCGKENSNYHSVVCHFKKCRGPETEKAPAGEWICEVCNRDFTTKIGLGQHKRLAHPAVRNQERIVASQPKETSNRGAHKRCWTKEEEELLIRLEAQFEGNKNINKLIAEHITTKTAKQISDKRRLLSRKPAEEPREEPGTCHHTRRAAASLRTEPEMSHHAQAEDRDNGPGRRPLPGRAAAGGRTMDEIRRHPDKGNGQQRPTKQKSEEQLQAYYKKTLEERLSAGALNTFPRAFKQVMEGRDIKLVINQTAQDYFGCLESISQIRTATRDKKDTVTRKKHPKKPFQKWMKDRAIKKGNYLRFQRLFYLDRGKLAKIILDDIECLSCDIPLSEIYSVFKTRWETTGSFKSLGDFKTYGKADNTAFRELITAKEIEKNVQEMSKGSAPGPDGITLGDVVKMDPEGSRTMEIFNLWLTTGKIPDMVRGCRTVLIPKSSDPDRLKDINNWRPITIGSILLRLFSRIVTARLSKACPLNPRQRGFIRAAGCSENLKLLQTIIWSAKREHRPLGVVFVDIAKAFDTVSHQHIIHALQQREVDPHIVGLVSNMYENISTYITTKRNTHTDKIQIRVGVKQGDPMSPLLFNLAMDPLLCKLEESGKGYHRGQSSITAMAFADDLVLLSDSWEGMNTNISILETFCNLTGLKTQGQKCHGFYIKPTKKSYTINDCAAWTINGTPLNMIDPGESEKYLGLQFDPWIGIARSGLSTKLDFWLQRIDQAPLKPLQKLDILKTYTIPRLIYIADHSEVKTALLETLDQKIRTAVKEWLHLPPCTCDAILYSSTRDGGLGITKLAGLIPSVQARRLHRIAQSSDDTMKCFMEKEKMEQLHKKLWIQAGGDRENIPSIWEAPPSSEPPNNVSTNSEWEAPTQKDKFPKPCNWRKNEFKKWTKLASQGRGIVNFERDKISNHWIQYYRRIPHRKLLTALQLRANVYPTREFLARGRQDQYIKACRHCDADIESCAHIIGNCPVTQDARIKRHNYICELLLEEAKKKDWVVFKEPHIRDSNKELYKPDLIFVKDARALVVDVTVRYEAAKSSLEEAAAEKVRKYKHLETEVRHLTNAKDVTFVGFPLGARGKWHQDNFKLLTELGLSKSRQVKMAETFSTVALFSSVDIVHMFASRARKSMVM

SEQ ID NO: 1621 - protein, 1390 aa, synthetic construct
MASCPKPGPPVSAGAMSLESGLTTHSVLAIERGPNSLANSGSDFGGGGLGGPLRLLRVSVGTQTSRSDWVDLVSWSHPGPTSKSQQVDLVSLFPKHRVDLLSKNDQVDLVAQFLPSKFPPNLAENDLALLVNLEFYRSDLHVYECVHFAAHWEGLSGLPEVYEQLAPQPCVGETLHSSLPRDSELFVPEEGSSEKESEDAPKTSPPTPFKHGRKQTGEEKVMVTVPDKNPPCPCCGTRVNSVLNLIEHLKVSHGKRGVCFRCAKCGKERSNYHSVVCHFKKCRGPETEKAPAGEWICEVCNRDFRTKIGLGQHKRLAHPAVRNQERIVASQPKETSNRGAHKRCWTKEEEELLIRLEAQFEGNKNINKLIAEHITTKTAKQISDMRRLLSRKPAEEPREEPGTCHHTRRAAASLRTEPEMSHHAQAEDRDNGPGRRPLPGRAAAGGRYMDEIRRHPDKGNGQQRPTKQKSEEQLQAYYKKTLEERLSAGALNTFPRAFKQVMEGRDIKLVINQTAQDYFGCLESISQIRTATRDKKDTGTREKHPKKPFQKWMKKRAIKKGNYLRFQRLFYLDRGKLAKIILDDIECLSCDIPLSEIYSVFKTRWETTGSFKSLGDFKTYGKADNTAFRELITAKEIEKNVQEMSKGSAPGPDGITLGDIVKMDPEGSRTMEIFNLCLTTGKIPDMVRGCRTVLIPKSSDPDRLKDINNWRPITIGSILLRLFSRIVTARLSKACPLNPRQRGFIRAAGCSENLKLLQTIIWSAKREHRPLGVVFVDIAKAFDTVSHQHIIHALQQREVDPHIVGLVSNMYENISTYITTKRNTHTDKIQIRVGVKQGDPMSPLLFNLAMDPLLCKLEESGKGYHRGQSSITAMAFADDLVLLSDSWENMNTNISILETFCNLTGLKTQGQKCHGFYIKPTKDSYTINDCAAWTINGTPLNMIDPGESEKYLGLQFDPWIGIARSGLSTKLDFWLQRIDQAPLKPLQKTDILKTYTIPRLIYIADHSEVKSALLETLDQKIRTAVKEWLHLPPCTCDAILYSSTRDGGLGITKLAGLIPSVQARRLHRIAQSSDDTMKCFMEKEKMEQLHKKLWIQAGGDRENIPSIWEAPPSSEPPNNVSTNSEWEAPTQKDKFPKPCNWRKNEFKKWTKLASQGRGIVNFERDKISNHWIQYYRRIPHRKLLTALQLRANVYPTREFLARGRQDQYIKACRHCDADIESCAHIIGNCPVTQDARIKRHNYICELLLEEAKKKDWVVFKEPHIRDSNKELYKPDLIFVKDARALVVDVTVRYEAAKSSLEEAAAEKVRKYKHLETEVRHLTNAKDVTFVGFPLGARGKWHQDNFKLLTELGLSKSRQVKMAETFSTVALFSSVDIVHMFASRARKSMVM

SEQ ID NO: 1622 - protein, 1390 aa, synthetic construct
MASCPKPGPPVSAGAMSLESGLTTHSVLAIERGPNSLANSGSDFGGGGLGLPLRLLRVSVGTQTSRSDWVDLVSWSHPGPTSKSQQVDLVSLFPKHRVDLLSKNDQVDLVAQFLPSKFPPNLAENDLALLVNLEFYRSDLHVYECVHFAAHWEGLSGLPEVYEQLAPQPCVGETLHSSLPRDSELFVPEEGSSEKESEDAPKTSPPTPGKHGLEQTGEEKVMVTVPDKNPPCPCCGTRVNSVLNLIEHLKVSHGKRGVCFRCAKCGKENSNYHSVVCHFKKCRGPETEKAPAGEWICEVCNRDFTTKIGLGQHKRRWHPAVRNQERIVASQPKETSNRGAHKRCWTKEERELLIRLEAQFEGNKNINKLIAEHITTKTAKQISDKRRLLSRKPAEEPRMMPGTCHHTRRAAASLRTEPEMSHHAQAEDRDNGPGRRPLPGRAAAGGRTMDEIRRHPDKGNGQQRPTKQKSEEQLQAYYKKTLEERLSAGALNTFPRAFKQVMEGRDIKLVINQTAQDCFGCLESISQIRTATRDKKDTVTREKHPKKPFQKWMKKRAIKKGNYLRFQRLFYLDRGKLAKIILDDIECLSCDIPLSEIYSVFKTRWETTGSFKSLGDFKTYGKADNTAFRELITAKEIEKNVQEMSKGSAPGPDGITLGDVVKMDPEGSRTMEIFNLWLTTGKIPDMVRGCRTVLIPKSSDPDRLKDINNWRPITIGSILLRLFSRIVTARLSKACPLNPRQRGFIRAAGCSENLKLLQTIIWSAKREHRPLGVVFVDIAKAFDTVSHQHIIHALQQREVDPHIVGLVSNMYENISTYITTKRNTHTDKIQIRVGVKQGDPMSPLLFNLAMDPLLCKLEESGKGYHRGQSSITAMAFADDLVLLSDSWEGMNTNISILETFCNLTGLKTQGQKCHGFYIKPTKKSYTINDCAAWTINGTPLNMIDPGESEKYLGLQFDPWIGIARSGLSTKLDFWLQRIDQAPLKPLQKLDILKTYTIPRLIYIADHSEVKSALLETLDQKIRTAVKEWLHLPPCTCDAILYSSTRDGGLGITKLAGLIPSVQARRLHRIAQSSDDTMKCFMEKEKMEQLHKKLWIQAGGDRENIPSIWEAPPSSEPPNNVSTNSEWEAPTQKDKFPKPCNWRKNEFKKWTKLASQGRGIVNFERDKISNHWIQYYRRIPHRKLLTALQLRANVYPTREFLARGRQDQYIKACRHCDADNESCAHIIGNCPVTQDARIKRHNKICELLLEEAKKKDWVVFKEPHIRDSNKELYKPDLIFVKDARALVVDVTVRYEAAKSSLEEAAAEKVRKYKHLETEVRHLTNAKDVTFVGFPLGARGKWHQDNFKLLTELGLSKSRQVKMAETFSTVALFSSVDIVHMFASRARKSMVM

SEQ ID NO: 1623 - protein, 1390 aa, synthetic construct
MASCPKPGPPVSAGAMSLESGLTTHSVLAIERGPNSLANSGSDFGGGGLGLPLRLLRVSVGTQTSRSDWVDLVSWSHPGPTSKSQQVDLVSLFPKHRVDLLSKNDQVDLVAQFLPSKFPPNLAENDLALLVNLEFYRSDLHVYECVHFAAHWEGLSGLPEVYEQLAPQPCVGETLHSSLPRDSELFVPEEGSSEKESEDAPKTSPPTPGKHGLEQTGEEKVMVTVPDKNPPCPCCGTRVNSVLNLIEHLKVSHGKRGVCFRCAKCGKENSNYHSVVCHFPKCRGPETEKAPAGEWICEVCNRDFTTKIGLGQHKRLAHPAVRNQERIVASQPKETSNRGAHKRCWTKEEEELLIRLEAQFEGNKNINKLIAEHITTKTAKQISDKRRLLSRKPAEEPREEPGTCHHTRRAAASLRTEPEMSHHAQAEDRDNGPGRRPLPGRAAAGGRTMDEIRRHPDKGNGQQRPTKQKSEEQLQAYYKKTLEERLSAGALNTFPRAFKQVMEGRDIKLVINQTAQDCFGCLESISQIRTATRDKKDTVTREKHPKKPFQKWMKKRAIKKGNYLRFQRLFYLDRGKLAKIILDDIECLSCDIPLSEIYSVFKTRWETTGSFKSLGDFKTYGKADNTAFRELITAKEIEKNVQEMSKGSAPGPDGITLGDVVKMDPEFSRTMEIFNLWLTTGKIPDMVRGCRTVLIPKSSKPDRLKDINNWRPITIGSILLRLFSRIVTARLSKACPLNPRQRGFIRAAGCSENLKLLQTIIWSAKREHRPLGVVFVDIAKAFDTVSHQHIIHALQQREVDPHIVGLVSNMYENISTYITTKRNTHTDKIQIRVGVKQGDPMSPLLFNLAMDPLLCKLEESGKGYHRGQSSITAMAFADDLVLLSDSWEGMNTNISILETFCNLTGLKTQGQKCHGFYIKPTKKSYTINDCAAWTINGTPLNMIDPGESEKYLGLQFDPWIGIARSGLSTKLDFWLQRIDQAPLKPLQKLDILKTYTIPRLIYIADHSEVKTALLETLDQKIRTAVKEWLHLPPCTCDAILYSSTRDGGLGITKLAGLIPSVQARRLHRIAQSSDDTMKCFMEKEKMEQLHKKLWIQAGGDRENIPSIWEAPPSSEPPNNVSTNSEWEAPTQKDKFPKPCNWRKNEFKKWTKLASQGRGIVNFERDKISNHWIQYYRRIPHRKLLTALQLRANVYPTREFLARGRQDQYIKACRHCDADIESCAHIIGNCPVTQDARIKRHNYICELLLEEAKKKDWVVFKEPHIRDSNKELYKPDLIFVKDGRALVVDVTVRYEAAKSSLEEAAAEKVRKYKHLETEVRHLTNAKDVTFVGFPLGARGKWHQDNFKLLTELGLSKSRQVKMAETFSTVALFSSVDIVHMFASRARKSMVM

SEQ ID NO: 1624 - protein, 1390 aa, synthetic construct
MASCPKPGPPVSAGAMSLESGLTTHSVLAIERGPNSLANSGSDFGGGGLGLPLRLLRVSVGTQTSRSDWVDLVSWSHPGPTSKSQQVDLVSLFPKHRVDLLSKNDQVDLVAQFLPSKFPPNLAENDLALLVNLEFYRSDLHVYEGVHKAAHWEGLSGLPEVYEQLAPQPCVGETLHSSLPRDSELFVPEEGSSEKESEDAPKTSPPTPGKHGLEQTGEEKVMVTVPDKNPPCPCCGTRVNSVLNLIEHLKVSHGKRGVCFRCAKCGKENSNYHSVVCHFKKCRGPETEKAPAGEWICEVCNRDFTTKIGLGQHKRLAHPAVRNQERIVASQPKETSNRGAHKRCWTKEEEELLIRLEAQFEGNKNINKLIAEHITTKTAKQISDKRRLLSRKPAEEPREEPGTCHHTRRAAASLRTEPEMSHHAQAEDRDNGPGRRPLPGRAAAGGRTMDEIRRHPDKGNGQQRPTKQKSEEQLQAYYKKTLEERLSAGALNTFPRAFKQVMEGRDIKLVINQTAQDYFGCLESISQIRTATRDKKDTVTRKKHPKKPFQKWMKKRAIKKGNYLRFQRLFYLDRGKLAKIILDDIECLSCDIPLSEIYSVFKTRWETTGSFKSLGDFKTYGKADNTAFRELITAKEIEKNVQEMSKGSAPGPDGITLGDVVKMDPEGSRTMEIFNLWLTTGKIPDMVRGCRTVLIPKSSDPDRLKDINNWRPITIGSILLRLFSRIVTARLSKACPLNPRQRGFIRAAGCSENLKLLQTIIWSAKREHRPLGVVFVDIAKAFDTVSHQHIIHALQQREVDPHIVGLVSNMYENISTYITTKRNTHTDKIQIRVGVKQGDPMSPLLFNLAMDPLLCKLEESGKGYHRGQSSITAMAFADDLVLLSDSWEGMNTNISILETFCNLTGLKTQGQKCHGFYIKPTKKSYTINDCAAWTINGTPLNMIDPGESEKYLGLQFDPWIGIARSGLSTKLDFWLQRIDQAPLKPLQKLDILKTYTIPRLIYIADHSEVKTALLETLDQKIRTAVKEWLHLPPCTCDAILYSSTRDGGLGITKLAGLIPSVQARRLHRIAQSSDDTMKCFMEKEKMEQLHKKLWIQAGGDRENIPSIWEAPPSSEPPNNVSTNSEWEAPTQKDKFPKPCNWRKNEFKKWTKLASQGRGIVNFERDKISNHWIQYYRRIPHRKLLTALQLRANVYPTREFLARGRQDQYIKACRHCDADIESCAHIIGNCPVTQDARIKRHNKICELLLEEAKKKDWVVFKEPHIRDSNKELYKPDLIFVKDARALVVDVTVRYEAAKSSLEEAAAEKVRKYKHLETEVRHLTNAKDVTFVGFPLGARGKWHQDNFKLLTELGLSKSRQVKMAETFSTVALFSSVDIVHMFASRARKSMVM

SEQ ID NO: 1625 - protein, 1390 aa, synthetic construct
MASCPKPGPPVSAGAMSLESGLTTHSVLAIERGPNSLANSGSDFGGGGLGLPLRLLRVSVGTQTSRSDWVDLVSWSHPGPTSKSQQVDLVSLFPKHRVDLLSKNDQVDLVAQFLPSKFPPNLAENDLALLVNLEFYRSDLHVYECVHKAAHWEGLSGLPEVYEQLAPQPCVGETLHSSLPRDSELFVPEEGSSEKESEDAPKTSPPTPGKHGLEQTGEEKVMVTVPDKNPPCPCCGTRVNSVLNLIEHLKVSHGKRGVCFRCAKCGKENSNYHSVVCHFPKCRGPETEKAPAGEWICEVCNRDFTTKIGLGQHKRLAHPAVRNQERIVASQPKETSNRGAHKRCWTKEEEELLIRLEAQFEGNKNINKLIAEHITTKTAKQISDKRRLLSRKPAEEPREEPGTCHHTRRAAASLRTEPEMSHHAQAEDRDNGPGRRPLPGRAAAGGRTMDEIRRHPDKGNGQQRPTKQKSEEQLQAYYKKTLEERLSAGALNTFPRAFKQVMEGRDIKLVINQTAQDCFGCLESISQIRTATRDKKYTVTREKHPKKPFQKWMKDRAIKKGNYLRFQRLFYLDRGKLAKIILDDIECLSCDIPLSEIYSVFKTRWETTGSFKSLGDFKTYGKADNTAFRELITAKEIEKNVQEMSKGSAPGPDGITLGDVVKMDPEFSLTMEIFNLWLTTGKIPDMVRGCRTVLIPKSSKPDRLKDINNWRPITIGSILLRLFSRIVTARLSKACPLNPRQRGFIRAAGCSENLKLLQTIIWSAKREHRPLGVVFVDIAKAFDTVSHQHIIHALQQREVDPHIVGLVSNMYENISTYITTKRNTHTDKIQIRVGVKQGDPMSPLLFNLAMDPLLCKLEESGKGYHRGQSSITAMAFADDLVLLSDSWENMNTNISILETFCNLTGLKTQGQKCHGFYIKPTKDSYTINDCAAWTINGTPLNMIDPGESEKYLGLQFDPWIGIARSGLSTKLDFWLQRIDQAPLKPLQKTDILKTYTIPRLIYIADHSEVKAALLETLDQKIRTAVKEWLHLPPCTCDAILYSSTRDGGLGITKLAGLIPSVQARRLHRIAQSSDDTMKCFMEKEKMEQLHKKLWIQAGGDRENIPSIWEAPPSSEPPNNVSTNSEWEAPTQKPKFPKPCNWRKNEFKKWTKLASQGRGIVNFERDKISNHWIQYYRRIPHRKLLTALQLRANVYPTREFLARGRQDQYIKACRHCDADIESCAHIIGNCPVTQDARIKRHNYICELLLEEAKKKDWVVFKEPHIRDSNKELYKPDLIFVKDARALVVDVTVRYEAAKSSLEEAAAEKVRKYKHLETEVRHLTNAKDVTFVGFPLGARGKWHQDNFKLLTELGLSKSRQVKMAETFSTVALFSSVDIVHMFASRARKSMVM

SEQ ID NO: 1626 - protein, 1390 aa, synthetic construct
MASCPKPGPPVSAGAMSLESGLTTHSVLAIERGPNSLANSGSDFGGGGLGLPLRLLRVSVGTQTSRSDWVDLVSWSHPGPTSKSQQVDLVSLFPKHRVDLLSKNDQVDLVAQFLPSKFPPNLAENDLALLVNLEFYRSDLHVYECVHFAAHWEGLSGLPEVYEQLAPQPCVGETLHSSLPRDSELFVPEEGSSEKESEDAPKTSPPTPGKHGLEQTGEEKVMVTVPDKNPPCPCCGTRVNSVLNLIEHLKVSHGKRGVCFRCAKCGKENSNYHSVVCHFKKCRGPETEKAPAGEWICEVCNRDFTTKIGLGQHKRLAHPAVRNQERIVASQPKETSNRGAHKRCWTKEEEELLIRLEAQFEGNKNINKLIAEHITTKTAKQISDKRRLLSRKPAEEPREEPGTCHHTRRAAASLRTEPEMSHHAQAEDRDNGPGRRPLPGRAAAGGRTMDEIRRHPDKGNGQQRPTKQKSEEQLQAYYKKTLEERLSAGALNTFPRAFKQVMEGRDIKLVINQTAQDCFGCLESISQIRTATRDKKYTVTREKHPKKPFQKWMKKRAIKKGNYLRFQRLFYLDRGKLAKIILDDIECLSCDIPLSEIYSVFKTRWETTGSFKSLGDFKTYGKADNTAFRELITAKEIEKNVQEMSKGSAPGPDGITLGDVVKMDPEFSLTMEIFNLWLTTGKIPDMVRGCRTVLIPKSSKPDRLKDINNWRPITIGSILLRLFSRIVTARLSKACPLNPRQRGFIRAAGCSENLKLLQTIIWSAKREHRPLGVVFVDIAKAFDTVSHQHIIHALQQREVDPHIVGLVSNMYENISTYITTKRNTHTDKIQIRVGVKQGDPMSPLLFNLAMDPLLCKLEESGKGYHRGQSSITAMAFADDLVLLSDSWENMNTNISILETFCNLTGLKTQGQKCHGFYIKPTKDSYTINDCAAWTINGTPLNMIDPGESEKYLGLQFDPWIGIARSGLSTKLDFWLQRIDQAPLKPLQKTDILKTYTIPRLIYIADHSEVKAALLETLDQKIRTAVKEWLHLPPCTCDAILYSSTRDGGLGITKLAGLIPSVQARRLHRIAQSSDDTMKCFMEKEKMEQLHKKLWIQAGGDRENIPSIWEAPPSSEPPNNVSTNSEWEAPTQKPKFPKPCNWRKNEFKKWTKLASQGRGIVNFERDKISNHWIQYYRRIPHRKLLTALQLRANVYPTREFLARGRQDQYIKACRHCDADIESCAHIIGNCPVTQDARIKRHNYICELLLEEAKKKDWVVFKEPHIRDSNKELYKPDLIFVKDARALVVDVTVRYEAAKSSLEEAAAEKVRKYKHLETEVRHLTNAKDVTFVGFPLGARGKWHQDNFKLLTELGLSKSRQVKMAETFSTVALFSSVDIVHMFASRARKSMVM

SEQ ID NO: 1627 - protein, 1390 aa, synthetic construct
MASCPKPGPPVSAGAMSLESGLTTHSVLAIERGPNSLANSGSDFGGGGLGLPLRLLRVSVGTQTSRSDWVDLVSWSHPGPTSKSQQVDLVSLFPKHRVDLLSKNDQVDLVAQFLPSKFPPNLAENDLALLVNLEFYRSDLHVYECVHKAAHWEGLSGLPEVYEQLAPQPCVGETLHSSLPRDSELFVPEEGSSEKESEDAPKTSPPTPGKHGLEQTGEEKVMVTVPDKNPPCPCCGTRVNSVLNLIEHLKVSHGKRGVCFRCAKCGKENSNYHSVVCHFKKCRGPETEKAPAGEWICEVCNRDFTTKIGLGQHKRLAHPAVRNQERIVASQPKETSNRGAHKRCWTKEEEELLIRLEAQFEGNKNINKLIAEHITTKTAKQISDKRRLLSRKPAEEPREEPGTCHHTRRAAASLRTEPEMSHHAQAEDRDNGPGRRPLPGRAAAGGRTMDEIRRHPDKGNGQQRPTKQKSEEQLQAYYKKTLEERLSAGALNTFPRAFKQVMEGRDIKLVINQTAQDCFGCLESISQIRTATRDKKYTVTREKHPKKPFQKWMKKRAIKKGNYLRFQRLFYLDRGKLAKIILDDIECLSCDIPLSEIYSVFKTRWETTGSFKSLGDFKTYGKADNTAFRELITAKEIEKNVQEMSKGSAPGPDGITLGDVVKMDPEFSLTMEIFNLWLTTGKIPDMVRGCRTVLIPKSSKPDRLKDINNWRPITIGSILLRLFSRIVTARLSKACPLNPRQRGFIRAAGCSENLKLLQTIIWSAKREHRPLGVVFVDIAKAFDTVSHQHIIHALQQREVDPHIVGLVSNMYENISTYITTKRNTHTDKIQIRVGVKQGDPMSPLLFNLAMDPLLCKLEESGKGYHRGQSSITAMAFADDLVLLSDSWENMNTNISILETFCNLTGLKTQGQKCHGFYIKPTKDSYTINDCAAWTINGTPLNMIDPGESEKYLGLQFDPWIGIARSGLSTKLDFWLQRIDQAPLKPLQKTDILKTYTIPRLIYIADHSEVKAALLETLDQKIRTAVKEWLHLPPCTCDAILYSSTRDGGLGITKLAGLIPSVQARRLHRIAQSSDDTMKCFMEKEKMEQLHKKLWIQAGGDRENIPSIWEAPPSSEPPNNVSTNSEWEAPTQKPKFPKPCNWRKNEFKKWTKLASQGRGIVNFERDKISNHWIQYYRRIPHRKLLTALQLRANVYPTREFLARGRQDQYIKACRHCDADIESCAHIIGNCPVTQDARIKRHNYICELLLEEAKKKDWVVFKEPHIRDSNKELYKPDLIFVKDARALVVDVTVRYEAAKSSLEEAAAEKVRKYKHLETEVRHLTNAKDVTFVGFPLGARGKWHQDNFKLLTELGLSKSRQVKMAETFSTVALFSSVDIVHMFASRARKSMVM

SEQ ID NO: 1628 - protein, 1671 aa, synthetic construct
MGTALTPLLTKFATRYEMGTTPEEVANTLKQTCFKGQVNDSQMVALLIVADQYKLNPFTKELYAFPDKNNGIVPVVGVDGWARIINENPQFDGMEFSMDQQGTECTCKIYRKDRSHAISATEYMAECKRNTQPWQSHPRRMLRHKAMIQCARLAFGFAGIYDQDEAERIVERDVTPAEQYEDVSEAICLIKDSPTMEDLQAAFSNAWKAYKTKGARDQLTAAKDQRKKELLDAPIDVEFEETGDDRAASGGSSGGSSGSETPGTSESATPESSGGSSGGSSMASCPKPGPPVSAGAMSLESGLTTHSVLAIERGPNSLANSGSDFGGGGLGLPLRLLRVSVGTQTSRSDWVDLVSWSHPGPTSKSQQVDLVSLFPKHRVDLLSKNDQVDLVAQFLPSKFPPNLAENDLALLVNLEFYRSDLHVYECVHFAAHWEGLSGLPEVYEQLAPQPCVGETLHSSLPRDSELFVPEEGSSEKESEDAPKTSPPTPGKHGLEQTGEEKVMVTVPDKNPPCPCCGTRVNSVLNLIEHLKVSHGKRGVCFRCAKCGKENSNYHSVVCHFPKCRGPETEKAPAGEWICEVCNRDFTTKIGLGQHKRLAHPAVRNQERIVASQPKETSNRGAHKRCWTKEEEELLIRLEAQFEGNKNINKLIAEHITTKTAKQISDKRRLLSRKPAEEPREEPGTCHHTRRAAASLRTEPEMSHHAQAEDRDNGPGRRPLPGRAAAGGRTMDEIRRHPDKGNGQQRPTKQKSEEQLQAYYKKTLEERLSAGALNTFPRAFKQVMEGRDIKLVINQTAQDCFGCLESISQIRTATRDKKYTVTREKHPKKPFQKWMKDRAIKKGNYLRFQRLFYLDRGKLAKIILDDIECLSCDIPLSEIYSVFKTRWETTGSFKSLGDFKTYGKADNTAFRELITAKEIEKNVQEMSKGSAPGPDGITLGDVVKMDPEFSLTMEIFNLWLTTGKIPDMVRGCRTVLIPKSSKPDRLKDINNWRPITIGSILLRLFSRIVTARLSKACPLNPRQRGFIRAAGCSENLKLLQTIIWSAKREHRPLGVVFVDIAKAFDTVSHQHIIHALQQREVDPHIVGLVSNMYENISTYITTKRNTHTDKIQIRVGVKQGDPMSPLLFNLAMDPLLCKLEESGKGYHRGQSSITAMAFADDLVLLSDSWENMNTNISILETFCNLTGLKTQGQKCHGFYIKPTKDSYTINDCAAWTINGTPLNMIDPGESEKYLGLQFDPWIGIARSGLSTKLDFWLQRIDQAPLKPLQKTDILKTYTIPRLIYIADHSEVKAALLETLDQKIRTAVKEWLHLPPCTCDAILYSSTRDGGLGITKLAGLIPSVQARRLHRIAQSSDDTMKCFMEKEKMEQLHKKLWIQAGGDRENIPSIWEAPPSSEPPNNVSTNSEWEAPTQKPKFPKPCNWRKNEFKKWTKLASQGRGIVNFERDKISNHWIQYYRRIPHRKLLTALQLRANVYPTREFLARGRQDQYIKACRHCDADIESCAHIIGNCPVTQDARIKRHNYICELLLEEAKKKDWVVFKEPHIRDSNKELYKPDLIFVKDARALVVDVTVRYEAAKSSLEEAAAEKVRKYKHLETEVRHLTNAKDVTFVGFPLGARGKWHQDNFKLLTELGLSKSRQVKMAETFSTVALFSSVDIVHMFASRARKSMVM

SEQ ID NO: 1629 - protein, 1671 aa, synthetic construct
MGTALTPLLTKFATRYEMGTTPEEVANTLKQTCFKGQVNDSQMVALLIVADQYKLNPFTKELYAFPDKNNGIVPVVGVDGWARIINENPQFDGMEFSMDQQGTECTCKIYRKDRSHAISATEYMAECKRNTQPWQSHPRRMLRHKAMIQCARLAFGFAGIYDQDEAERIVERDVTPAEQYEDVSEAICLIKDSPTMEDLQAAFSNAWKAYKTKGARDQLTAAKDQRKKELLDAPIDVEFEETGDDRAASGGSSGGSSGSETPGTSESATPESSGGSSGGSSMASCPKPGPPVSAGAMSLESGLTTHSVLAIERGPNSLANSGSDFGGGGLGLPLRLLRVSVGTQTSRSDWVDLVSWSHPGPTSKSQQVDLVSLFPKHRVDLLSKNDQVDLVAQFLPSKFPPNLAENDLALLVNLEFYRSDLHVYECVHKAAHWEGLSGLPEVYEQLAPQPCVGETLHSSLPRDSELFVPEEGSSEKESEDAPKTSPPTPGKHGLEQTGEEKVMVTVPDKNPPCPCCGTRVNSVLNLIEHLKVSHGKRGVCFRCAKCGKENSNYHSVVCHFPKCRGPETEKAPAGEWICEVCNRDFTTKIGLGQHKRLAHPAVRNQERIVASQPKETSNRGAHKRCWTKEEEELLIRLEAQFEGNKNINKLIAEHITTKTAKQISDKRRLLSRKPAEEPREEPGTCHHTRRAAASLRTEPEMSHHAQAEDRDNGPGRRPLPGRAAAGGRTMDEIRRHPDKGNGQQRPTKQKSEEQLQAYYKKTLEERLSAGALNTFPRAFKQVMEGRDIKLVINQTAQDCFGCLESISQIRTATRDKKYTVTREKHPKKPFQKWMKDRAIKKGNYLRFQRLFYLDRGKLAKIILDDIECLSCDIPLSEIYSVFKTRWETTGSFKSLGDFKTYGKADNTAFRELITAKEIEKNVQEMSKGSAPGPDGITLGDVVKMDPEFSLTMEIFNLWLTTGKIPDMVRGCRTVLIPKSSKPDRLKDINNWRPITIGSILLRLFSRIVTARLSKACPLNPRQRGFIRAAGCSENLKLLQTIIWSAKREHRPLGVVFVDIAKAFDTVSHQHIIHALQQREVDPHIVGLVSNMYENISTYITTKRNTHTDKIQIRVGVKQGDPMSPLLFNLAMDPLLCKLEESGKGYHRGQSSITAMAFADDLVLLSDSWENMNTNISILETFCNLTGLKTQGQKCHGFYIKPTKDSYTINDCAAWTINGTPLNMIDPGESEKYLGLQFDPWIGIARSGLSTKLDFWLQRIDQAPLKPLQKTDILKTYTIPRLIYIADHSEVKAALLETLDQKIRTAVKEWLHLPPCTCDAILYSSTRDGGLGITKLAGLIPSVQARRLHRIAQSSDDTMKCFMEKEKMEQLHKKLWIQAGGDRENIPSIWEAPPSSEPPNNVSTNSEWEAPTQKPKFPKPCNWRKNEFKKWTKLASQGRGIVNFERDKISNHWIQYYRRIPHRKLLTALQLRANVYPTREFLARGRQDQYIKACRHCDADIESCAHIIGNCPVTQDARIKRHNYICELLLEEAKKKDWVVFKEPHIRDSNKELYKPDLIFVKDARALVVDVTVRYEAAKSSLEEAAAEKVRKYKHLETEVRHLTNAKDVTFVGFPLGARGKWHQDNFKLLTELGLSKSRQVKMAETFSTVALFSSVDIVHMFASRARKSMVM

SEQ ID NO: 1630 - protein, 1671 aa, synthetic construct
MGTALTPLLTKFATRYEMGTTPEEVANTLKQTCFKGQVNDSQMVALLIVADQYKLNPFTKELYAFPDKNNGIVPVVGVDGWARIINENPQFDGMEFSMDQQGTECTCKIYRKDRSHAISATEYMAECKRNTQPWQSHPRRMLRHKAMIQCARLAFGFAGIYDQDEAERIVERDVTPAEQYEDVSEAICLIKDSPTMEDLQAAFSNAWKAYKTKGARDQLTAAKDQRKKELLDAPIDVEFEETGDDRAASGGSSGGSSGSETPGTSESATPESSGGSSGGSSMASCPKPGPPVSAGAMSLESGLTTHSVLAIERGPNSLANSGSDFGGGGLGLPLRLLRVSVGTQTSRSDWVDLVSWSHPGPTSKSQQVDLVSLFPKHRVDLLSKNDQVDLVAQFLPSKFPPNLAENDLALLVNLEFYRSDLHVYECVHFAAHWEGLSGLPEVYEQLAPQPCVGETLHSSLPRDSELFVPEEGSSEKESEDAPKTSPPTPGKHGLEQTGEEKVMVTVPDKNPPCPCCGTRVNSVLNLIEHLKVSHGKRGVCFRCAKCGKENSNYHSVVCHFKKCRGPETEKAPAGEWICEVCNRDFTTKIGLGQHKRLAHPAVRNQERIVASQPKETSNRGAHKRCWTKEEEELLIRLEAQFEGNKNINKLIAEHITTKTAKQISDKRRLLSRKPAEEPREEPGTCHHTRRAAASLRTEPEMSHHAQAEDRDNGPGRRPLPGRAAAGGRTMDEIRRHPDKGNGQQRPTKQKSEEQLQAYYKKTLEERLSAGALNTFPRAFKQVMEGRDIKLVINQTAQDCFGCLESISQIRTATRDKKYTVTREKHPKKPFQKWMKKRAIKKGNYLRFQRLFYLDRGKLAKIILDDIECLSCDIPLSEIYSVFKTRWETTGSFKSLGDFKTYGKADNTAFRELITAKEIEKNVQEMSKGSAPGPDGITLGDVVKMDPEFSLTMEIFNLWLTTGKIPDMVRGCRTVLIPKSSKPDRLKDINNWRPITIGSILLRLFSRIVTARLSKACPLNPRQRGFIRAAGCSENLKLLQTIIWSAKREHRPLGVVFVDIAKAFDTVSHQHIIHALQQREVDPHIVGLVSNMYENISTYITTKRNTHTDKIQIRVGVKQGDPMSPLLFNLAMDPLLCKLEESGKGYHRGQSSITAMAFADDLVLLSDSWENMNTNISILETFCNLTGLKTQGQKCHGFYIKPTKDSYTINDCAAWTINGTPLNMIDPGESEKYLGLQFDPWIGIARSGLSTKLDFWLQRIDQAPLKPLQKTDILKTYTIPRLIYIADHSEVKTALLETLDQKIRTAVKEWLHLPPCTCDAILYSSTRDGGLGITKLAGLIPSVQARRLHRIAQSSDDTMKCFMEKEKMEQLHKKLWIQAGGDRENIPSIWEAPPSSEPPNNVSTNSEWEAPTQKPKFPKPCNWRKNEFKKWTKLASQGRGIVNFERDKISNHWIQYYRRIPHRKLLTALQLRANVYPTREFLARGRQDQYIKACRHCDADIESCAHIIGNCPVTQDARIKRHNYICELLLEEAKKKDWVVFKEPHIRDSNKELYKPDLIFVKDARALVVDVTVRYEAAKSSLEEAAAEKVRKYKHLETEVRHLTNAKDVTFVGFPLGARGKWHQDNFKLLTELGLSKSRQVKMAETFSTVALFSSVDIVHMFASRARKSMVM

SEQ ID NO: 1631 - protein, 1671 aa, synthetic construct
MGTALTPLLTKFATRYEMGTTPEEVANTLKQTCFKGQVNDSQMVALLIVADQYKLNPFTKELYAFPDKNNGIVPVVGVDGWARIINENPQFDGMEFSMDQQGTECTCKIYRKDRSHAISATEYMAECKRNTQPWQSHPRRMLRHKAMIQCARLAFGFAGIYDQDEAERIVERDVTPAEQYEDVSEAICLIKDSPTMEDLQAAFSNAWKAYKTKGARDQLTAAKDQRKKELLDAPIDVEFEETGDDRAASGGSSGGSSGSETPGTSESATPESSGGSSGGSSMASCPKPGPPVSAGAMSLESGLTTHSVLAIERGPNSLANSGSDFGGGGLGLPLRLLRVSVGTQTSRSDWVDLVSWSHPGPTSKSQQVDLVSLFPKHRVDLLSKNDQVDLVAQFLPSKFPPNLAENDLALLVNLEFYRSDLHVYECVHFAAHWEGLSGLPEVYEQLAPQPCVGETLHSSLPRDSELFVPEEGSSEKESEDAPKTSPPTPGKHGLEQTGEEKVMVTVPDKNPPCPCCGTRVNSVLNLIEHLKVSHGKRGVCFRCAKCGKENSNYHSVVCHFKKCRGPETEKAPAGEWICEVCNRDFTTKIGLGQHKRLAHPAVRNQERIVASQPKETSNRGAHKRCWTKEEEELLIRLEAQFEGNKNINKLIAEHITTKTAKQISDKRRLLSRKPAEEPREEPGTCHHTRRAAASLRTEPEMSHHAQAEDRDNGPGRRPLPGRAAAGGRTMDEIRRHPDKGNGQQRPTKQKSEEQLQAYYKKTLEERLSAGALNTFPRAFKQVMEGRDIKLVINQTAQDCFGCLESISQIRTATRDKKYTVTREKHPKKPFQKWMKKRAIKKGNYLRFQRLFYLDRGKLAKIILDDIECLSCDIPLSEIYSVFKTRWETTGSFKSLGDFKTYGKADNTAFRELITAKEIEKNVQEMSKGSAPGPDGITLGDVVKMDPEFSLTMEIFNLWLTTGKIPDMVRGCRTVLIPKSSKPDRLKDINNWRPITIGSILLRLFSRIVTARLSKACPLNPRQRGFIRAAGCSENLKLLQTIIWSAKREHRPLGVVFVDIAKAFDTVSHQHIIHALQQREVDPHIVGLVSNMYENISTYITTKRNTHTDKIQIRVGVKQGDPMSPLLFNLAMDPLLCKLEESGKGYHRGQSSITAMAFADDLVLLSDSWENMNTNISILETFCNLTGLKTQGQKCHGFYIKPTKDSYTINDCAAWTINGTPLNMIDPGESEKYLGLQFDPWIGIARSGLSTKLDFWLQRIDQAPLKPLQKTDILKTYTIPRLIYIADHSEVKAALLETLDQKIRTAVKEWLHLPPCTCDAILYSSTRDGGLGITKLAGLIPSVQARRLHRIAQSSDDTMKCFMEKEKMEQLHKKLWIQAGGDRENIPSIWEAPPSSEPPNNVSTNSEWEAPTQKPKFPKPCNWRKNEFKKWTKLASQGRGIVNFERDKISNHWIQYYRRIPHRKLLTALQLRANVYPTREFLARGRQDQYIKACRHCDADIESCAHIIGNCPVTQDARIKRHNYICELLLEEAKKKDWVVFKEPHIRDSNKELYKPDLIFVKDARALVVDVTVRYEAAKSSLEEAAAEKVRKYKHLETEVRHLTNAKDVTFVGFPLGARGKWHQDNFKLLTELGLSKSRQVKMAETFSTVALFSSVDIVHMFASRARKSMVM

SEQ ID NO: 1632 - protein, 1550 aa, synthetic construct
MAPKKKRKVNISGSSCGSPNSADTSSDFKDLWTKLKECHDREVQGLQVKVTKLKQERILDAQRLEEFFTKNQQLREQQKVLHETIKVLEDRLRAGLCDRCAVTEEHMRKKQQEFENIRQQNLKLITELMNERNTLQEENKKLSEQLQQKIENDQQHQAAELECEEDVIPDSPITAFSFSGVNRLRRKENPHVRYIEQTHTKLEHSVCANEMRKVSKSSTHPQHNPNENEILVADTYDQSQSPMAKAHGTSSYTPDKSSFNLATVVAETLGLGVQEESETQGPMSPLGDELYHCLEGNHKKQPFESGSETPGTSESATPEGSYEQLAPQPCVGETLHSSLPRDSELFVPEEGSSEKESEDAPKTSPPTPGKHGLEQTGEEKVMVTVPDKNPPCPCCGTRVNSVLNLIEHLKVSHGKRGVCFRCAKCGKENSNYHSVVCHFKKCRGPETEKAPAGEWICEVCNRDFTTKIGLGQHKRLAHPAVRNQERIVASQPKETSNRGAHKRCWTKEEEELLIRLEAQFEGNKNINKLIAEHITTKTAKQISDKRRLLSRKPAEEPREEPGTCHHTRRAAASLRTEPEMSHHAQAEDRDNGPGRRPLPGRAAAGGRTMDEIRRHPDKGNGQQRPTKQKSEEQLQAYYKKTLEERLSAGALNTFPRAFKQVMEGRDIKLVINQTAQDCFGCLESISQIRTATRDKKDTVTREKHPKKPFQKWMKKRAIKKGNYLRFQRLFYLDRGKLAKIILDDIECLSCDIPLSEIYSVFKTRWETTGSFKSLGDFKTYGKADNTAFRELITAKEIEKNVQEMSKGSAPGPDGITLGDVVKMDPEFSRTMEIFNLWLTTGKIPDMVRGCRTVLIPKSSDPDRLKDINNWRPITIGSILLRLFSRIVTARLSKACPLNPRQRGFIRAAGCSENLKLLQTIIWSAKREHRPLGVVFVDIAKAFDTVSHQHIIHALQQREVDPHIVGLVSNMYENISTYITTKRNTHTDKIQIRVGVKQGDPMSPLLFNLAMDPLLCKLEESGKGYHRGQSSITAMAFADDLVLLSDSWENMNTNISILETFCNLTGLKTQGQKCHGFYIKPTKDSYTINDCAAWTINGTPLNMIDPGESEKYLGLQFDPWIGIARSGLSTKLDFWLQRIDQAPLKPLQKTDILKTYTIPRLIYIADHSEVKSALLETLDQKIRTAVKEWLHLPPCTCDAILYSSTRDGGLGITKLAGLIPSVQARRLHRIAQSSDDTMKCFMEKEKMEQLHKKLWIQAGGDRENIPSIWEAPPSSEPPNNVSTNSEWEAPTQKDKFPKPCNWRKNEFKKWTKLASQGRGIVNFERDKISNHWIQYYRRIPHRKLLTALQLRANVYPTREFLARGRQDQYIKACRHCDADNESCAHIIGNCPVTQDARIKRHNYICELLLEEAKKKDWVVFKEPHIRDSNKELYKPDLIFVKDGRALVVDVTVRYEAAKSSLEEAAAEKVRKYKHLETEVRHLTNAKDVTFVGFPLGARGKWHQDNFKLLTELGLSKSRQVKMAETFSTVALFSSVDIVHMFASRARKSMVM

SEQ ID NO: 1633 - skipped

SEQ ID NO: 1634 - protein, 1411 aa, synthetic construct
MASCPKPGPPVSAGAMSLESGLTTHSVLAIERGPNSLANSGSDFGGGGLGLPLRLLRVSVGTQTSRSDWVDLVSWSHPGPTSKSQQVDLVSLFPKHRVDLLSKNDQVDLVAQFLPSKFPPNLAENDLALLVNLEFYRSDLHVYECVHKAAHWEGLSGLPEVYEQLAPQPCVGETLHSSLPRDSELFVPEEGSSEKESEDAPKTSPPTPGKHGLEQTGEEKVMVTVPDKNPPCPCCGTRVNSVLNLIEHLKVSHGKRGVCFRCAKCGKENSNYHSVVCHFKKCRGPETEKAPAGEWICEVCNRDFTTKIGLGQHKRLAHPAVRNQERIVASQPKETSNRGAHKRCWTKEEEELLIRLEAQFEGNKNINKLIAEHITTKTAKQISDKRRLLSRKPAEEPREEPGTCHHTRRAAASLRTEPEMSHHAQAEDRDNGPGRRPLPGRAAAGGRTMDEIRRHPDKGNGQQRPTKQKSEEQLQAYYKKTLEERLSAGALNTFPRAFKQVMEGRDIKLVINQTAQDCFGCLESISQIRTATRDKKDTVTREKHPKKPFQKWMKKRAIKKGNYLRFQRLFYLDRGKLAKIILDDIECLSCDIPLSEIYSVFKTRWETTGSFKSLGDFKTYGKADNTAFRELITAKEIEKNVQEMSKGSAPGPDGITLGDVVKMDPEFSRTMEIFNLWLTTGKIPDMVRGCRTVLIPKSSKPDRLKDINNWRPITIGSILLRLFSRIVTARLSKACPLNPRQRGFIRAAGCSENLKLLQTIIWSAKREHRPLGVVFVDIAKAFDTVSHQHIIHALQQREVDPHIVGLVSNMYENISTYITTKRNTHTDKIQIRVGVKQGDPMSPLLFNLAMDPLLCKLEESGKGYHRGQSSITAMAFADDLVLLSDSWENMNTNISILETFCNLTGLKTQGQKCHGFYIKPTKDSYTINDCAAWTINGTPLNMIDPGESEKYLGLQFDPWIGIARSGLSTKLDFWLQRIDQAPLKPLQKTDILKTYTIPRLIYIADHSEVKSALLETLDQKIRTAVKEWLHLPPCTCDAILYSSTRDGGLGITKLAGLIPSVQARRLHRIAQSSDDTMKCFMEKEKMEQLHKKLWIQAGGDRENIPSIWEAPPSSEPPNNVSTNSEWEAPTQKDKFPKPCNWRKNEFKKWTKLASQGRGIVNFERDKISNHWIQYYRRIPHRKLLTALQLRANVYPTREFLARGRQDQYIKACRHCDADNESCAHIIGNCPVTQDARIKRHNYICELLLEEAKKKDWVVFKEPHIRDSNKELYKPDLIFVKDGRALVVDVTVRYEAAKSSLEEAAAEKVRKYKHLETEVRHLTNAKDVTFVGFPLGARGKWHQDNFKLLTELGLSKSRQVKMAETFSTVALFSSVDIVHMFASRARKSMVMSGGSKRTADGSEFEPKKKRKV

SEQ ID NO: 1635 - protein, 1399 aa, synthetic construct
MASCPKPGPPVSAGAMSLESGLTTHSVLAIERGPNSLANSGSDFGGGGLGLPLRLLRVSVGTQTSRSDWVDLVSWSHPGPTSKSQQVDLVSLFPKHRVDLLSKNDQVDLVAQFLPSKFPPNLAENDLALLVNLEFYRSDLHVYECVHFAAHWEGLSGLPEVYEQLAPQPCVGETLHSSLPRDSELFVPEEGSSEKESEDAPKTSPPTPGKHGLEQTGEEKVMVTVPDKNPPCPCCGTRVNSVLNLIEHLKVSHGKRGVCFRCAKCGKENSNYHSVVCHFKKCRGPETEKAPAGEWICEVCNRDFTTKIGLGQHKRLAHPAVRNQERIVASQPKETSNRGAHKRCWTKEEEELLIRLEAQFEGNKNINKLIAEHITTKTAKQISDKRRLLSRKPAEEPREEPGTCHHTRRAAASLRTEPEMSHHAQAEDRDNGPGRRPLPGRAAAGGRTMDEIRRHPDKGNGQQRPTKQKSEEQLQAYYKKTLEERLSAGALNTFPRAFKQVMEGRDIKLVINQTAQDCFGCLESISQIRTATRDKKDTVTREKHPKKPFQKWMKKRAIKKGNYLRFQRLFYLDRGKLAKIILDDIECLSCDIPLSEIYSVFKTRWETTGSFKSLGDFKTYGKADNTAFRELITAKEIEKNVQEMSKGSAPGPDGITLGDVVKMDPEFSRTMEIFNLWLTTGKIPDMVRGCRTVLIPKSSKPDRLKDINNWRPITIGSILLRLFSRIVTARLSKACPLNPRQRGFIRAAGCSENLKLLQTIIWSAKREHRPLGVVFVDIAKAFDTVSHQHIIHALQQREVDPHIVGLVSNMYENISTYITTKRNTHTDKIQIRVGVKQGDPMSPLLFNLAMDPLLCKLEESGKGYHRGQSSITAMAFADDLVLLSDSWENMNTNISILETFCNLTGLKTQGQKCHGFYIKPTKDSYTINDCAAWTINGTPLNMIDPGESEKYLGLQFDPWIGIARSGLSTKLDFWLQRIDQAPLKPLQKTDILKTYTIPRLIYIADHSEVKTALLETLDQKIRTAVKEWLHLPPCTCDAILYSSTRDGGLGITKLAGLIPSVQARRLHRIAQSSDDTMKCFMEKEKMEQLHKKLWIQAGGDRENIPSIWEAPPSSEPPNNVSTNSEWEAPTQKDKFPKPCNWRKNEFKKWTKLASQGRGIVNFERDKISNHWIQYYRRIPHRKLLTALQLRANVYPTREFLARGRQDQYIKACRHCDADIESCAHIIGNCPVTQDARIKRHNYICELLLEEAKKKDWVVFKEPHIRDSNKELYKPDLIFVKDARALVVDVTVRYEAAKSSLEEAAAEKVRKYKHLETEVRHLTNAKDVTFVGFPLGARGKWHQDNFKLLTELGLSKSRQVKMAETFSTVALFSSVDIVHMFASRARKSMVMRKKRRQRRR

SEQ ID NO: 1636 - protein, 1390 aa, synthetic construct
MASCPKPGPPVSAGAMSLESGLTTHSVLAIERGPNSLANSGSDFGGGGLGLPLRLLRVSVGTQTSRSDWVDLVSWSHPGPTSKSQQVDLVSLFPKHRVDLLSKNDQVDLVAQFLPSKFPPNLAENDLALLVNLEFYRSDLHVYECVHKAAHWEGLSGLPEVYEQLAPQPCVGETLHSSLPRDSELFVPEEGSSEKESEDAPKTSPPTPGKHGLEQTGEEKVMVTVPDKNPPCPCCGTRVNSVLNLIEHLKVSHGKRGVCFRCAKCGKENSNYHSVVCHFKKCRGPETEKAPAGEWICEVCNRDFTTKIGLGQHKRLAHPAVRNQERIVASQPKETSNRGAHKRCWTKEEEELLIRLEAQFEGNKNINKLIAEHITTKTAKQISDKRRLLSRKPAEEPREEPGTCHHTRRAAASLRTEPEMSHHAQAEDRDNGPGRRPLPGRAAAGGRTMDEIRRHPDKGNGQQRPTKQKSEEQLQAYYKKTLEERLSAGALNTFPRAFKQVMEGRDIKLVINQTAQDCFGCLESISQIRTATRDKKDTVTREKHPKKPFQKWMKKRAIKKGNYLRFQRLFYLDRGKLAKIILDDIECLSCDIPLSEIYSVFKTRWETTGSFKSLGDFKTYGKADNTAFRELITAKEIEKNVQEMSKGSAPGPDGITLGDVVKMDPEFSRTMEIFNLWLTTGKIPDMVRGCRTVLIPKSTQPDRLKDINNWRPITIGSILLRLFSRIITARMTKACPLNPRQRGFIRAAGCSENLKLLQTIIRSAKSEHRPLGVVFVDIAKAFDTVSHQHILHVLQQRGVDPHIIGLVSNMYKDISTFVTTKKDTHTDKIQIRVGVKQGDPLSPLLFNLAMDPLLCKLEESGNGFHRGGHTITAMAFADDLVLLSDSWENMEKNIEILEAFCDLTGLKTQGQKCHGFYIKPTKDSYTVNNCAAWTIYGTPLNMINPGDSEKYLGLQFDPWIGIARSGLSTKLDFWLQRIDQAPLKPLQKTDILKTYTIPRLIYIADHSEVKSALLETLDQKIRTAVKEWLHLPPCTCDAILYSSTRDGGLGITKLAGLIPSVQARRLHRIAQSSDDTMKCFMEKEKMEQLHKKLWIQAGGDRENIPSIWEAPPSSEPPNNVSTNSEWEAPTQKDKFPKPCNWRKNEFKKWTKLASQGRGIVNFERDKISNHWIQYYRRIPHRKLLTALQLRANVYPTREFLARGRQDQYIKACRHCDADNESCAHIIGNCPVTQDARIKRHNYICELLLEEAKKKDWVVFKEPHIRDSNKELYKPDLIFVKDGRALVVDVTVRYEAAKSSLEEAAAEKVRKYKHLETEVRHLTNAKDVTFVGFPLGARGKWHQDNFKLLTELGLSKSRQVKMAETFSTVALFSSVDIVHMFASRARKSMVM

SEQ ID NO: 1637 - protein, 1390 aa, synthetic construct
MASCPKPGPPVSAGAMSLESGLTTHSVLAIERGPNSLANSGSDFGGGGLGLPLRLLRVSVGTQTSRSDWVDLVSWSHPGPTSKSQQVDLVSLFPKHRVDLLSKNDQVDLVAQFLPSKFPPNLAENDLALLVNLEFYRSDLHVYECVHFAAHWEGLSGLPEVYEQLAPQPCVGETLHSSLPRDSELFVPEEGSSEKESEDAPKTSPPTPGKHGLEQTGEEKVMVTVPDKNPPCPCCGTRVNSVLNLIEHLKVSHGKRGVCFRCAKCGKENSNYHSVVCHFKKCRGPETEKAPAGEWICEVCNRDFTTKIGLGQHKRRWHPAVRNQERIVASQPKETSNRGAHKRCWTKEERELLIRLEAQFEGNKNINKLIAEHITTKTAKQISDKRRLLSRKPAEEPRMMPGTCHHTRRAAASLRTEPEMSHHAQAEDRDNGPGRRPLPGRAAAGGRTMDEIRRHPDKGNGQQRPTKQKSEEQLQAYYKKTLEERLSAGALNTFPRAFKQVMEGRDIKLVINQTAQDCFGCLESISQIRTATRDKKYTVTREKHPKKPFQKWMKKRAIKKGNYLRFQRLFYLDRGKLAKIILDDIECLSCDIPLSEIYSVFKTRWETTGSFKSLGDFKTYGKADNTAFRELITAKEIEKNVQEMSKGSAPGPDGITLGDVVKMDPEGSRTMEIFNLWLTTGKIPDMVRGCRTVLIPKSSDPDRLKDINNWRPITIGSILLRLFSRIVTARLSKACPLNPRQRGFIRAAGCSENLKLLQTIIWSAKREHRPLGVVFVDIAKAFDTVSHQHIIHALQQREVDPHIVGLVSNMYENISTYITTKRNTHTDKIQIRVGVKQGDPMSPLLFNLAMDPLLCKLEESGKGYHRGQSSITAMAFADDLVLLSDSWEGMNTNISILETFCNLTGLKTQGQKCHGFYIKPTKKSYTINDCAAWTINGTPLNMIDPGESEKYLGLQFDPWIGIARSGLSTKLDFWLQRIDQAPLKPLQKLDILKTYTIPRLIYIADHSEVKSALLETLDQKIRTAVKEWLHLPPCTCDAILYSSTRDGGLGITKLAGLIPSVQARRLHRIAQSSDDTMKCFMEKEKMEQLHKKLWIQAGGDRENIPSIWEAPPSSEPPNNVSTNSEWEAPTQKDKFPKPCNWRKNEFKKWTKLASQGRGIVNFERDKISNHWIQYYRRIPHRKLLTALQLRANVYPTREFLARGRQDQYIKACRHCDADNESCAHIIGNCPVTQDARIKRHNKICELLLEEAKKKDWVVFKEPHIRDSNKELYKPDLIFVKDARALVVDVTVRYEAAKSSLEEAAAEKVRKYKHLETEVRHLTNAKDVTFVGFPLGARGKWHQDNFKLLTELGLSKSRQVKMAETFSTVALFSSVDIVHMFASRARKSMVM

SEQ ID NO: 1638 - protein, 1390 aa, synthetic construct
MASCPKPGPPVSAGAMSLESGLTTHSVLAIERGPNSLANSGSDFGGGGLGLPLRLLRVSVGTQTSRSDWVDLVSWSHPGPTSKSQQVDLVSLFPKHRVDLLSKNDQVDLVAQFLPSKFPPNLAENDLALLVNLEFYRSDLHVYEGVHKAAHWEGLSGLPEVYEQLAPQPCVGETLHSSLPRDSELFVPEEGSSEKESEDAPKTSPPTPGKHGLEQTGEEKVMVTVPDKNPPCPCCGTRVNSVLNLIEHLKVSHGKRGVCFRCAKCGKENSNYHSVVCHFKKCRGPETEKAPAGEWICEVCNRDFTTKIGLGQHKRLAHPAVRNQERIVASQPKETSNRGAHKRCWTKEEEELLIRLEAQFEGNKNINKLIAEHITTKTAKQISDKRRLLSRKPAEEPREEPGTCHHTRRAAASLRTEPEMSHHAQAEDRDNGPGRRPLPGRAAAGGRTMDEIRRHPDKGNGQQRPTKQKSEEQLQAYYKKTLEERLSAGALNTFPRAFKQVMEGRDIKLVINQTAQDYFGCLESISQIRTATRDKKDTVTRKKHPKKPFQKWMKKRAIKKGNYLRFQRLFYLDRGKLAKIILDDIECLSCDIPLSEIYSVFKTRWETTGSFKSLGDFKTYGKADNTAFRDLITAKEIEKNVQEMSKGSAPGPDGITLGDVVKMDPEGSRTMEIFNLWLTTGKIPDMVRGCRTVLIPKSSDPDRLKDINNWRPITIGSILLRLFSRIVTARLSKACPLNPRQRGFIRAAGCSENLKLLQTIIWSAKREHRPLGVVFVDIAKAFDTVSHQHIIHALQQREVDPHIVGLVSNMYENISTYITTKRNTHTDKIQIRVGVKQGDPMSPLLFNLAMDPLLCKLEESGKGYHRGQSSITAMAFADDLVLLSDSWEGMNTNISILETFCNLTGLKTQGQKCHGFYIKPTKKSYTINDCAAWTINGTPLNMIDPGESEKYLGLQFDPWIGIARSGLSTKLDFWLQRIDQAPLKPLQKLDILKTYTIPRLIYIADHSEVKTALLETLDQKIRTAVKEWLHLPPCTCDAILYSSTRDGGLGITKLAGLIPSVQARRLHRIAQSSDDTMKCFMEKEKMEQLHKKLWIQAGGDRENIPSIWEAPPSSEPPNNVSTNSEWEAPTQKDKFPKPCNWRKNEFKKWTKLASQGRGIVNFERDKISNHWIQYYRRIPHRKLLTALQLRANVYPTREFLARGRQDQYIKACRHCDADIESCAHIIGNCPVTQDARIKRHNKICELLLEEAKKKDWVVFKEPHIRDSNKELYKPDLIFVKDARALVVDVTVRYEAAKSSLEEAAAEKVRKYKHLETEVRHLTNAKDVTFVGFPLGARGKWHQDNFKLLTELGLSKSRQVKMAETFSTVALFSSVDIVHMFASRARKSMVM

SEQ ID NO: 1639 - protein, 1390 aa, synthetic construct
MASCPKPGPPVSAGAMSLESGLTTHSVLAIERGPNSLANSGSDFGGGGLGLPLRLLRVSVGTQTSRSDWVDLVSWSHPGPTSKSQQVDLVSLFPKHRVDLLSKNDQVDLVAQFLPSKFPPNLAENDLALLVNLEFYRSDLHVYEGVHKAAHWEGLSGLPEVYEQLAPQPCVGETLHSSLPRDSELFVPEEGSSEKESEDAPKTSPPTPGKHGKRQTGEEKVMVTVPDKNPPCPCCGTRVNSVLNLIEHLKVSHGKRRVCFRCAKCGKENSNYHSVVCHFKKCRGPETEKAPAGEWICEVCNRDFTTKIGLGQHKRLAHPAVRNQERIVASQPKETSNRGAHKRCWTKEEEELLIRLEAQFEGNKNINKLIAEHITTKTAKQISDKRRLLSRKPAEEPREEPGTCHHTRRAAASLRTEPEMSHHAQAEDRDNGPGRRPLPGRAAAGGRTMDEIRRHPDKGNGQQRPTKQKSEEQLQAYYKKTLEERLSAGALNTFPRAFKQVMEGRDIKLVINQTAQDCFGCLESISQIRTATRDKKYTVTREKHPKKPFQKWMKKRAIKKGNYLRFQRLFYLDRGKLAKIILDDIECLSCDIPLSEIYSVFKTRWETTGSFKSLGDFKTYGKADNTAFRELITAKEIEKNVQEMSKGSAPGPDGITLGDVVKMDPEFSRTMEIFNLWLTTGKIPDMVRGCRTVLIPKSSKPDRLKDINNWRPITIGSILLRLFSRIVTARLSKACPLNPRQRGFIRAAGCSENLKLLQTIIWSAKREHRPLGVVFVDIAKAFDTVSHQHIIHALQQREVDPHIVGLVSNMYENISTYITTKRNTHTDKIQIRVGVKQGDPMSPLLFNLAMDPLLCKLEESGKGYHRGQSSITAMAFADDLVLLSDSWENMNTNISILETFCNLTGLKTQGQKCHGFYIKPTKDSYTINDCAAWTINGTPLNMIDPGESEKYLGLQFDPWIGIARSGLSTKLDFWLQRIDQAPLKPLQKTDILKTYTIPRLIYIADHSEVKTALLETLDQKIRTAVKEWLHLPPCTCDAILYSSTRDGGLGITKLAGLIPSVQARRLHRIAQSSDDTMKCFMEKEKMEQLHKKLWIQAGGDRENIPSIWEAPPSSEPPNNVSTNSEWEAPTQKDKFPKPCNWRKNEFKKWTKLASQGRGIVNFERDKISNHWIQYYRRIPHRKLLTALQLRANVYPTREFLARGRQDQYIKACRHCDADIESCAHIIGNCPVTQDARIKRHNYICELLLEEAKKKDWVVFKEPHIRDSNKELYKPDLIFVKDGRALVVDVTVRYEAAKSSLEEAAAEKVRKYKHLETEVRHLTNAKDVTFVGFPLGARGKWHQDNFKLLTELGLSKSRQVKMAETFSTVALFSSVDIVHMFASRARKSMVM

SEQ ID NO: 1640 - protein, 1390 aa, synthetic construct
MASCPKPGPPVSAGAMSLESGLTTHSVLAIERGPNSLANSGSDFGGGGLGLPLRLLRVSVGTQTSRSDWVDLVSWSHPGPTSKSQQVDLVSLFPKHRVDLLSKNDQVDLVAQFLPSKFPPNLAENDLALLVNLEFYRSDLHVYEGVHKAAHWEGLSGLPEVYEQLAPQPCVGETLHSSLPRDSELFVPEEGSSEKESEDAPKTSPPTPGKHGKRQTGEEKVMVTVPDKNPPCPCCGTRVNSVLNLIEHLKVSHGKRRVCFRCAKCGKENSNYHSVVCHFKKCRGPETEKAPAGEWICEVCNRDFTTKIGLGQHKRLAHPAVRNQERIVASQPKETSNRGAHKRCWTKEEEELLIRLEAQFEGNKNINKLIAEHITTKTAKQISDKRRLLSRKPAEEPREEPGTCHHTRRAAASLRTEPEMSHHAQAEDRDNGPGRRPLPGRAAAGGRTMDEIRRHPDKGNGQQRPTKQKSEEQLQAYYKKTLEERLSAGALNTFPRAFKQVMEGRDIKLVINQTAQDCFGCLESISQIRTATRDKKYTVTREKHPKKPFQKWMKKRAIKKGNYLRFQRLFYLDRGKLAKIILDDIECLSCDIPLSEIYSVFKTRWETTGSFKSLGDFKTYGKADNTAFRELITAKEIEKNVQEMSKGSAPGPDGITLGDVVKMDPEGSRTMEIFNLWLTTGKIPDMVRGCRTVLIPKSSDPDRLKDINNWRPITIGSILLRLFSRIVTARLSKACPLNPRQRGFIRAAGCSENLKLLQTIIWSAKREHRPLGVVFVDIAKAFDTVSHQHIIHALQQREVDPHIVGLVSNMYENISTYITTKRNTHTDKIQIRVGVKQGDPMSPLLFNLAMDPLLCKLEESGKGYHRGQSSITAMAFADDLVLLSDSWENMNTNISILETFCNLTGLKTQGQKCHGFYIKPTKDSYTINDCAAWTINGTPLNMIDPGESEKYLGLQFDPWIGIARSGLSTKLDFWLQRIDQAPLKPLQKTDILKTYTIPRLIYIADHSEVKTALLETLDQKIRTAVKEWLHLPPCTCDAILYSSTRDGGLGITKLAGLIPSVQARRLHRIAQSSDDTMKCFMEKEKMEQLHKKLWIQAGGDRENIPSIWEAPPSSEPPNNVSTNSEWEAPTQKDKFPKPCNWRKNEFKKWTKLASQGRGIVNFERDKISNHWIQYYRRIPHRKLLTALQLRANVYPTREFLARGRQDQYIKACRHCDADIESCAHIIGNCPVTQDARIKRHNYICELLLEEAKKKDWVVFKEPHIRDSNKELYKPDLIFVKDGRALVVDVTVRYEAAKSSLEEAAAEKVRKYKHLETEVRHLTNAKDVTFVGFPLGARGKWHQDNFKLLTELGLSKSRQVKMAETFSTVALFSSVDIVHMFASRARKSMVM

SEQ ID NO: 1641 - protein, 1390 aa, synthetic construct
MASCPKPGPPVSAGAMSLESGLTTHSVLAIERGPNSLANSGSDFGGGGLGLPLRLLRVSVGTQTSRSDWVDLVSWSHPGPTSKSQQVDLVSLFPKHRVDLLSKNDQVDLVAQFLPSKFPPNLAENDLALLVNLEFYRSDLHVYECVHKAAHWEGLSGLPEVYEQLAPQPCVGETLHSSLPRDSELFVPEEGSSEKESEDAPKTSPPTPGKHGLEQTGEEKVMVTVPDKNPPCPCCGTRVNSVLNLIEHLKVSHGKRGVCFRCAKCGKENSNYHSVVCHFKKCRGPETEKAPAGEWICEVCNRDFTTKIGLGQHKRLAHPAVRNQERIVASQPKETSNRGAHKRCWTKEEEELLIRLEAQFEGNKNINKLIAEHITTKTAKQISDKRRLLSRKPAEEPREEPGTCHHTRRAAASLRTEPEMSHHAQAEDRDNGPGRRPLPGRAAAGGRTMDEIRRHPDKGNGQQRPTKQKSEEQLQAYYKKTLEERLSAGALNTFPRAFKQVMEGRDIKLVINQTAQDCFGCLESISQIRTATRDKKYTVTREKHPKKPFQKWMKKRAIKKGNYLRFQRLFYLDRGKLAKIILDDIECLSCDIPLSEIYSVFKTRWETTGSFKSLGDFKTYGKADNTAFRELITAKEIEKNVQEMSKGSAPGPDGITLGDVVKMDPEFSLTMEIFNLWLTTGKIPDMVRGCRTVLIPKSSKPDRLKDINNWRPITIGSILLRLFSRIVTARLSKACPLNPRQRGFIRAAGCSENLKLLQTIIWSAKREHRPLGVVFVDIAKAFDTVSHQHIIHALQQREVDPHIVGLVSNMYENISTYITTKRNTHTDKIQIRVGVKQGDPMSPLLFNLAMDPLLCKLEESGKGYHRGQSSITAMAFADDLVLLSDSWENMNTNISILETFCNLTGLKTQGQKCHGFYIKPTKDSYTINDCAAWTINGTPLNMIDPGESEKYLGLQFDPWIGIARSGLSTKLDEWLQRIDQAPLKPLQKTDILKTYTIPRLIYIADHSEVKAALLETLDQKIRTAVKEWLHLPPCTCDAILYSSTRDGGLGITKLAGLIPSVQARRLHRIAQSSDDTMKCFMEKEKMEQLHKKLWIQAGGDRENIPSIWEAPPSSEPPNNVSTNSEWEAPTQKPKFPKPCNWRKNEFKKWTKLASQGRGIVNFERDKISNHWIQYYRRIPHRKLLTALQLRANVYPTREFLARGRQDQYIKACRHCDADIESCAHIIGNCPVTQDARIKRHNYICELLLEEAKKKDWVVFKEPHIRDSNKELYKPDLIFVKDARALVVDVTVRYEAAKSSLEEAAAEKVRKYKHLETEVRHLTNAKDVTFVGFPLGARGKWHQDNFKLLTELGLSKSRQVKMAETFSTVALFSSVDIVHMFASRARKSMVM

SEQ ID NO: 1642 - protein, 1671 aa, synthetic construct
MGTALTPLLTKFATRYEMGTTPEEVANTLKQTCFKGQVNDSQMVALLIVADQYKLNPFTKELYAFPDKNNGIVPVVGVDGWARIINENPQFDGMEFSMDQQGTECTCKIYRKDRSHAISATEYMAECKRNTQPWQSHPRRMLRHKAMIQCARLAFGFAGIYDQDEAERIVERDVTPAEQYEDVSEAICLIKDSPTMEDLQAAFSNAWKAYKTKGARDQLTAAKDQRKKELLDAPIDVEFEETGDDRAASGGSSGGSSGSETPGTSESATPESSGGSSGGSSMASCPKPGPPVSAGAMSLESGLTTHSVLAIERGPNSLANSGSDFGGGGLGLPLRLLRVSVGTQTSRSDWVDLVSWSHPGPTSKSQQVDLVSLFPKHRVDLLSKNDQVDLVAQFLPSKFPPNLAENDLALLVNLEFYRSDLHVYECVHFAAHWEGLSGLPEVYEQLAPQPCVGETLHSSLPRDSELFVPEEGSSEKESEDAPKTSPPTPGKHGLEQTGEEKVMVTVPDKNPPCPCCGTRVNSVLNLIEHLKVSHGKRGVCFRCAKCGKENSNYHSVVCHFPKCRGPETEKAPAGEWICEVCNRDFTTKIGLGQHKRLAHPAVRNQERIVASQPKETSNRGAHKRCWTKEEEELLIRLEAQFEGNKNINKLIAEHITTKTAKQISDKRRLLSRKPAEEPREEPGTCHHTRRAAASLRTEPEMSHHAQAEDRDNGPGRRPLPGRAAAGGRTMDEIRRHPDKGNGQQRPTKQKSEEQLQAYYKKTLEERLSAGALNTFPRAFKQVMEGRDIKLVINQTAQDCFGCLESISQIRTATRDKKDTVTREKHPKKPFQKWMKDRAIKKGNYLRFQRLFYLDRGKLAKIILDDIECLSCDIPLSEIYSVFKTRWETTGSFKSLGDFKTYGKADNTAFRELITAKEIEKNVQEMSKGSAPGPDGITLGDVVKMDPEFSLTMEIFNLWLTTGKIPDMVRGCRTVLIPKSSKPDRLKDINNWRPITIGSILLRLFSRIVTARLSKACPLNPRQRGFIRAAGCSENLKLLQTIIWSAKREHRPLGVVFVDIAKAFDTVSHQHIIHALQQREVDPHIVGLVSNMYENISTYITTKRNTHTDKIQIRVGVKQGDPMSPLLFNLAMDPLLCKLEESGKGYHRGQSSITAMAFADDLVLLSDSWENMNTNISILETFCNLTGLKTQGQKCHGFYIKPTKDSYTINDCAAWTINGTPLNMIDPGESEKYLGLQFDPWIGIARSGLSTKLDFWLQRIDQAPLKPLQKTDILKTYTIPRLIYIADHSEVKTALLETLDQKIRTAVKEWLHLPPCTCDAILYSSTRDGGLGITKLAGLIPSVQARRLHRIAQSSDDTMKCFMEKEKMEQLHKKLWIQAGGDRENIPSIWEAPPSSEPPNNVSTNSEWEAPTQKPKFPKPCNWRKNEFKKWTKLASQGRGIVNFERDKISNHWIQYYRRIPHRKLLTALQLRANVYPTREFLARGRQDQYIKACRHCDADIESCAHIIGNCPVTQDARIKRHNYICELLLEEAKKKDWVVFKEPHIRDSNKELYKPDLIFVKDARALVVDVTVRYEAAKSSLEEAAAEKVRKYKHLETEVRHLTNAKDVTFVGFPLGARGKWHQDNFKLLTELGLSKSRQVKMAETFSTVALFSSVDIVHMFASRARKSMVM

SEQ ID NO: 1643 - protein, 1671 aa, synthetic construct
MGTALTPLLTKFATRYEMGTTPEEVANTLKQTCFKGQVNDSQMVALLIVADQYKLNPFTKELYAFPDKNNGIVPVVGVDGWARIINENPQFDGMEFSMDQQGTECTCKIYRKDRSHAISATEYMAECKRNTQPWQSHPRRMLRHKAMIQCARLAFGFAGIYDQDEAERIVERDVTPAEQYEDVSEAICLIKDSPTMEDLQAAFSNAWKAYKTKGARDQLTAAKDQRKKELLDAPIDVEFEETGDDRAASGGSSGGSSGSETPGTSESATPESSGGSSGGSSMASCPKPGPPVSAGAMSLESGLTTHSVLAIERGPNSLANSGSDFGGGGLGLPLRLLRVSVGTQTSRSDWVDLVSWSHPGPTSKSQQVDLVSLFPKHRVDLLSKNDQVDLVAQFLPSKFPPNLAENDLALLVNLEFYRSDLHVYECVHKAAHWEGLSGLPEVYEQLAPQPCVGETLHSSLPRDSELFVPEEGSSEKESEDAPKTSPPTPGKHGLEQTGEEKVMVTVPDKNPPCPCCGTRVNSVLNLIEHLKVSHGKRGVCFRCAKCGKENSNYHSVVCHFPKCRGPETEKAPAGEWICEVCNRDFTTKIGLGQHKRLAHPAVRNQERIVASQPKETSNRGAHKRCWTKEEEELLIRLEAQFEGNKNINKLIAEHITTKTAKQISDKRRLLSRKPAEEPREEPGTCHHTRRAAASLRTEPEMSHHAQAEDRDNGPGRRPLPGRAAAGGRTMDEIRRHPDKGNGQQRPTKQKSEEQLQAYYKKTLEERLSAGALNTFPRAFKQVMEGRDIKLVINQTAQDCFGCLESISQIRTATRDKKYTVTREKHPKKPFQKWMKDRAIKKGNYLRFQRLFYLDRGKLAKIILDDIECLSCDIPLSEIYSVFKTRWETTGSFKSLGDFKTYGKADNTAFRELITAKEIEKNVQEMSKGSAPGPDGITLGDVVKMDPEFSLTMEIFNLWLTTGKIPDMVRGCRTVLIPKSSKPDRLKDINNWRPITIGSILLRLFSRIVTARLSKACPLNPRQRGFIRAAGCSENLKLLQTIIWSAKREHRPLGVVFVDIAKAFDTVSHQHIIHALQQREVDPHIVGLVSNMYENISTYITTKRNTHTDKIQIRVGVKQGDPMSPLLFNLAMDPLLCKLEESGKGYHRGQSSITAMAFADDLVLLSDSWENMNTNISILETFCNLTGLKTQGQKCHGFYIKPTKDSYTINDCAAWTINGTPLNMIDPGESEKYLGLQFDPWIGIARSGLSTKLDEWLQRIDQAPLKPLQKTDILKTYTIPRLIYIADHSEVKAALLETLDQKIRTAVKEWLHLPPCTCDAILYSSTRDGGLGITKLAGLIPSVQARRLHRIAQSSDDTMKCFMEKEKMEQLHKKLWIQAGGDRENIPSIWEAPPSSEPPNNVSTNSEWEAPTQKPKFPKPCNWRKNEFKKWTKLASQGRGIVNFERDKISNHWIQYYRRIPHRKLLTALQLRANVYPTREFLARGRQDQYIKACRHCDADIESCAHIIGNCPVTQDARIKRHNYICELLLEEAKKKDWVVFKEPHIRDSNKELYKPDLIFVKDARALVVDVTVRYEAAKSSLEEAAAEKVRKYKHLETEVRHLTNAKDVTFVGFPLGARGKWHQDNFKLLTELGLSKSRQVKMAETFSTVALFSSVDIVHMFASRARKSMVM

SEQ ID NO: 1644 - protein, 1671 aa, synthetic construct
MGTALTPLLTKFATRYEMGTTPEEVANTLKQTCFKGQVNDSQMVALLIVADQYKLNPFTKELYAFPDKNNGIVPVVGVDGWARIINENPQFDGMEFSMDQQGTECTCKIYRKDRSHAISATEYMAECKRNTQPWQSHPRRMLRHKAMIQCARLAFGFAGIYDQDEAERIVERDVTPAEQYEDVSEAICLIKDSPTMEDLQAAFSNAWKAYKTKGARDQLTAAKDQRKKELLDAPIDVEFEETGDDRAASGGSSGGSSGSETPGTSESATPESSGGSSGGSSMASCPKPGPPVSAGAMSLESGLTTHSVLAIERGPNSLANSGSDFGGGGLGLPLRLLRVSVGTQTSRSDWVDLVSWSHPGPTSKSQQVDLVSLFPKHRVDLLSKNDQVDLVAQFLPSKFPPNLAENDLALLVNLEFYRSDLHVYECVHKAAHWEGLSGLPEVYEQLAPQPCVGETLHSSLPRDSELFVPEEGSSEKESEDAPKTSPPTPGKHGLEQTGEEKVMVTVPDKNPPCPCCGTRVNSVLNLIEHLKVSHGKRGVCFRCAKCGKENSNYHSVVCHFPKCRGPETEKAPAGEWICEVCNRDFTTKIGLGQHKRLAHPAVRNQERIVASQPKETSNRGAHKRCWTKEEEELLIRLEAQFEGNKNINKLIAEHITTKTAKQISDKRRLLSRKPAEEPREEPGTCHHTRRAAASLRTEPEMSHHAQAEDRDNGPGRRPLPGRAAAGGRTMDEIRRHPDKGNGQQRPTKQKSEEQLQAYYKKTLEERLSAGALNTFPRAFKQVMEGRDIKLVINQTAQDCFGCLESISQIRTATRDKKYTVTREKHPKKPFQKWMKDRAIKKGNYLRFQRLFYLDRGKLAKIILDDIECLSCDIPLSEIYSVFKTRWETTGSFKSLGDFKTYGKADNTAFRELITAKEIEKNVQEMSKGSAPGPDGITLGDVVKMDPEFSLTMEIFNLWLTTGKIPDMVRGCRTVLIPKSSKPDRLKDINNWRPITIGSILLRLFSRIVTARLSKACPLNPRQRGFIRAAGCSENLKLLQTIIWSAKREHRPLGVVFVDIAKAFDTVSHQHIIHALQQREVDPHIVGLVSNMYENISTYITTKRNTHTDKIQIRVGVKQGDPMSPLLFNLAMDPLLCKLEESGKGYHRGQSSITAMAFADDLVLLSDSWENMNTNISILETFCNLTGLKTQGQKCHGFYIKPTKDSYTINDCAAWTINGTPLNMIDPGESEKYLGLQFDPWIGIARSGLSTKLDEWLQRIDQAPLKPLQKTDILKTYTIPRLIYIADHSEVKAALLETLDQKIRTAVKEWLHLPPCTCDAILYSSTRDGGLGITKLAGLIPSVQARRLHRIAQSSDDTMKCFMEKERMEQLHKKLWIQAGGDRENIPSIWEAPPSSEPPNNVSTNSEWEAPTQKPKFPKPCNWRKNEFKKWTKLASQGRGIVNFERDKISNHWIQYYRRIPHRKLLTALQLRANVYPTREFLARGRQDQYIKACRHCDADIESCAHIIGNCPVTQDARIKRHNYICELLLEEAKKKDWVVFKEPHIRDSNKELYKPDLIFVKDARALVVDVTVRYEAAKSSLEEAAAEKVRKYKHLETEVRHLTNAKDVTFVGFPLGARGKWHQDNFKLLTELGLSKSRQVKMAETFSTVALFSSVDIVHMFASRARKSMVM

SEQ ID NO: 1645 - protein, 1671 aa, synthetic construct
MGTALTPLLTKFATRYEMGTTPEEVANTLKQTCFKGQVNDSQMVALLIVADQYKLNPFTKELYAFPDKNNGIVPVVGVDGWARIINENPQFDGMEFSMDQQGTECTCKIYRKDRSHAISATEYMAECKRNTQPWQSHPRRMLRHKAMIQCARLAFGFAGIYDQDEAERIVERDVTPAEQYEDVSEAICLIKDSPTMEDLQAAFSNAWKAYKTKGARDQLTAAKDQRKKELLDAPIDVEFEETGDDRAASGGSSGGSSGSETPGTSESATPESSGGSSGGSSMASCPKPGPPVSAGAMSLESGLTTHSVLAIERGPNSLANSGSDFGGGGLGLPLRLLRVSVGTQTSRSDWVDLVSWSHPGPTSKSQQVDLVSLFPKHRVDLLSKNDQVDLVAQFLPSKFPPNLAENDLALLVNLEFYRSDLHVYECVHFAAHWEGLSGLPEVYEQLAPQPCVGETLHSSLPRDSELFVPEEGSSEKESEDAPKTSPPTPGKHGLEQTGEEKVMVTVPDKNPPCPCCGTRVNSVLNLIEHLKVSHGKRGVCFRCAKCGKENSNYHSVVCHFKKCRGPETEKAPAGEWICEVCNRDFTTKIGLGQHKRLAHPAVRNQERIVASQPKETSNRGAHKRCWTKEEEELLIRLEAQFEGNKNINKLIAEHITTKTAKQISDKRRLLSRKPAEEPREEPGTCHHTRRAAASLRTEPEMSHHAQAEDRDNGPGRRPLPGRAAAGGRTMDEIRRHPDKGNGQQRPTKQKSEEQLQAYYKKTLEERLSAGALNTFPRAFKQVMEGRDIKLVINQTAQDCFGCLESISQIRTATRDKKDTVTREKHPKKPFQKWMKKRAIKKGNYLRFQRLFYLDRGKLAKIILDDIECLSCDIPLSEIYSVFKTRWETTGSFKSLGDFKTYGKADNTAFRELITAKEIEKNVQEMSKGSAPGPDGITLGDVVKMDPEFSLTMEIFNLWLTTGKIPDMVRGCRTVLIPKSSKPDRLKDINNWRPITIGSILLRLFSRIVTARLSKACPLNPRQRGFIRAAGCSENLKLLQTIIWSAKREHRPLGVVFVDIAKAFDTVSHQHIIHALQQREVDPHIVGLVSNMYENISTYITTKRNTHTDKIQIRVGVKQGDPMSPLLFNLAMDPLLCKLEESGKGYHRGQSSITAMAFADDLVLLSDSWENMNTNISILETFCNLTGLKTQGQKCHGFYIKPTKDSYTINDCAAWTINGTPLNMIDPGESEKYLGLQFDPWIGIARSGLSTKLDFWLQRIDQAPLKPLQKTDILKTYTIPRLIYIADHSEVKTALLETLDQKIRTAVKEWLHLPPCTCDAILYSSTRDGGLGITKLAGLIPSVQARRLHRIAQSSDDTMKCFMEKEKMEQLHKKLWIQAGGDRENIPSIWEAPPSSEPPNNVSTNSEWEAPTQKPKFPKPCNWRKNEFKKWTKLASQGRGIVNFERDKISNHWIQYYRRIPHRKLLTALQLRANVYPTREFLARGRQDQYIKACRHCDADIESCAHIIGNCPVTQDARIKRHNYICELLLEEAKKKDWVVFKEPHIRDSNKELYKPDLIFVKDARALVVDVTVRYEAAKSSLEEAAAEKVRKYKHLETEVRHLTNAKDVTFVGFPLGARGKWHQDNFKLLTELGLSKSRQVKMAETFSTVALFSSVDIVHMFASRARKSMVM

SEQ ID NO: 1646 - protein, 1390 aa, synthetic construct
MASCPKPGPPVSAGAMSLESGLTTHSVLAIERGPNSLANSGSDFGGGGLGLPLRLLRVSVGTQTSRSDWVDLVSWSHPGPTSKSQQVDLVSLFPKHRVDLLSKNDQVDLVAQFLPSKFPPNLAENDLALLVNLEFYRSDLHVYECVHKAAHWEGLSGLPEVYEQLAPQPCVGETLHSSLPRDSELFVPEEGSSEKESEDAPKTSPPTPGKHGLEQTGEEKVMVTVPDKNPPCPCCGTRVNSVLNLIEHLKVSHGKRGVCFRCAKCGKENSNYHSVVCHFKKCRGPETEKAPAGEWICEVCNRDFTTKIGLGQHKRLAHPAVRNQERIVASQPKETSNRGAHKRCWTKEEEELLIRLEAQFEGNKNINKLIAEHITTKTAKQISDKRRLLSRKPAEEPREEPGTCHHTRRAAASLRTEPEMSHHAQAEDRDNGPGRRPLPGRAAAGGRTMDEIRRHPDKGNGQQRPTKQKSEEQLQAYYKKTLEERLSAGALNTFPRAFKQVMEGRDIKLVINQTAQDCFGCLESISQIRTATRDKKDTVTREKHPKKPFQKWMKKRAIKKGNYLRFQRLFYLDRGKLAKIILDDIECLSCDIPLSEIYSVFKTRWETTGSFKSLGDFKTYGKADNTAFRELITAKEIEKNVQEMSKGSAPGPDGITLGDVVKMDPEFSRTMEIFNLWLTTGKIPDMVRGCRTVLIPKSTQPDRLKDINNWRPITIGSILLRLFSRIITARMTKACPLNPRQRGFIRAAGCSENLKLLQTIIRSAKSEHRPLGVVFVDIAKAFDTVSHQHILHVLQQRGVDPHIIGLVSNMYKDISTFVTTKKDTHTDKIQIRVGVKQGDPLSPLLFNLAMDPLLCKLEESGNGFHRGGHTITAMAFADDLVLLSDSWENMEKNIEILEAFCDLTGLKTQGQKCHGFYIKPTKDSYTVNNCAAWTIYGTPLNMINPGDSEKYLGLQFDPWIGIARSGLSTKLDFWLQRIDQAPLKPLQKTDILKTYTIPRLIYIADHSEVKTALLETLDQKIRTAVKEWLHLPPCTCDAILYSSTRDGGLGITKLAGLIPSVQARRLHRIAQSSDDTMKCFMEKEKMEQLHKKLWIQAGGDRENIPSIWEAPPSSEPPNNVSTNSEWEAPTQKDKFPKPCNWRKNEFKKWTKLASQGRGIVNFERDKISNHWIQYYRRIPHRKLLTALQLRANVYPTREFLARGRQDQYIKACRHCDADIESCAHIIGNCPVTQDARIKRHNYICELLLEEAKKKDWVVFKEPHIRDSNKELYKPDLIFVKDARALVVDVTVRYEAAKSSLEEAAAEKVRKYKHLETEVRHLTNAKDVTFVGFPLGARGKWHQDNFKLLTELGLSKSRQVKMAETFSTVALFSSVDIVHMFASRARKSMVM

SEQ ID NO: 1647 - protein, 1550 aa, synthetic construct
MAPKKKRKVNISGSSCGSPNSADTSSDFKDLWTKLKECHDREVQGLQVKVTKLKQERILDAQRLEEFFTKNQQLREQQKVLHETIKVLEDRLRAGLCDRCAVTEEHMRKKQQEFENIRQQNLKLITELMNERNTLQEENKKLSEQLQQKIENDQQHQAAELECEEDVIPDSPITAFSFSGVNRLRRKENPHVRYIEQTHTKLEHSVCANEMRKVSKSSTHPQHNPNENEILVADTYDQSQSPMAKAHGTSSYTPDKSSFNLATVVAETLGLGVQEESETQGPMSPLGDELYHCLEGNHKKQPFESGSETPGTSESATPEGSYEQLAPQPCVGETLHSSLPRDSELFVPEEGSSEKESEDAPKTSPPTPGKHGLEQTGEEKVMVTVPDKNPPCPCCGTRVNSVLNLIEHLKVSHGKRGVCFRCAKCGKENSNYHSVVCHFKKCRGPETEKAPAGEWICEVCNRDFTTKIGLGQHKRLAHPAVRNQERIVASQPKETSNRGAHKRCWTKEEEELLIRLEAQFEGNKNINKLIAEHITTKTAKQISDKRRLLSRKPAEEPREEPGTCHHTRRAAASLRTEPEMSHHAQAEDRDNGPGRRPLPGRAAAGGRTMDEIRRHPDKGNGQQRPTKQKSEEQLQAYYKKTLEERLSAGALNTFPRAFKQVMEGRDIKLVINQTAQDCFGCLESISQIRTATRDKKDTVTREKHPKKPFQKWMKKRAIKKGNYLRFQRLFYLDRGKLAKIILDDIECLSCDIPLSEIYSVFKTRWETTGSFKSLGDFKTYGKADNTAFRELITAKEIEKNVQEMSKGSAPGPDGITLGDVVKMDPEFSRTMEIFNLWLTTGKIPDMVRGCRTVLIPKSTQPDRLKDINNWRPITIGSILLRLFSRIITARMTKACPLNPRQRGFIRAAGCSENLKLLQTIIRSAKSEHRPLGVVFVDIAKAFDTVSHQHILHVLQQRGVDPHIIGLVSNMYKDISTFVTTKKDTHTDKIQIRVGVKQGDPLSPLLFNLAMDPLLCKLEESGNGFHRGGHTITAMAFADDLVLLSDSWENMEKNIEILEAFCDLTGLKTQGQKCHGFYIKPTKDSYTVNNCAAWTIYGTPLNMINPGDSEKYLGLQFDPWIGIARSGLSTKLDFWLQRIDQAPLKPLQKTDILKTYTIPRLIYIADHSEVKTALLETLDQKIRTAVKEWLHLPPCTCDAILYSSTRDGGLGITKLAGLIPSVQARRLHRIAQSSDDTMKCFMEKEKMEQLHKKLWIQAGGDRENIPSIWEAPPSSEPPNNVSTNSEWEAPTQKDKFPKPCNWRKNEFKKWTKLASQGRGIVNFERDKISNHWIQYYRRIPHRKLLTALQLRANVYPTREFLARGRQDQYIKACRHCDADIESCAHIIGNCPVTQDARIKRHNYICELLLEEAKKKDWVVFKEPHIRDSNKELYKPDLIFVKDARALVVDVTVRYEAAKSSLEEAAAEKVRKYKHLETEVRHLTNAKDVTFVGFPLGARGKWHQDNFKLLTELGLSKSRQVKMAETFSTVALFSSVDIVHMFASRARKSMVM

SEQ ID NO: 1648 - protein, 1541 aa, synthetic construct
MASCPKPGPPVSAGAMSLESGLTTHSVLAIERGPNSLANSGSDFGGGGLGLPLRLLRVSVGTQTSRSDWVDLVSWSHPGPTSKSQQVDLVSLFPKHRVDLLSKNDQVDLVAQFLPSKFPPNLAENDLALLVNLEFYRSDLHVYECVHFAAHWEGLSGLPEVYEQLAPQPCVGETLHSSLPRDSELFVPEEGSSEKESEDAPKTSPPTPGKHGLEQTGEEKVMVTVPDKNPPCPCCGTRVNSVLNLIEHLKVSHGKRGVCFRCAKCGKENSNYHSVVCHFKKCRGPETEKAPAGEWICEVCNRDFTTKIGLGQHKRLAHPAVRNQERIVASQPKETSNRGAHKRCWTKEEEELLIRLEAQFEGNKNINKLIAEHITTKTAKQISDKRRLLSRKPAEEPREEPGTCHHTRRAAASLRTEPEMSHHAQAEDRDNGPGRRPLPGRAAAGGRTMDEIRRHPDKGNGQQRPTKQKSEEQLQAYYKKTLEERLSAGALNTFPRAFKQVMEGRDIKLVINQTAQDCFGCLESISQIRTATRDKKDTVTREKHPKKPFQKWMKKRAIKKGNYLRFQRLFYLDRGKLAKIILDDIECLSCDIPLSEIYSVFKTRWETTGSFKSLGDFKTYGKADNTAFRELITAKEIEKNVQEMSKGSAPGPDGITLGDVVKMDPEFSRTMEIFNLWLTTGKIPDMVRGCRTVLIDTSNLMEQILSSDNLNRAYLQVVRNKGAEGVDGMKYTELKEHLAKNGETIKGQLRTAAYKPQPARRVEIPKPDGGVRNLGVPTVTDRFIQQAIAQVLTPIYEEQFHDHSYGFRPNRCAQQAILTALNIMNDGNDWIVDIDLEKFFDTVNHDKLMTLIGRTIADGDVISIVRKYLVSGIMIDDEYEDSIVGTPQGGNLSPLLANIMLNELDKEMEAAGLNFVRYADDCIIMVGSEMSANRVMRNISRFIEEKLGLKVNMTKSKVDRPSGLKYLGFGFYFDPRAHQFKAKPHAKSVAKFKKRMKELTCRSWGVSNSYKVEKLNQLIRGWINYFKIGSMKTLCKELDSRIRYRLRMCIWKQWKTPQNQEKNLVKLGIDRNTARRVAYTGKRIAYVCNKGAVNVAISNKRLASFQFDPWIGIARSGLSTKLDFWLQRIDQAPLKPLQKTDILKTYTIPRLIYIADHSEVKTALLETLDQKIRTAVKEWLHLPPCTCDAILYSSTRDGGLGITKLAGLIPSVQARRLHRIAQSSDDTMKCFMEKEKMEQLHKKLWIQAGGDRENIPSIWEAPPSSEPPNNVSTNSEWEAPTQKDKFPKPCNWRKNEFKKWTKLASQGRGIVNFERDKISNHWIQYYRRIPHRKLLTALQLRANVYPTREFLARGRQDQYIKACRHCDADIESCAHIIGNCPVTQDARIKRHNYICELLLEEAKKKDWVVFKEPHIRDSNKELYKPDLIFVKDARALVVDVTVRYEAAKSSLEEAAAEKVRKYKHLETEVRHLTNAKDVTFVGFPLGARGKWHQDNFKLLTELGLSKSRQVKMAETFSTVALFSSVDIVHMFASRARKSMVM

SEQ ID NO: 1649 - protein, 1541 aa, synthetic construct
MASCPKPGPPVSAGAMSLESGLTTHSVLAIERGPNSLANSGSDFGGGGLGLPLRLLRVSVGTQTSRSDWVDLVSWSHPGPTSKSQQVDLVSLFPKHRVDLLSKNDQVDLVAQFLPSKFPPNLAENDLALLVNLEFYRSDLHVYECVHKAAHWEGLSGLPEVYEQLAPQPCVGETLHSSLPRDSELFVPEEGSSEKESEDAPKTSPPTPGKHGLEQTGEEKVMVTVPDKNPPCPCCGTRVNSVLNLIEHLKVSHGKRGVCFRCAKCGKENSNYHSVVCHFKKCRGPETEKAPAGEWICEVCNRDFTTKIGLGQHKRLAHPAVRNQERIVASQPKETSNRGAHKRCWTKEEEELLIRLEAQFEGNKNINKLIAEHITTKTAKQISDKRRLLSRKPAEEPREEPGTCHHTRRAAASLRTEPEMSHHAQAEDRDNGPGRRPLPGRAAAGGRTMDEIRRHPDKGNGQQRPTKQKSEEQLQAYYKKTLEERLSAGALNTFPRAFKQVMEGRDIKLVINQTAQDCFGCLESISQIRTATRDKKDTVTREKHPKKPFQKWMKKRAIKKGNYLRFQRLFYLDRGKLAKIILDDIECLSCDIPLSEIYSVFKTRWETTGSFKSLGDFKTYGKADNTAFRELITAKEIEKNVQEMSKGSAPGPDGITLGDVVKMDPEFSRTMEIFNLWLTTGKIPDMVRGCRTVLIDTSNLMEQILSSDNLNRAYLQVVRNKGAEGVDGMKYTELKEHLAKNGETIKGQLRTAAYKPQPARRVEIPKPDGGVRNLGVPTVTDRFIQQAIAQVLTPIYEEQFHDHSYGFRPNRCAQQAILTALNIMNDGNDWIVDIDLEKFFDTVNHDKLMTLIGRTIADGDVISIVRKYLVSGIMIDDEYEDSIVGTPQGGNLSPLLANIMLNELDKEMEAAGLNFVRYADDCIIMVGSEMSANRVMRNISRFIEEKLGLKVNMTKSKVDRPSGLKYLGFGFYFDPRAHQFKAKPHAKSVAKFKKRMKELTCRSWGVSNSYKVEKLNQLIRGWINYFKIGSMKTLCKELDSRIRYRLRMCIWKQWKTPQNQEKNLVKLGIDRNTARRVAYTGKRIAYVCNKGAVNVAISNKRLASFQFDPWIGIARSGLSTKLDFWLQRIDQAPLKPLQKTDILKTYTIPRLIYIADHSEVKTALLETLDQKIRTAVKEWLHLPPCTCDAILYSSTRDGGLGITKLAGLIPSVQARRLHRIAQSSDDTMKCFMEKEKMEQLHKKLWIQAGGDRENIPSIWEAPPSSEPPNNVSTNSEWEAPTQKDKFPKPCNWRKNEFKKWTKLASQGRGIVNFERDKISNHWIQYYRRIPHRKLLTALQLRANVYPTREFLARGRQDQYIKACRHCDADIESCAHIIGNCPVTQDARIKRHNYICELLLEEAKKKDWVVFKEPHIRDSNKELYKPDLIFVKDARALVVDVTVRYEAAKSSLEEAAAEKVRKYKHLETEVRHLTNAKDVTFVGFPLGARGKWHQDNFKLLTELGLSKSRQVKMAETFSTVALFSSVDIVHMFASRARKSMVM

SEQ ID NO: 1650 - protein, 1701 aa, synthetic construct
MAPKKKRKVNISGSSCGSPNSADTSSDFKDLWTKLKECHDREVQGLQVKVTKLKQERILDAQRLEEFFTKNQQLREQQKVLHETIKVLEDRLRAGLCDRCAVTEEHMRKKQQEFENIRQQNLKLITELMNERNTLQEENKKLSEQLQQKIENDQQHQAAELECEEDVIPDSPITAFSFSGVNRLRRKENPHVRYIEQTHTKLEHSVCANEMRKVSKSSTHPQHNPNENEILVADTYDQSQSPMAKAHGTSSYTPDKSSFNLATVVAETLGLGVQEESETQGPMSPLGDELYHCLEGNHKKQPFESGSETPGTSESATPEGSYEQLAPQPCVGETLHSSLPRDSELFVPEEGSSEKESEDAPKTSPPTPGKHGLEQTGEEKVMVTVPDKNPPCPCCGTRVNSVLNLIEHLKVSHGKRGVCFRCAKCGKENSNYHSVVCHFKKCRGPETEKAPAGEWICEVCNRDFTTKIGLGQHKRLAHPAVRNQERIVASQPKETSNRGAHKRCWTKEEEELLIRLEAQFEGNKNINKLIAEHITTKTAKQISDKRRLLSRKPAEEPREEPGTCHHTRRAAASLRTEPEMSHHAQAEDRDNGPGRRPLPGRAAAGGRTMDEIRRHPDKGNGQQRPTKQKSEEQLQAYYKKTLEERLSAGALNTFPRAFKQVMEGRDIKLVINQTAQDCFGCLESISQIRTATRDKKDTVTREKHPKKPFQKWMKKRAIKKGNYLRFQRLFYLDRGKLAKIILDDIECLSCDIPLSEIYSVFKTRWETTGSFKSLGDFKTYGKADNTAFRELITAKEIEKNVQEMSKGSAPGPDGITLGDVVKMDPEFSRTMEIFNLWLTTGKIPDMVRGCRTVLIDTSNLMEQILSSDNLNRAYLQVVRNKGAEGVDGMKYTELKEHLAKNGETIKGQLRTAAYKPQPARRVEIPKPDGGVRNLGVPTVTDRFIQQAIAQVLTPIYEEQFHDHSYGFRPNRCAQQAILTALNIMNDGNDWIVDIDLEKFFDTVNHDKLMTLIGRTIADGDVISIVRKYLVSGIMIDDEYEDSIVGTPQGGNLSPLLANIMLNELDKEMEAAGLNFVRYADDCIIMVGSEMSANRVMRNISRFIEEKLGLKVNMTKSKVDRPSGLKYLGFGFYFDPRAHQFKAKPHAKSVAKFKKRMKELTCRSWGVSNSYKVEKLNQLIRGWINYFKIGSMKTLCKELDSRIRYRLRMCIWKQWKTPQNQEKNLVKLGIDRNTARRVAYTGKRIAYVCNKGAVNVAISNKRLASFQFDPWIGIARSGLSTKLDFWLQRIDQAPLKPLQKTDILKTYTIPRLIYIADHSEVKTALLETLDQKIRTAVKEWLHLPPCTCDAILYSSTRDGGLGITKLAGLIPSVQARRLHRIAQSSDDTMKCFMEKEKMEQLHKKLWIQAGGDRENIPSIWEAPPSSEPPNNVSTNSEWEAPTQKDKFPKPCNWRKNEFKKWTKLASQGRGIVNFERDKISNHWIQYYRRIPHRKLLTALQLRANVYPTREFLARGRQDQYIKACRHCDADIESCAHIIGNCPVTQDARIKRHNYICELLLEEAKKKDWVVFKEPHIRDSNKELYKPDLIFVKDARALVVDVTVRYEAAKSSLEEAAAEKVRKYKHLETEVRHLTNAKDVTFVGFPLGARGKWHQDNFKLLTELGLSKSRQVKMAETFSTVALFSSVDIVHMFASRARKSMVM

SEQ ID NO: 1651 - protein, 1390 aa, synthetic construct
MASCPKPGPPVSAGAMSLESGLTTHSVLAIERGPNSLANSGSDFGGGGLGLPLRLLRVSVGTQTSRSDWVDLVSWSHPGPTSKSQQVDLVSLFPKHRVDLLSKNDQVDLVAQFLPSKFPPNLAENDLALLVNLEFYRSDLHVYEGVHKAAHWEGLSGLPEVYEQLAPQPCVGETLHSSLPRDSELFVPEEGSSEKESEDAPKTSPPTPGKHGKRQTGEEKVMVTVPDKNPPCPCCGTRVNSVLNLIEHLKVSHGKRRVCFRCAKCGKENSNYHSVVCHFKKCRGPETEKAPAGEWICEVCNRDFTTKIGLGQHKRLAHPAVRNQERIVASQPKETSNRGAHKRCWTKEEEELLIRLEAQFEGNKNINKLIAEHITTKTAKQISDKRRLLSRKPAEEPREEPGTCHHTRRAAASLRTEPEMSHHAQAEDRDNGPGRRPLPGRAAAGGRTMDEIRRHPDKGNGQQRPTKQKSEEQLQAYYKKTLEERLSAGALNTFPRAFKQVMEGRDIKLVINQTAQDCFGCLESISQIRTATRDKKYTVTREKHPKKPFQKWMKKRAIKKGNYLRFQRLFYLDRGKLAKIILDDIECLSCDIPLSEIYSVFKTRWETTGSFKSLGDFKTYGKADNTAFRELITAKEIEKNVQEMSKGSAPGPDGITLGDVVKMDPEGSRTMEIFNLWLTTGKIPDMVRGCRTVLIPKSSDPDRLKDINNWRPITIGSILLRLFSRIVTARLSKACPLNPRQRGFIRAAGCSENLKLLQTIIWSAKREHRPLGVVFVDIAKAFDTVSHQHIIHALQQREVDPHIVGLVSNMYENISTYITTKRNTHTDKIQIRVGVKQGDPMSPLLFNLAMDPLLCKLEESGKGYHRGQSSITAMAFADDLVLLSDSWENMNTNISILETFCNLTGLKTQGQKCHGFYIKPTKDSYTINDCAAWTINGTPLNMIDPGESEKYLGLQFDPWIGIARSGLSTKLDFWLQRIDQAPLKPLQKTDILKTYTIPRLIYIADHSEVKTALLETLDQKIRTAVKEWLHLPPCTCDAILYSSTRDGGLGITKLAGLIPSVQARRLHRIAQSSDDTMKCFMEKEKMEQLHKKLWIQAGGDRENIPSIWEAPPSSEPPNNVSTNSEWEAPTQKDKFPKPCNWRKNEFKKWTKLASQGRGIVNFERDKISNHWIQYYRRIPHRKLLTALQLRANVYPTREFLARGRQDQYIKACRHCDADIESCAHIIGNCPVTQDARIKRHNKICELLLEEAKKKDWVVFKEPHIRDSNKELYKPDLIFVKDGRALVVDVTVRYEAAKSSLEEAAAEKVRKYKHLETEVRHLTNAKDVTFVGFPLGARGKWHQDNFKLLTELGLSKSRQVKMAETFSTVALFSSVDIVHMFASRARKSMVM

SEQ ID NO: 1652 - protein, 1390 aa, synthetic construct
MASCPKPGPPVSAGAMSLESGLTTHSVLAIERGPNSLANSGSDFGGGGLGLPLRLLRVSVGTQTSRSDWVDLVSWSHPGPTSKSQQVDLVSLFPKHRVDLLSKNDQVDLVAQFLPSKFPPNLAENDLALLVNLEFYRSDLHVYECVHKAAHWEGLSGLPEVYEQLAPQPCVGETLHSSLPRDSELFVPEEGSSEKESEDAPKTSPPTPGKHGLEQTGEEKVMVTVPDKNPPCPCCGTRVNSVLNLIEHLKVSHGKRGVCFRCAKCGKENSNYHSVVCHFPKCRGPETEKAPAGEWICEVCNRDFTTKIGLGQHKRLAHPAVRNQERIVASQPKETSNRGAHKRCWTKEEEELLIRLEAQFEGNKNINKLIAEHITTKTAKQISDKRRLLSRKPAEEPREEPGTCHHTRRAAASLRTEPEMSHHAQAEDRDNGPGRRPLPGRAAAGGRTMDEIRRHPDKGNGQQRPTKQKSEEQLQAYYKKTLEERLSAGALNTFPRAFKQVMEGRDIKLVINQTAQDCFGCLESISQIRTATRDKKYTVTREKHPKKPFQKWMKDRAIKKGNYLRFQRLFYLDRGKLAKIILDDIECLSCDIPLSEIYSVFKTRWETTGSFKSLGDFKTYGKADNTAFRELITAKEIEKNVQEMSKGSAPGPDGITLGDVVKMDPEFSLTMEIFNLWLTTGKIPDMVRGCRTVLIPKSSKPDRLKDINNWRPITIGSILLRLFSRIVTARLSKACPLNPRQRGFIRAAGCSENLKLLQTIIWSAKREHRPLGVVFVDIAKAFDTVSHQHIIHALQQREVDPHIVGLVSNMYENISTYITTKRNTHTDKIQIRVGVKQGDPMSPLLFNLAMDPLLCKLEESGKGYHRGQSSITAMAFADDLVLLSDSWENMNTNISILETFCNLTGLKTQGQKCHGFYIKPTKDSYTINDCAAWTINGTPLNMIDPGESEKYLGLQFDPWIGIARSGLSTKLDEWLQRIDQAPLKPLQKTDILKTYTIPRLIYIADHSEVKAALLETLDQKIRTAVKEWLHLPPCTCDAILYSSTRDGGLGITKLAGLIPSVQARRLHRIAQSSDDTMKCFMEKEKMEQLHKKLWIQAGGDRENIPSIWEAPPSSEPPNNVSTNSEWEAPTQKPKFPKPCNWRKNEFKKWTKLASQGRGIVNFERDKISNHWIQYYRRIPHRKLLTALQLRANVYPTREFLARGRQDQYIKACRHCDADIESCAHIIGNCPVTQDARIKRHNYICELLLEEAKKKDWVVFKEPHIRDSNKELYKPDLIFVKDARALVVDVTVRYEAAKSSLEEAAAEKVRKYKHLETEVRHLTNAKDVTFVGFPLGARGKWHQDNFKLLTELGLSKSRQVKMAETFSTVALFSSVDIVHMFASRARKSMVM

SEQ ID NO: 1653 - protein, 1390 aa, synthetic construct
MASCPKPGPPVSAGAMSLESGLTTHSVLAIERGPNSLANSGSDFGGGGLGLPLRLLRVSVGTQTSRSDWVDLVSWSHPGPTSKSQQVDLVSLFPKHRVDLLSKNDQVDLVAQFLPSKFPPNLAENDLALLVNLEFYRSDLHVYECVHKAAHWEGLSGLPEVYEQLAPQPCVGETLHSSLPRDSELFVPEEGSSEKESEDAPKTSPPTPGKHGLEQTGEEKVMVTVPDKNPPCPCCGTRVNSVLNLIEHLKVSHGKRGVCFRCAKCGKENSNYHSVVCHFPKCRGPETEKAPAGEWICEVCNRDFTTKIGLGQHKRLAHPAVRNQERIVASQPKETSNRGAHKRCWTKEEEELLIRLEAQFEGNKNINKLIAEHITTKTAKQISDKRRLLSRKPAEEPREEPGTCHHTRRAAASLRTEPEMSHHAQAEDRDNGPGRRPLPGRAAAGGRTMDEIRRHPDKGNGQQRPTKQKSEEQLQAYYKKTLEERLSAGALNTFPRAFKQVMEGRDIKLVINQTAQDCFGCLESISQIRTATRDKKYTVTREKHPKKPFQKWMKDRAIKKGNYLRFQRLFYLDRGKLAKIILDDIECLSCDIPLSEIYSVFKTRWETTGSFKSLGDFKTYGKADNTAFRELITAKEIEKNVQEMSKGSAPGPDGITLGDVVKMDPEFSLTMEIFNLWLTTGKIPDMVRGCRTVLIPKSSKPDRLKDINNWRPITIGSILLRLFSRIVTARLSKACPLNPRQRGFIRAAGCSENLKLLQTIIWSAKREHRPLGVVFVDIAKAFDTVSHQHIIHALQQREVDPHIVGLVSNMYENISTYITTKRNTHTDKIQIRVGVKQGDPMSPLLFNLAMDPLLCKLEESGKGYHRGQSSITAMAFADDLVLLSDSWENMNTNISILETFCNLTGLKTQGQKCHGFYIKPTKDSYTINDCAAWTINGTPLNMIDPGESEKYLGLQFDPWIGIARSGLSTKLDEWLQRIDQAPLKPLQKTDILKTYTIPRLIYIADHSEVKAALLETLDQKIRTAVKEWLHLPPCTCDAILYSSTRDGGLGITKLAGLIPSVQARRLHRIAQSSDDTMKCFMEKERMEQLHKKLWIQAGGDRENIPSIWEAPPSSEPPNNVSTNSEWEAPTQKPKFPKPCNWRKNEFKKWTKLASQGRGIVNFERDKISNHWIQYYRRIPHRKLLTALQLRANVYPTREFLARGRQDQYIKACRHCDADIESCAHIIGNCPVTQDARIKRHNYICELLLEEAKKKDWVVFKEPHIRDSNKELYKPDLIFVKDARALVVDVTVRYEAAKSSLEEAAAEKVRKYKHLETEVRHLTNAKDVTFVGFPLGARGKWHQDNFKLLTELGLSKSRQVKMAETFSTVALFSSVDIVHMFASRARKSMVM

SEQ ID NO: 1654 - protein, 1390 aa, synthetic construct
MASCPKPGPPVSAGAMSLESGLTTHSVLAIERGPNSLANSGSDFGGGGLGLPLRLLRVSVGTQTSRSDWVDLVSWSHPGPTSKSQQVDLVSLFPKHRVDLLSKNDQVDLVAQFLPSKFPPNLAENDLALLVNLEFYRSDLHVYECVHKAAHWEGLSGLPEVYEQLAPQPCVGETLHSSLPRDSELFVPEEGSSEKESEDAPKTSPPTPGKHGLEQTGEEKVMVTVPDKNPPCPCCGTRVNSVLNLIEHLKVSHGKRGVCFRCAKCGKENSNYHSVVCHFPKCRGPETEKAPAGEWICEVCNRDFTTKIGLGQHKRLAHPAVRNQERIVASQPKETSNRGAHKRCWTKEEEELLIRLEAQFEGNKNINKLIAEHITTKTAKQISDKRRLLSRKPAEEPREEPGTCHHTRRAAASLRTEPEMSHHAQAEDRDNGPGRRPLPGRAAAGGRTMDEIRRHPDKGNGQQRPTKQKSEEQLQAYYKKTLEERLSAGALNTFPRAFKQVMEGRDIKLVINQTAQDCFGCLESISQIRTATRDKKYTVTREKHPKRPFQKWMKDRAIKKGNYLRFQRLFYLDRGKLAKIILDDIECLSCDIPLSEIYSVFKTRWETTGSFKSLGDFKTYGKADNTAFRELITAKEIEKNVQEMSKGSAPGPDGITLGDVVKMDPEFSLTMEIFNLWLTTGKIPDMVRGCRTVLIPKSSKPDRLKDINNWRPITIGSILLRLFSRIVTARLSKACPLNPRQRGFIRAAGCSENLKLLQTIIWSAKREHRPLGVVFVDIAKAFDTVSHQHIIHALQQREVDPHIVGLVSNMYENISTYITTKRNTHTDKIQIRVGVKQGDPMSPLLFNLAMDPLLCKLEESGKGYHRGQSSITAMAFADDLVLLSDSWENMNTNISILETFCNLTGLKTQGQKCHGFYIKPTKDSYTINDCAAWTINGTPLNMIDPGESEKYLGLQFDPWIGIARSGLSTKLDEWLQRIDQAPLKPLQKTDILKTYTIPRLIYIADHSEVKAALLETLDQKIRTAVKEWLHLPPCTCDAILYSSTRDGGLGITKLAGLIPSVQARRLHRIAQSSDDTMKCFMEKERMEQLHKKLWIQAGGDRENIPSIWEAPPSSEPPNNVSTNSEWEAPTQKPKFPKPCNWRKNEFKKWTKLASQGRGIVNFERDKISNHWIQYYRRIPHRKLLTALQLRANVYPTREFLARGRQDQYIKACRHCDADIESCAHIIGNCPVTQDARIKRHNYICELLLEEAKKKDWVVFKEPHIRDSNKELYKPDLIFVKDARALVVDVTVRYEAAKSSLEEAAAEKVRKYKHLETEVRHLTNAKDVTFVGFPLGARGKWHQDNFKLLTELGLSKSRQVKMAETFSTVALFSSVDIVHMFASRARKSMVM

SEQ ID NO: 1655 - protein, 1390 aa, synthetic construct
MASCPKPGPPVSAGAMSLESGLTTHSVLAIERGPNSLANSGSDFGGGGLGLPLRLLRVSVGTQTSRSDWVDLVSWSHPGPTSKSQQVDLVSLFPKHRVDLLSKNDQVDLVAQFLPSKFPPNLAENDLALLVNLEFYRSDLHVYECVHFAAHWEGLSGLPEVYEQLAPQPCVGETLHSSLPRDSELFVPEEGSSEKESEDAPKTSPPTPGKHGLEQTGEEKVMVTVPDKNPPCPCCGTRVNSVLNLIEHLKVSHGKRGVCFRCAKCGKENSNYHSVVCHFKKCRGPETEKAPAGEWICEVCNRDFTTKIGLGQHKRLAHPAVRNQERIVASQPKETSNRGAHKRCWTKEEEELLIRLEAQFEGNKNINKLIAEHITTKTAKQISDKRRLLSRKPAEEPREEPGTCHHTRRAAASLRTEPEMSHHAQAEDRDNGPGRRPLPGRAAAGGRTMDEIRRHPDKGNGQQRPTKQKSEEQLQAYYKKTLEERLSAGALNTFPRAFKQVMEGRDIKLVINQTAQDCFGCLESISQIRTATRDKKDTVTREKHPKKPFQKWMKKRAIKKGNYLRFQRLFYLDRGKLAKIILDDIECLSCDIPLSEIYSVFKTRWETTGSFKSLGDFKTYGKADNTAFRELITAKEIEKNVQEMSKGSAPGPDGITLGDVVKMDPEFSLTMEIFNLWLTTGKIPDMVRGCRTVLIPKSSKPDRLKDINNWRPITIGSILLRLFSRIVTARLSKACPLNPRQRGFIRAAGCSENLKLLQTIIWSAKREHRPLGVVFVDIAKAFDTVSHQHIIHALQQREVDPHIVGLVSNMYENISTYITTKRNTHTDKIQIRVGVKQGDPMSPLLFNLAMDPLLCKLEESGKGYHRGQSSITAMAFADDLVLLSDSWENMNTNISILETFCNLTGLKTQGQKCHGFYIKPTKDSYTINDCAAWTINGTPLNMIDPGESEKYLGLQFDPWIGIARSGLSTKLDFWLQRIDQAPLKPLQKTDILKTYTIPRLIYIADHSEVKTALLETLDQKIRTAVKEWLHLPPCTCDAILYSSTRDGGLGITKLAGLIPSVQARRLHRIAQSSDDTMKCFMEKEKMEQLHKKLWIQAGGDRENIPSIWEAPPSSEPPNNVSTNSEWEAPTQKPKFPKPCNWRKNEFKKWTKLASQGRGIVNFERDKISNHWIQYYRRIPHRKLLTALQLRANVYPTREFLARGRQDQYIKACRHCDADIESCAHIIGNCPVTQDARIKRHNYICELLLEEAKKKDWVVFKEPHIRDSNKELYKPDLIFVKDARALVVDVTVRYEAAKSSLEEAAAEKVRKYKHLETEVRHLTNAKDVTFVGFPLGARGKWHQDNFKLLTELGLSKSRQVKMAETFSTVALFSSVDIVHMFASRARKSMVM

SEQ ID NO: 1656 - protein, 1390 aa, synthetic construct
MASCPKPGPPVSAGAMSLESGLTTHSVLAIERGPNSLANSGSDFGGGGLGLPLRLLRVSVGTQTSRSDWVDLVSWSHPGPTSKSQQVDLVSLFPKHRVDLLSKNDQVDLVAQFLPSKFPPNLAENDLALLVNLEFYRSDLHVYECVHKAAHWEGLSGLPEVYEQLAPQPCVGETLHSSLPRDSELFVPEEGSSEKESEDAPKTSPPTPGKHGLEQTGEEKVMVTVPDKNPPCPCCGTRVNSVLNLIEHLKVSHGKRGVCFRCAKCGKENSNYHSVVCHFKKCRGPETEKAPAGEWICEVCNRDFTTKIGLGQHKRLAHPAVRNQERIVASQPKETSNRGAHKRCWTKEEEELLIRLEAQFEGNKNINKLIAEHITTKTAKQISDKRRLLSRKPAEEPREEPGTCHHTRRAAASLRTEPEMSHHAQAEDRDNGPGRRPLPGRAAAGGRTMDEIRRHPDKGNGQQRPTKQKSEEQLQAYYKKTLEERLSAGALNTFPRAFKQVMEGRDIKLVINQTAQDCFGCLESISQIRTATRDKKYTVTREKHPKKPFQKWMKKRAIKKGNYLRFQRLFYLDRGKLAKIILDDIECLSCDIPLSEIYSVFKTRWETTGSFKSLGDFKTYGKADNTAFRELITAKEIEKNVQEMSKGSAPGPDGITLGDVVKMDPEFSLTMEIFNLWLTTGKIPDMVRGCRTVLIPKSSKPDRLKDINNWRPITIGSILLRLFSRIVTARLSKACPLNPRQRGFIRAAGCSENLKLLQTIIWSAKREHRPLGVVFVDIAKAFDTVSHQHIIHALQQREVDPHIVGLVSNMYENISTYITTKRNTHTDKIQIRVGVKQGDPMSPLLFNLAMDPLLCKLEESGKGYHRGQSSITAMAFADDLVLLSDSWENMNTNISILETFCNLTGLKTQGQKCHGFYIKPTKDSYTINDCAAWTINGTPLNMIDPGESEKYLGLQFDPWIGIARSGLSTKLDEWLQRIDQAPLKPLQKTDILKTYTIPRLIYIADHSEVKAALLETLDQKIRTAVKEWLHLPPCTCDAILYSSTRDGGLGITKLAGLIPSVQARRLHRIAQSSDDTMKCFMEKERMEQLHKKLWIQAGGDRENIPSIWEAPPSSEPPNNVSTNSEWEAPTQKPKFPKPCNWRKNEFKKWTKLASQGRGIVNFERDKISNHWIQYYRRIPHRKLLTALQLRANVYPTREFLARGRQDQYIKACRHCDADIESCAHIIGNCPVTQDARIKRHNYICELLLEEAKKKDWVVFKEPHIRDSNKELYKPDLIFVKDARALVVDVTVRYEAAKSSLEEAAAEKVRKYKHLETEVRHLTNAKDVTFVGFPLGARGKWHQDNFKLLTELGLSKSRQVKMAETFSTVALFSSVDIVHMFASRARKSMVM

SEQ ID NO: 1657 - protein, 1671 aa, synthetic construct
MGTALTPLLTKFATRYEMGTTPEEVANTLKQTCFKGQVNDSQMVALLIVADQYKLNPFTKELYAFPDKNNGIVPVVGVDGWARIINENPQFDGMEFSMDQQGTECTCKIYRKDRSHAISATEYMAECKRNTQPWQSHPRRMLRHKAMIQCARLAFGFAGIYDQDEAERIVERDVTPAEQYEDVSEAICLIKDSPTMEDLQAAFSNAWKAYKTKGARDQLTAAKDQRKKELLDAPIDVEFEETGDDRAASGGSSGGSSGSETPGTSESATPESSGGSSGGSSMASCPKPGPPVSAGAMSLESGLTTHSVLAIERGPNSLANSGSDFGGGGLGLPLRLLRVSVGTQTSRSDWVDLVSWSHPGPTSKSQQVDLVSLFPKHRVDLLSKNDQVDLVAQFLPSKFPPNLAENDLALLVNLEFYRSDLHVYECVHKAAHWEGLSGLPEVYEQLAPQPCVGETLHSSLPRDSELFVPEEGSSEKESEDAPKTSPPTPGKHGLEQTGEEKVMVTVPDKNPPCPCCGTRVNSVLNLIEHLKVSHGKRGVCFRCAKCGKENSNYHSVVCHFPKCRGPETEKAPAGEWICEVCNRDFTTKIGLGQHKRLAHPAVRNQERIVASQPKETSNRGAHKRCWTKEEEELLIRLEAQFEGNKNINKLIAEHITTKTAKQISDKRRLLSRKPAEEPREEPGTCHHTRRAAASLRTEPEMSHHAQAEDRDNGPGRRPLPGRAAAGGRTMDEIRRHPDKGNGQQRPTKQKSEEQLQAYYKKTLEERLSAGALNTFPRAFKQVMEGRDIKLVINQTAQDCFGCLESISQIRTATRDKKYTVTREKHPKRPFQKWMKDRAIKKGNYLRFQRLFYLDRGKLAKIILDDIECLSCDIPLSEIYSVFKTRWETTGSFKSLGDFKTYGKADNTAFRELITAKEIEKNVQEMSKGSAPGPDGITLGDVVKMDPEFSLTMEIFNLWLTTGKIPDMVRGCRTVLIPKSSKPDRLKDINNWRPITIGSILLRLFSRIVTARLSKACPLNPRQRGFIRAAGCSENLKLLQTIIWSAKREHRPLGVVFVDIAKAFDTVSHQHIIHALQQREVDPHIVGLVSNMYENISTYITTKRNTHTDKIQIRVGVKQGDPMSPLLFNLAMDPLLCKLEESGKGYHRGQSSITAMAFADDLVLLSDSWENMNTNISILETFCNLTGLKTQGQKCHGFYIKPTKDSYTINDCAAWTINGTPLNMIDPGESEKYLGLQFDPWIGIARSGLSTKLDEWLQRIDQAPLKPLQKTDILKTYTIPRLIYIADHSEVKAALLETLDQKIRTAVKEWLHLPPCTCDAILYSSTRDGGLGITKLAGLIPSVQARRLHRIAQSSDDTMKCFMEKERMEQLHKKLWIQAGGDRENIPSIWEAPPSSEPPNNVSTNSEWEAPTQKPKFPKPCNWRKNEFKKWTKLASQGRGIVNFERDKISNHWIQYYRRIPHRKLLTALQLRANVYPTREFLARGRQDQYIKACRHCDADIESCAHIIGNCPVTQDARIKRHNYICELLLEEAKKKDWVVFKEPHIRDSNKELYKPDLIFVKDARALVVDVTVRYEAAKSSLEEAAAEKVRKYKHLETEVRHLTNAKDVTFVGFPLGARGKWHQDNFKLLTELGLSKSRQVKMAETFSTVALFSSVDIVHMFASRARKSMVM

SEQ ID NO: 1658 - protein, 1671 aa, synthetic construct
MGTALTPLLTKFATRYEMGTTPEEVANTLKQTCFKGQVNDSQMVALLIVADQYKLNPFTKELYAFPDKNNGIVPVVGVDGWARIINENPQFDGMEFSMDQQGTECTCKIYRKDRSHAISATEYMAECKRNTQPWQSHPRRMLRHKAMIQCARLAFGFAGIYDQDEAERIVERDVTPAEQYEDVSEAICLIKDSPTMEDLQAAFSNAWKAYKTKGARDQLTAAKDQRKKELLDAPIDVEFEETGDDRAASGGSSGGSSGSETPGTSESATPESSGGSSGGSSMASCPKPGPPVSAGAMSLESGLTTHSVLAIERGPNSLANSGSDFGGGGLGLPLRLLRVSVGTQTSRSDWVDLVSWSHPGPTSKSQQVDLVSLFPKHRVDLLSKNDQVDLVAQFLPSKFPPNLAENDLALLVNLEFYRSDLHVYECVHKAAHWEGLSGLPEVYEQLAPQPCVGETLHSSLPRDSELFVPEEGSSEKESEDAPKTSPPTPGKHGLEQTGEEKVMVTVPDKNPPCPCCGTRVNSVLNLIEHLKVSHGKRGVCFRCAKCGKENSNYHSVVCHFPKCRGPETEKAPAGEWICEVCNRDFTTKIGLGQHKRLAHPAVRNQERIVASQPKETSNRGAHKRCWTKEEEELLIRLEAQFEGHKNINKLIAEHITTKTAKQISDKRRLLSRKPAEEPREEPGTCHHTRRAAASLRTEPEMSHHAQAEDRDNGPGRRPLPGRAAAGGRTMDEIRRHPDKGNGQQRPTKQKSEEQLQAYYKKTLEERLSAGALNTFPRAFKQVMEGRDIKLVINQTAQDCFGCLESISQIRTATRDKKYTVTREKHPKRPFQKWMKDRAIKKGNYLRFQRLFYLDRGKLAKIILDDIECLSCDIPLSEIYSVFKTRWETTGSFKSLGDFKTYGKADNTAFRELITAKEIEKNVQEMSKGSAPGPDGITLGDVVKMDPEFSLTMEIFNLWLTTGKIPDMVRGCRTVLIPKSSKPDRLKDINNWRPITIGSILLRLFSRIVTARLSKACPLNPRQRGFIRAAGCSENLKLLQTIIWSAKREHRPLGVVFVDIAKAFDTVSHQHIIHALQQREVDPHIVGLVSNMYENISTYITTKRNTHTDKIQIRVGVKQGDPMSPLLFNLAMDPLLCKLEESGKGYHRGQSSITAMAFADDLVLLSDSWENMNTNISILETFCNLTGLKTQGQKCHGFYIKPTKDSYTINDCAAWTINGTPLNMIDPGESEKYLGLQFDPWIGIARSGLSTKLDEWLQRIDQAPLKPLQKTDILKTYTIPRLIYIADHSEVKAALLETLDQKIRTAVKEWLHLPPCTCDAILYSSTRDGGLGITKLAGLIPSVQARRLHRIAQSSDDTMKCFMEKERMEQLHKKLWIQAGGDRENIPSIWEAPPSSEPPNNVSTNSEWEAPTQKPKFPKPCNWRKNEFKKWTKLASQGRGIVNFERDKISNHWIQYYRRIPHRKLLTALQLRANVYPTREFLARGRQDQYIKACRHCDADIESCAHIIGNCPVTQDARIKRHNYICELLLEEAKKKDWVVFKEPHIRDSNKELYKPDLIFVKDARALVVDVTVRYEAAKSSLEEAAAEKVRKYKHLETEVRHLTNAKDVTFVGFPLGARGKWHQDNFKLLTELGLSKSRQVKMAETFSTVALFSSVDIVHMFASRARKSMVM

SEQ ID NO: 1659 - protein, 1671 aa, synthetic construct
MGTALTPLLTKFATRYEMGTTPEEVANTLKQTCFKGQVNDSQMVALLIVADQYKLNPFTKELYAFPDKNNGIVPVVGVDGWARIINENPQFDGMEFSMDQQGTECTCKIYRKDRSHAISATEYMAECKRNTQPWQSHPRRMLRHKAMIQCARLAFGFAGIYDQDEAERIVERDVTPAEQYEDVSEAICLIKDSPTMEDLQAAFSNAWKAYKTKGARDQLTAAKDQRKKELLDAPIDVEFEETGDDRAASGGSSGGSSGSETPGTSESATPESSGGSSGGSSMASCPKPGPPVSAGAMSLESGLTTHSVLAIERGPNSLANSGSDFGGGGLGLPLRLLRVSVGTQTSRSDWVDLVSWSHPGPTSKSQQVDLVSLFPKHRVDLLSKNDQVDLVAQFLPSKFPPNLAENDLALLVNLEFYRSDLHVYECVHFAAHWEGLSGLPEVYEQLAPQPCVGETLHSSLPRDSELFVPEEGSSEKESEDAPKTSPPTPGKHGLEQTGEEKVMVTVPDKNPPCPCCGTRVNSVLNLIEHLKVSHGKRGVCFRCAKCGKENSNYHSVVCHFKKCRGPETEKAPAGEWICEVCNRDFTTKIGLGQHKRLAHPAVRNQERIVASQPKETSNRGAHKRCWTKEEEELLIRLEAQFEGNKNINKLIAEHITTKTAKQISDKRRLLSRKPAEEPREEPGTCHHTRRAAASLRTEPEMSHHAQAEDRDNGPGRRPLPGRAAAGGRTMDEIRRHPDKGNGQQRPTKQKSEEQLQAYYKKTLEERLSAGALNTFPRAFKQVMEGRDIKLVINQTAQDCFGCLESISQIRTATRDKKDTVTREKHPKKPFQKWMKKRAIKKGNYLRFQRLFYLDRGKLAKIILDDIECLSCDIPLSEIYSVFKTRWETTGSFKSLGDFKTYGKADNTAFRELITAKEIEKNVQEMSKGSAPGPDGITLGDVVKMDPEFSRTMEIFNLWLTTGKIPDMVRGCRTVLIPKSSKPDRLKDINNWRPITIGSILLRLFSRIVTARLSKACPLNPRQRGFIRAAGCSENLKLLQTIIWSAKREHRPLGVVFVDIAKAFDTVSHQHIIHALQQREVDPHIVGLVSNMYENISTYITTKRNTHTDKIQIRVGVKQGDPMSPLLFNLAMDPLLCKLEESGKGYHRGQSSITAMAFADDLVLLSDSWENMNTNISILETFCNLTGLKTQGQKCHGFYIKPTKDSYTINDCAAWTINGTPLNMIDPGESEKYLGLQFDPWIGIARSGLSTKLDFWLQRIDQAPLKPLQKTDILKTYTIPRLIYIADHSEVKTALLETLDQKIRTAVKEWLHLPPCTCDAILYSSTRDGGLGITKLAGLIPSVQARRLHRIAQSSDDTMKCFMEKEKMEQLHKKLWIQAGGDRENIPSIWEAPPSSEPPNNVSTNSEWEAPTQKPKFPKPCNWRKNEFKKWTKLASQGRGIVNFERDKISNHWIQYYRRIPHRKLLTALQLRANVYPTREFLARGRQDQYIKACRHCDADIESCAHIIGNCPVTQDARIKRHNYICELLLEEAKKKDWVVFKEPHIRDSNKELYKPDLIFVKDARALVVDVTVRYEAAKSSLEEAAAEKVRKYKHLETEVRHLTNAKDVTFVGFPLGARGKWHQDNFKLLTELGLSKSRQVKMAETFSTVALFSSVDIVHMFASRARKSMVM

SEQ ID NO: 1660 - protein, 1390 aa, synthetic construct
MASCPKPGPPVSAGAMSLESGLTTHSVLAIERGPNSLANSGSDFGGGGLGLPLRLLRVSVGTQTSRSDWVDLVSWSHPGPTSKSQQVDLVSLFPKHRVDLLSKNDQVDLVAQFLPSKFPPNLAENDLALLVNLEFYRSDLHVYECVHKAAHWEGLSGLPEVYEQLAPQPCVGETLHSSLPRDSELFVPEEGSSEKESEDAPKTSPPTPGKHGLEQTGEEKVMVTVPDKNPPCPCCGTRVNSVLNLIEHLKVSHGKRGVCFRCAKCGKENSNYHSVVCHFKKCRGPETEKAPAGEWICEVCNRDFTTKIGLGQHKRLAHPAVRNQERIVASQPKETSNRGAHKRCWTKEEEELLIRLEAQFEGNKNINKLIAEHITTKTAKQISDKRRLLSRKPAEEPRMEPGTCHHTRRAAASLRTEPEMSHHAQAEDRDNGPGRRPLPGRAAAGGRTMDEIRRHPDKGNGQQRPTKQKSEEQLQAYYKKTLEERLSAGALNTFPRAFKQVMEGRDIKLVINQTAQDCFGCLESISQIRTATRDKKDTVTREKHPKKPFQKWMKKRAIKKGNYLRFQRLFYLDRGKLAKIILDDIECLSCDIPLSEIYSVFKTRWETTGSFKSLGDFKTYGKADNTAFRELITAKEIEKNVQEMSKGSAPGPDGITLGDVVKMDPEFSRTMEIFNLWLTTGKIPDMVRGCRTVLIPKSSDPDRLKDINNWRPITIGSILLRLFSRIVTARLSKACPLNPRQRGFIRAAGCSENLKLLQTIIWSAKREHRPLGVVFVDIAKAFDTVSHQHIIHALQQREVDPHIVGLVSNMYENISTYITTKRNTHTDKIQIRVGVKQGDPMSPLLFNLAMDPLLCKLEESGKGYHRGQSSITAMAFADDLVLLSDSWENMNTNISILETFCNLTGLKTQGQKCHGFYIKPTKKSYTINDCAAWTINGTPLNMIDPGESEKYLGLQFDPWIGIARSGLSTKLDFWLQRIDQAPLKPLQKTDILKTYTIPRLIYIADHSEVKSALLETLDQKIRTAVKEWLHLPPCTCDAILYSSTRDGGLGITKLAGLIPSVQARRLHRIAQSSDDTMKCFMEKEKMEQLHKKLWIQAGGDRENIPSIWEAPPSSEPPNNVSTNSEWEAPTQKDKFPKPCNWRKNEFKKWTKLASQGRGIVNFERDKISNHWIQYYRRIPHRKLLTALQLRANVYPTREFLARGRQDQYIKACRHCDADNESCAHIIGNCPVTQDARIKRHNYICELLLEEAKKKDWVVFKEPHIRDSNKELYKPDLIFVKDGRALVVDVTVRYEAAKSSLEEAAAEKVRKYKHLETEVRHLTNAKDVTFVGFPLGARGKWHQDNFKLLTELGLSKSRQVKMAETFSTVALFSSVDIVHMFASRARKSMVM

SEQ ID NO: 1661 - protein, 1390 aa, synthetic construct
MASCPKPGPPVSAGAMSLESGLTTHSVLAIERGPNSLANSGSDFGGGGLGLPLRLLRVSVGTQTSRSDWVDLVSWSHPGPTSKSQQVDLVSLFPKHRVDLLSKNDQVDLVAQFLPSKFPPNLAENDLALLVNLEFYRSDLHVYECVHKAAHWEGLSGLPEVYEQLAPQPCVGETLHSSLPRDSELFVPEEGSSEKESEDAPKTSPPTPGKHGLEQTGEEKVMVTVPDKNPPCPCCGTRVNSVLNLIEHLKVSHGKRGVCFRCAKCGKENSNYHSVVCHFKKCRGPETEKAPAGEWICEVCNRDFTTKIGLGQHKRLAHPAVRNQERIVASQPKETSNRGAHKRCWTKEEEELLIRLEAQFEGNKNINKLIAEHITTKTAKQISDKRRLLSRKPAEEPRMEPGTCHHTRRAAASLRTEPEMSHHAQAEDRDNGPGRRPLPGRAAAGGRTMDEIRRHPDKGNGQQRPTKQKSEEQLQAYYKKTLEERLSAGALNTFPRAFKQVMEGRDIKLVINQTAQDYFGCLESISQIRTATRDKKDTVTREKHPKKPFQKWMKKRAIKKGNYLRFQRLFYLDRGKLAKIILDDIECLSCDIPLSEIYSVFKTRWETTGSFKSLGDFKTYGKADNTAFRELITAKEIEKNVQEMSKGSAPGPDGITLGDVVKMDPEFSRTMEIFNLWLTTGKIPDMVRGCRTVLIPKSSKPDRLKDINNWRPITIGSILLRLFSRIVTARLSKACPLNPRQRGFIRAAGCSENLKLLQTIIWSAKREHRPLGVVFVDIAKAFDTVSHQHIIHALQQREVDPHIVGLVSNMYENISTYITTKRNTHTDKIQIRVGVKQGDPMSPLLFNLAMDPLLCKLEESGKGYHRGQSSITAMAFADDLVLLSDSWENMNTNISILETFCNLTGLKTQGQKCHGFYIKPTKKSYTINDCAAWTINGTPLNMIDPGESEKYLGLQFDPWIGIARSGLSTKLDFWLQRIDQAPLKPLQKTDILKTYTIPRLIYIADHSEVKSALLETLDQKIRTAVKEWLHLPPCTCDAILYSSTRDGGLGITKLAGLIPSVQARRLHRIAQSSDDTMKCFMEKEKMEQLHKKLWIQAGGDRENIPSIWEAPPSSEPPNNVSTNSEWEAPTQKDKFPKPCNWRKNEFKKWTKLASQGRGIVNFERDKISNHWIQYYRRIPHRKLLTALQLRANVYPTREFLARGRQDQYIKACRHCDADNESCAHIIGNCPVTQDARIKRHNYICELLLEEAKKKDWVVFKEPHIRDSNKELYKPDLIFVKDGRALVVDVTVRYEAAKSSLEEAAAEKVRKYKHLETEVRHLTNAKDVTFVGFPLGARGKWHQDNFKLLTELGLSKSRQVKMAETFSTVALFSSVDIVHMFASRARKSMVM

SEQ ID NO: 1662 - protein, 1390 aa, synthetic construct
MASCPKPGPPVSAGAMSLESGLTTHSVLAIERGPNSLANSGSDFGGGGLGLPLRLLRVSVGTQTSRSDWVDLVSWSHPGPTSKSQQVDLVSLFPKHRVDLLSKNDQVDLVAQFLPSKFPPNLAENDLALLVNLEFYRSDLHVYECVHKAAHWEGLSGLPEVYEQLAPQPCVGETLHSSLPRDSELFVPEEGSSEKESEDAPKTSPPTPGKHGLRQTGEEKVMVTVPDKNPPCPCCGTRVNSVLNLIEHLKVSHGKRGVCFRCAKCGKENSNYHSVVCHFKKCRGPETEKAPAGEWICEVCNRDFTTKIGLGQHKRLAHPAVRNQERIVASQPKETSNRGAHKRCWTKEEEELLIRLEAQFEGNKNINKLIAEHITTKTAKQISDKRRLLSRKPAEEPRMEPGTCHHTRRAAASLRTEPEMSHHAQAEDRDNGPGRRPLPGRAAAGGRTMDEIRRHPDKGNGQQRPTKQKSEEQLQAYYKKTLEERLSAGALNTFPRAFKQVMEGRDIKLVINQTAQDCFGCLESISQIRTATRDKKDTVTREKHPKKPFQKWMKKRAIKKGNYLRFQRLFYLDRGKLAKIILDDIECLSCDIPLSEIYSVFKTRWETTGSFKSLGDFKTYGKADNTAFRELITAKEIEKNVQEMSKGSAPGPDGITLGDVVKMDPEFSRTMEIFNLWLTTGKIPDMVRGCRTVLIPKSSKPDRLKDINNWRPITIGSILLRLFSRIVTARLSKACPLNPRQRGFIRAAGCSENLKLLQTIIWSAKREHRPLGVVFVDIAKAFDTVSHQHIIHALQQREVDPHIVGLVSNMYENISTYITTKRNTHTDKIQIRVGVKQGDPMSPLLFNLAMDPLLCKLEESGKGYHRGQSSITAMAFADDLVLLSDSWENMNTNISILETFCNLTGLKTQGQKCHGFYIKPTKKSYTINDCAAWTINGTPLNMIDPGESEKYLGLQFDPWIGIARSGLSTKLDFWLQRIDQAPLKPLQKTDILKTYTIPRLIYIADHSEVKSALLETLDQKIRTAVKEWLHLPPCTCDAILYSSTRDGGLGITKLAGLIPSVQARRLHRIAQSSDDTMKCFMEKEKMEQLHKKLWIQAGGDRENIPSIWEAPPSSEPPNNVSTNSEWEAPTQKDKFPKPCNWRKNEFKKWTKLASQGRGIVNFERDKISNHWIQYYRRIPHRKLLTALQLRANVYPTREFLARGRQDQYIKACRHCDADNESCAHIIGNCPVTQDARIKRHNYICELLLEEAKKKDWVVFKEPHIRDSNKELYKPDLIFVKDGRALVVDVTVRYEAAKSSLEEAAAEKVRKYKHLETEVRHLTNAKDVTFVGFPLGARGKWHQDNFKLLTELGLSKSRQVKMAETFSTVALFSSVDIVHMFASRARKSMVM

SEQ ID NO: 1663 - protein, 1390 aa, synthetic construct
MASCPKPGPPVSAGAMSLESGLTTHSVLAIERGPNSLANSGSDFGGGGLGLPLRLLRVSVGTQTSRSDWVDLVSWSHPGPTSKSQQVDLVSLFPKHRVDLLSKNDQVDLVAQFLPSKFPPNLAENDLALLVNLEFYRSDLHVYECVHKAAHWEGLSGLPEVYEQLAPQPCVGETLHSSLPRDSELFVPEEGSSEKESEDAPKTSPPTPGKHGLEQTGEEKVMVTVPDKNPPCPCCGTRVNSVLNLIEHLKVSHGKRGVCFRCAKCGKERSNYHSVVCHFKKCRGPETEKAPAGEWICEVCNRDFTTKIGLGQHKRLAHPAVRNQERIVASQPKETSNRGAHKRCWTKEEEELLIRLEAQFEGNKNINKLIAEHITTKTAKQISDKRRLLSRKPAEEPRMEPGTCHHTRRAAASLRTEPEMSHHAQAEDRDNGPGRRPLPGRAAAGGRTMDEIRRHPDKGNGQQRPTKQKSEEQLQAYYKKTLEERLSAGALNTFPRAFKQVMEGRDIKLVINQTAQDCFGCLESISQIRTATRDKKDTVTREKHPKKPFQKWMKKRAIKKGNYLRFQRLFYLDRGKLAKIILDDIECLSCDIPLSEIYSVFKTRWETTGSFKSLGDFKTYGKADNTAFRELITAKEIEKNVQEMSKGSAPGPDGITLGDVVKMDPEFSRTMEIFNLWLTTGKIPDMVRGCRTVLIPKSSKPDRLKDINNWRPITIGSILLRLFSRIVTARLSKACPLNPRQRGFIRAAGCSENLKLLQTIIWSAKREHRPLGVVFVDIAKAFDTVSHQHIIHALQQREVDPHIVGLVSNMYENISTYITTKRNTHTDKIQIRVGVKQGDPMSPLLFNLAMDPLLCKLEESGKGYHRGQSSITAMAFADDLVLLSDSWENMNTNISILETFCNLTGLKTQGQKCHGFYIKPTKKSYTINDCAAWTINGTPLNMIDPGESEKYLGLQFDPWIGIARSGLSTKLDFWLQRIDQAPLKPLQKTDILKTYTIPRLIYIADHSEVKSALLETLDQKIRTAVKEWLHLPPCTCDAILYSSTRDGGLGITKLAGLIPSVQARRLHRIAQSSDDTMKCFMEKEKMEQLHKKLWIQAGGDRENIPSIWEAPPSSEPPNNVSTNSEWEAPTQKDKFPKPCNWRKNEFKKWTKLASQGRGIVNFERDKISNHWIQYYRRIPHRKLLTALQLRANVYPTREFLARGRQDQYIKACRHCDADNESCAHIIGNCPVTQDARIKRHNYICELLLEEAKKKDWVVFKEPHIRDSNKELYKPDLIFVKDGRALVVDVTVRYEAAKSSLEEAAAEKVRKYKHLETEVRHLTNAKDVTFVGFPLGARGKWHQDNFKLLTELGLSKSRQVKMAETFSTVALFSSVDIVHMFASRARKSMVM

SEQ ID NO: 1664 - protein, 1390 aa, synthetic construct
MASCPKPGPPVSAGAMSLESGLTTHSVLAIERGPNSLANSGSDFGGGGLGLPLRLLRVSVGTQTSRSDWVDLVSWSHPGPTSKSQQVDLVSLFPKHRVDLLSKNDQVDLVAQFLPSKFPPNLAENDLALLVNLEFYRSDLHVYECVHKAAHWEGLSGLPEVYEQLAPQPCVGETLHSSLPRDSELFVPEEGSSEKESEDAPKTSPPTPGKHGLEQTGEEKVMVTVPDKNPPCPCCGTRVNSVLNLIEHLKVSHGKRGVCFRCAKCGKENSNYHSVVCHFKKCRGPETEKAPAGEWICEVCNRDFTTKIGLGQHKRLAHPAVRNQERIVASQPKETSNRGAHKRCWTKEEEELLIRLEAQFEGNKNINKLIAEHITTKTAKQISDKRRLLSRKPAEEPRMEPGTCHHTRRAAASLRTEPEMSHHAQAEDRDNGPGRRPLPGRAAAGGRTMDEIRRHPDKGNGQQRPTKQKSEEQLQAYYKKTLEERLSAGALNTFPRAFKQVMEGRDIKLVINQTAQDCFGCLESISQIRTATRDKKYTVTREKHPKKPFQKWMKKRAIKKGNYLRFQRLFYLDRGKLAKIILDDIECLSCDIPLSEIYSVFKTRWETTGSFKSLGDFKTYGKADNTAFRELITAKEIEKNVQEMSKGSAPGPDGITLGDVVKMDPEFSRTMEIFNLWLTTGKIPDMVRGCRTVLIPKSSKPDRLKDINNWRPITIGSILLRLFSRIVTARLSKACPLNPRQRGFIRAAGCSENLKLLQTIIWSAKREHRPLGVVFVDIAKAFDTVSHQHIIHALQQREVDPHIVGLVSNMYENISTYITTKRNTHTDKIQIRVGVKQGDPMSPLLFNLAMDPLLCKLEESGKGYHRGQSSITAMAFADDLVLLSDSWENMNTNISILETFCNLTGLKTQGQKCHGFYIKPTKKSYTINDCAAWTINGTPLNMIDPGESEKYLGLQFDPWIGIARSGLSTKLDFWLQRIDQAPLKPLQKTDILKTYTIPRLIYIADHSEVKSALLETLDQKIRTAVKEWLHLPPCTCDAILYSSTRDGGLGITKLAGLIPSVQARRLHRIAQSSDDTMKCFMEKEKMEQLHKKLWIQAGGDRENIPSIWEAPPSSEPPNNVSTNSEWEAPTQKDKFPKPCNWRKNEFKKWTKLASQGRGIVNFERDKISNHWIQYYRRIPHRKLLTALQLRANVYPTREFLARGRQDQYIKACRHCDADNESCAHIIGNCPVTQDARIKRHNYICELLLEEAKKKDWVVFKEPHIRDSNKELYKPDLIFVKDGRALVVDVTVRYEAAKSSLEEAAAEKVRKYKHLETEVRHLTNAKDVTFVGFPLGARGKWHQDNFKLLTELGLSKSRQVKMAETFSTVALFSSVDIVHMFASRARKSMVM

SEQ ID NO: 1665 - protein, 1390 aa, synthetic construct
MASCPKPGPPVSAGAMSLESGLTTHSVLAIERGPNSLANSGSDFGGGGLGLPLRLLRVSVGTQTSRSDWVDLVSWSHPGPTSKSQQVDLVSLFPKHRVDLLSKNDQVDLVAQFLPSKFPPNLAENDLALLVNLEFYRSDLHVYECVHKAAHWEGLSGLPEVYEQLAPQPCVGETLHSSLPRDSELFVPEEGSSEKESEDAPKTSPPTPGKHGLEQTGEEKVMVTVPDKNPPCPCCGTRVNSVLNLIEHLKVSHGKRGVCFRCAKCGKENSNYHSVVCHFKKCRGPETEKAPAGEWICEVCNRDFTTKIGLGQHKRLAHPAVRNQERIVASQPKETSNRGAHKRCWTKEEEELLIRLEAQFEGNKNINKLIAEHITTKTAKQISDKRRLLSRKPAEEPRMEPGTCHHTRRAAASLRTEPEMSHHAQAEDRDNGPGRRPLPGRAAAGGRTMDEIRRHPDKGNGQQRPTKQKSEEQLQAYYKKTLEERLSAGALNTFPRAFKQVMEGRDIKLVINQTAQDCFGCLESISQIRTATRDKKDTVTREKHPKKPFQKWMKKRAIKKGNYLRFQRLFYLDRGKLAKIILDDIECLSCDIPLSEIYSVFKTRWETTGSFKSLGDFKTYGKADNTAFRELITAKEIEKNVQEMSKGSAPGPDGITLGDVVKMDPEFSRTMEIFNLWLTTGKIPDMVRGCRTVLIPKSSKPDRLKDINNWRPITIGSILLRLFSRIVTARLSKACPLNPRQRGFIRAAGCSENLKLLQTIIWSAKREHRPLGVVFVDIAKAFDTVSHQHIIHALQQREVDPHIVGLVSNMYENISTYITTKRNTHTDKIQIRVGVKQGDPMSPLLFNLAMDPLLCKLEESGKGYHRGQSSITAMAFADDLVLLSDSWENMNTNIKILETFCNLTGLKTQGQKCHGFYIKPTKKSYTINDCAAWTINGTPLNMIDPGESEKYLGLQFDPWIGIARSGLSTKLDFWLQRIDQAPLKPLQKTDILKTYTIPRLIYIADHSEVKSALLETLDQKIRTAVKEWLHLPPCTCDAILYSSTRDGGLGITKLAGLIPSVQARRLHRIAQSSDDTMKCFMEKEKMEQLHKKLWIQAGGDRENIPSIWEAPPSSEPPNNVSTNSEWEAPTQKDKFPKPCNWRKNEFKKWTKLASQGRGIVNFERDKISNHWIQYYRRIPHRKLLTALQLRANVYPTREFLARGRQDQYIKACRHCDADNESCAHIIGNCPVTQDARIKRHNYICELLLEEAKKKDWVVFKEPHIRDSNKELYKPDLIFVKDGRALVVDVTVRYEAAKSSLEEAAAEKVRKYKHLETEVRHLTNAKDVTFVGFPLGARGKWHQDNFKLLTELGLSKSRQVKMAETFSTVALFSSVDIVHMFASRARKSMVM

(The sequence listing continues in the following parts.)